United States Patent Application Publication US 2011/0183924 A1 - sequence listing, part 231

SEQ ID NO: 615433 - DNA, 1039 bp, Homo sapiens
  misc_feature (574)..(574): n is a, c, g, or t
  misc_feature (583)..(583): n is a, c, g, or t
  misc_feature (593)..(593): n is a, c, g, or t
agcggagaggttacatgacaagatgtcggcggatggtagcttcgagcccttgcggagaggagcatctctgtgacagaatgcttgtctgactggcgtgcttctagtgagctaagtcgaagagagcgagggttgagcgcggggcagctgaccctgtcagggtcgcctcaaccttgggcaacctggcccagactggcgaagactgtgaacttgtggggacccgccaggggggaggtggaagaagtggtgagtgtgcgcaaaatgagctacgtatattgcaccctggtaatccaccgcgtagggaaggcgcgtggagagcgcaatgcttcctgcttgggaacccgcatttcgattggcctgcattgacctgggtggttagaagcgcctgccgagaaattgacacgagcgaacgacacaggcagaccaagggggcttttggaaatgcgccaaagtgcccatacttagaattgaagccgcagtcgatgggtcgatcgtagcgattcagacgagacgagtagaattggtcccaggcaggagagagattcgtggatatggtagcgcgactatatgtagtgancactttgancgttagttantcttcccgccagcgaggatatggcagaagactattggagattaggacagtacagaggtgtggaaacgagacgagagacaaggtgggtacgacgatcattagcgcggaagataaaggggagtcgagatggagttttacgaagtgcttgacttattagtttagtaagtggacgccaaacgttgagaaaggtttggtcagcaggtgtaatcgaaaagagaggaagacttcaatgtatattatgccaattgcgttattgcaggcttgcagagatagtggctgtgggacccctgagtgcgaggaacattggagaaacttctgccattaacggattccatcagaagctatgggaaaccacgattgaatgaggttacaggttcctgaagaatacgcagatcaatattgcttgcatccaggccaaagaaaggtcctccagtttggtgggaacca

SEQ ID NO: 615434 - DNA, 1074 bp, Homo sapiens
gcagctggcaggagggtggcacttcgtggatgacctccttagaaaagactgaccttgatgtcttgagagcgctggcctcttcctccctccctgcagggtagggggcctgagttgaggggcttccctctctgctccacagaaaccctgtcttattgagttctgaagtgttggaactgctgccatgattttggccactttgcatacctgggactttagtggctagaccagttctctttgtacacggacttgtgcctcttgggagacgtccacccgtttccatgcctgggtccaccggcagtctctggagtgtgtgggggttctgggaggcgggtcccagagccccctgtccttcccacgggctactgcgagtcacccctgtatggcccgactgtgctgttgtctgccgtgagagccctaatctgtgcctataccccttcatcacgtcacaatgtcccgaattcccagtcctcaccatcccttctcagtaatgaccctggttggttgcaggagagtacctactccatactgagggtgaaattaagggaaggcaaagtccaggcaccagaggtgggaccccagcctctcactctcagttccagtcatccaactgggaccctcaccaggaatctcaacgatctgattcggtgcctgtatcctcctccgtcacagatgtgagccaggtgactgctcagctgtgaccctaggtgtttctgcctcgttgacatggaggagagccatttcccgttagaaggcctggacctttcgtgagctgagccacagcagcaggctgggtgtctgggtgcacgaggaggaccaggatgcacggcaggcccaggaggccccagtctcgtgtcccaatgacctagttgatgtggaaggtcccagaaagcaggcgtggtaaggccacttcatttgtaagcctcaacgcagagaggagaccccctgggaagggattccacgagccatgagacagatatgtattgaggacacatatattggcgccccatgcgaagaaaggcagttgatggaccagcttgtgtaggaaaaaactcttgtggagaaaagtactacagg

SEQ ID NO: 615435 - DNA, 225 bp, Homo sapiens
  misc_feature (32)..(32): n is a, c, g, or t
  misc_feature (151)..(151): n is a, c, g, or t
cacagaagagcagcttttgaaagataaaaggntccagcagaaaattaaacgattcaaattgagacaagcacaaagagcacatttttttgcagacatggaagaagaaccatttaacccagactacgttgaagtagacagagtattagaagtntctttttgtgaagataaggatactggtgagcctgttatttactacttagtaaaatggtgctcattgccatatta

SEQ ID NO: 615436 - DNA, 920 bp, Homo sapiens
attggacgatgacaccccagtctcctagacatggtaacagggtcacggctcgtacccagactggagtcacgcctggcgtagaccactcgcttgtggctcctggcaagcggggagtggacgtcccaggacgcatcagccggccgcggaaggcccagggacccgggctcagacgcggaagacctctaatagcgcgagtctctgtacgggtcatgtcggtcgagacgaattggcctgttcgtggtcagcttcatgtcagggtgctaactgttgaaaagcttcttcacagaattacgacccatcgagtcagggcagtccacgtcctagccccggcatcctgctctagggcccctcatgccccaggctggagcagctctcctaggtcacatgcctgctgggctgggtcgcgtagcccagggtggaggcagaacgatgctgctgtggtacgcctctttgcctttcatgcccatgctggattgtccttgcacctcagcagctgaaggtactcagagaccagtaatcagaaggcatccgatcgtgcaggtaagtgtgcagcgctgagaagacaatgtacaactaaggcacaggggatttagccactgtgggagggtggacaggcaaataggtttcacgtggccatggcatgttaggcaggaactctaagtgcccaaggcctcgttgggctagcttgagggaccgtgcgctcctgtgttctatgagtgcatgggtcatcttgtctatgggtgtcctatcccatatggagaagaaacggggctctaagttaccggctcttctttctttggggttctctgtacctgaaggaaaccaggacctgaggtgactttgcagatctgctcaccctcggtgagcaacagtgtcagccatggcaagcaggacagaatggtgactgggtgcccgtggat

SEQ ID NO: 615437 - DNA, 133 bp, Homo sapiens
tgtcacacagcttggagtgcagtgtttgatcatagttcattgcagcttcaacctccctggctcaagcaattctcctaccagggcatttatttttcacatctctgcatgcatccaacagtgctgtgtgcccccc

SEQ ID NO: 615438 - DNA, 266 bp, Homo sapiens
gacagggaggcttactctggcacccaggctggagggcagtagtgcaagctcggctcactgcaacctcaggcaggactatttttaattatttttaaaacccgcaaaagggaatctgcccatgcccatccgggtttttacaaaaaactgggacccatggcaaacctgtttgcctttgggggcccacatgaaccatttggcaaaggcatccaatgctaacggggcccaccaactacaacgggggcaacaactctggggattttttttca

SEQ ID NO: 615439 - DNA, 980 bp, Homo sapiens
ggtcgcgccatgttttgatggcaggaagagtccggttctgggaaaagctggagacagtggtggtgactgcaaataacttgaccaaaggatagctataccgcgaagtatgttctccagtcgaagatgggcaatgtgcttggttaacagagccagactggtttccttatctcccaggattacgctctttagtttgacacgggttgtcaatcccaaagccttttcgacggctaaggatcgtcacggttcggatgagtctcatgtggcgtgctgcatctccagatatatgctgctctgaacaagtgtggggccttgatgaaaggctatggagaccctttgaacctcaagatcagaggttccaagcttgctgggaacgctagggtcattgatatgtcacctcgagtgggactgcttccacaggaagtagaaagcctggtatcatacacatctgttgggctgatgttgccgaagcagaaaccctttgagtcgaagtgatagaggagcactgacgttctgtcgagtgggccacacgtatgtgcaactgacattgcaggggtgtaatgactgcacctgttggaacaaagaaactgaccagtgtcagaagactttactttgggaaagctgccaggaggtagacgtggtgcaattaacagaaattgtggtgctaggaaattgctagggaagaaagtattttgggaaatccacgtggtttcccagaaagtgagccacatggccacaactagatgatgtcttgactgtgaacagcatagacaaactgaagaatgattatgcccgttctggcagtgcacgaaagtagagatggaagggaagaggtggctctttaacaaggagttcatccattgcgtgctaagggaacatttgccatgcccctccgagtggaggtaatgggggtcgctttattggcccatcactgggtgggattttgggacgctatccaagcaaccttcgcaatgtgagctgcg

SEQ ID NO: 615440 - DNA, 109 bp, Homo sapiens
gcacatgtaaacattgctgaatacttttgccctagctccaatgttcagcttctcgtactttacgagacttaaatcgtccaacaaatactcagcgatcatttggggagca

SEQ ID NO: 615441 - DNA, 648 bp, Homo sapiens
ttcttgtctagctagaatgatggcttctctctgtgtagctaactgttcttgctgtgcctgcaagcacgagaagaataacttgaagagaaaagagtgaatgggagggaagaatatcggccgagcaggtcgacgcctctccgtgacccctagtaccaagcattcattcgcctcatacctcttaatgaatctgagagaaaccaagaagccatgttcaattaagcagagataatatagtatcctcaggtcactcagagataccaacattgcctgatgggctgtgggtttatcacatcttgtcttacctcaacaagataatttgattgcacttgaagaacactctgcatgcacagacagatttccttccttctattgagaaaacccagaaagaatggctttgtcaacagcatgtcacaatttgaggaacaaggtatcttctgagcatttatccagtctcaccatggtgcatttgcaggcacttcaacagcagttagatacacagaagacagccattcgatctatacaggaagtccaagaagaatcgcttccggcaagcattacgtgcaattggcagaaaagggtatcatctgaaccagttgctcctcttcatttgtatcccaggtgcctggttgtctgactctgaaagaaccc

SEQ ID NO: 615442 - DNA, 151 bp, Homo sapiens
ctcggcgacatgctactacacacgcgacacagcatcatcactgtaacacagcacacacagctccacacacaaacacagcacacacatgcacacagcacatgcacacacagcacacacatgaacacagcacacagcactaggtgtctgccaa

SEQ ID NO: 615443 - DNA, 365 bp, Homo sapiens
aacggatgcgtccgcactggactctgcacacttcttacaatctgatagtaatctgcagagcagcagagatacggcaaggtgcacagagatggaaatataaaatccacgtaagttatgcagagctgacaggaccacgtcttaggttccatggagaaggtggcaagcccggtccccaggccgacgagaagataggcgatgaagtagagggtgcggacgctgagagaactcctccagcttctccaggatagctgaagtagaaggcaagccactgaaggcgtagatacacaatgccccaacagaccatggtcacgccgatataagtacttctgatacagcctctgatgtgtgcggggcctagtaaggga

SEQ ID NO: 615444 - DNA, 770 bp, Homo sapiens
ggaccgggtgactggctgacttacagcagtcagactctgacaggatcatggctatggatggaggtccaggggggacccagcctgggcatcgagaccgtgcgtgctgatcgtgatcttcactaggtgctcctgtcatggctctctgtgtggctgtaagcgttagcgtgtagcatttaccaacgaggctgaagcagatgcatggacatagtactctcaaagaggtgtggatggcttgtttcttaatgatgaagatgacaggttattggtgagcccttatgatcgaacggagagtatgaaggagacctctggtggcaagtcaagtggtgaacttccgtcagttcggttagaaggaggattttgagaagcttctgaggaaaccatttctagagttcaggaaaagtaagaaagatatttgctacccgtagttgagagaaagaggtgcgctcaggagagtagcgagttcagataactgggacctagaggaagaagcaaacagattgtcgtacgtccaaagtaagagagaatgaataaggctcatgggtcgaaaaataatatcctgggaagtcatcaaggagtgggcagttcgattgtgagcgaaatttggatttgaggaatgggtgaactgggtgatccatggtaaaaagggtttgagtaacatctattcgcaagatatactttcggattgcagggaggaaatagaaagagagacacagagaaggacaaaagaattggtccaatatgtttgagaatggaggagttatctgactgat

SEQ ID NO: 615445 - DNA, 134 bp, Homo sapiens
aggatacccccatcatcgatttggacatgctgtaccatgtaatctgaggcctgcagctcctggatttcctcttcgtggagtttcttcaacagacaggcaatctcttcttgcaaagattccactttgacgttcaa

SEQ ID NO: 615446 - DNA, 548 bp, Homo sapiens
ttcatagtgaatgatgagaaaagaaatgtcaaggagatttattgttttcatgctagtattcattctgcggcccatggatcaaggagtcgcttttacttttaacttagtatttaagaaatacatttcataaagttatagccataataggtggtgattcctgtgatggatctgggcaaaataaattgaaaaccttctggaaaggattctcttctagatgcgattaatggcattcataattcacaggaggagatcaaaatggcaacattaactggagtttggaagaaatagattccagttctcaaggatgattttgaggggttcaggacttcagtggaggaattatgcagatattgtgaaaatagcaaaaacccctagaattagaagtggagccttgaggatgtgacttaattgctgcaatcaaataataaaacttgaagggatgaggagttgcttctaatggatgagcaaagaaagttgtcagacagcatcacatgctacagagaaatctttcttgaaaggaagagtccatggagcaaacttcattatta

SEQ ID NO: 615447 - DNA, 1353 bp, Homo sapiens
ggcttgaggtatccgcagaaacggccgggtggcggcgaggcaaccgtgtacgggaactgcaagtagcgtgcattatgcctgtgtcaagatgcacaacctctcaaaagcaccgagatcttcgtggcatgagcccatgggggagaagccagtggggagcctgtgctgggcattggtgaagtcctgggcaaagtaagctggcaggcagagggggtctaggcacaagggcctcatgtggtccttggcccagtttctgtgtgctcaaaggcacacgatgaagaagctcttccggggaatggcatgaaggcagacttgtggggtgccaacagccgaaggcagtcccgggaacgtgcttacggatgcccttcgagaagtgggtagcgaacagccatatcgtttgtgaatgcatctccttggggcacaggctcttctaaatcgcacaagggaccttctataccagaaggttcttgaaaggcagaagtaaaggggaactgccgtccgcgattggtccctcataccgaactgggcaaacatgcaattggcaaaaagtggggtaaagcataacatgtcaacgcttcacgggaatggttcactgcacggaggggatcacttaaatgggagaacggatatcagtacgccgcattagaggccacatatatcacaaccatatgaaaaggattgggggcacattacataaggacatcctttgccgattggaccaatcgacaagcggtagaccattttatagaccacacattgtgaccgaaaggccaacccccgaatgatgagtgtgacacccaggaagtagaggacacgagggactaaatacaaccacttgacacattgtgtagggaaatgtatacccagcaggaggagacacaaccaaaagtgcggcgacaaccacacgcaccagaacaacgacgatgcaccaaagaagtaaattaagacgagaagcccgaggtgtaatgaagaacacaagaccagcatgacaacggcgggcagaccacacatagacagacaagagagcggaaagatgacacccagggcagcccacacaggggaacgcgccgcagctggtaagaaagaggatgcacatagacaggcggaaactcacacacagaacacaacgagtgatcagcggagtggaaatcaatcaccacagtcacaacagaacaacacaaacagctacagaaaaacacacaaaccaccaacaacaaccaccccagaaccagtacgaccgacaagacacaagcacacacaaaagacgcacgaccggagcccacgaccaacgacgaaacacacacagacagaacgaacgtacgaaacattacaacacaacggagcaccgaacacaaa

SEQ ID NO: 615448 - DNA, 178 bp, Homo sapiens
tttaatttttaataacaaagatactgtattttaacatggtgaaatatacttggctaagtccagattaaaaaaaaaagtatctagccaacagtacattatacagctttgtacagacatcatagatcacagaaatacattgagcacaaataaatattagagatctctagcgcattattgc

SEQ ID NO: 615449 - DNA, 149 bp, Homo sapiens
ccaaagacatcatgtgtcatttgactgaatcctcataacagacctctatggactacacacataaatactaagaagaaactgaagcccagggaacattaactcacattgtctcagggttgcacagcatggatttgagagaggagcatggg

SEQ ID NO: 615450 - DNA, 283 bp, Homo sapiens
taactgaaattttttttaaaaatattttttagattggtaatattttaaccagcaaaaacttaaagctttttttaacctttttatcaaataagtgagtaaagcttttttttgccctttggatgccttcgttcaaaatgataaagtgtttttcttatagtgctgtaacagcagttgtaaaataaccaaaaaccccgttgttttttttctggtttgtggcctttttctgtgctttgtatcaaagtttttaacaaaattaataaatcccccccgtttttatttttta

SEQ ID NO: 615451 - DNA, 458 bp, Homo sapiens
atgcgacgccctcgccattcactctccgcgcccgttctccggctgtcctcccgttccgtgtgcccgccctggccagcatgacggaacaggccatctccttcgaccaaagacttcttggccggaggcatcgccgccgtcatctccaagacggccgtggcgtccgatctgagcgggtcaagctgctgctgcaggtccaacacggccacgcaagcagatcgccgtcgcgagcaagcggtacgaggcgcatcgtggactgcattgtcctgcatccccgaggagcagggcgtgctgtccttctggaggggcaaccttgccaacgtcagttcgctacttccctcactccaatgccctcagatcttcgccttcacaggagtagagtacaaggcgagatcttccctggggggctgtagggcacaacgaccacagcgcagattctggatgtgtactttgcagggtca

SEQ ID NO: 615452 - DNA, 871 bp, Homo sapiens
ctcggagtctgtgcagagaggcttcagatgctggcggatccccggctccttcgactcctagcgccttcacgcttctcctccgggcggcattccagagtctgctggacgcccaggcggacgaggccgtgttaggtaagccgctcggctcggctcggagctggatcctgccggggctggaggggctggctcgtgagaagaggagccgtcggagcgagaaggggaaagccccgggaagaggaagtctccggtgctttgcccttcgctccgtgacggagtgttggaggacgtggctctgccaggactcggagcgagactctgagcattgttttgtgccccatcttggcacctgcatagatgccaactccatcgttacctgagcccgcgtttccactccctagtctcatttgttcttattgtaaagccgagtgttcaacgtcttgtatgtaggcctaaactatctaacggtgttgtagccttgtctgaggctgcggctgtttgtgacagttggacttcatctggggagctcccttgcaattcaagcttccagggctaggctagcaaaggtataagggtctgttccgaagtaattactaggtcagacagtgttgacatttgccaagcttagagcatacctcaagttgctatgatcacgtccagcgctctagttcagcatgtttacacaggttctacgccttagaaccttaaactatgatgcacgaatacctttgttaccgaccccaggttacccagcgatgcgagtgtctttaagccgatccggtcagtactgcggaggtgcagtgtcgtaatgcgttgaagaccttattttaactaccggatcgctttaacatgatttcgttaatattagtatcca

SEQ ID NO: 615453 - DNA, 321 bp, Homo sapiens
  misc_feature (210)..(210): n is a, c, g, or t
aatctacggagacagcagcagactaggattccacggaaccacgtgtttgactgaagctagtgatctgtaggagcaacgcgagccaagccagcacttcgtgtgctgaagattggacacgagtccagcgagccagtgcgatttgcgtgaaggaagctaggaataatgaaggagcgctcactatttggtggtgaatctaggaaatcggattcncggaaggagcgcagtgccctttggtgatcaaggtcgcatgcggcttggcttggccaccacaccgaggcatgctacgcagcgcgttgtgcgtagagtatccttgagctccat

SEQ ID NO: 615454 - DNA, 1527 bp, Homo sapiens
  misc_feature (328)..(328): n is a, c, g, or t
  misc_feature (721)..(721): n is a, c, g, or t
cctactgcgtacgattcggagtgtggctagtgctgggcattggccggcggtcgtggtgctgcggcccgcgcgctggccgtgctgattgcaggttgtggcggatctccgagtgggtccagccaaacgacagcgtagaggaagcgcagaggtcgatcaggggtcgtggtgtgcttgtgagctggccatcgcgacggtccatccggatctattcctcgcgcgatggcgccctgggacacccgagattagtgatcgagatgctgtagtgttccgagtactaaatccacggtgttgatacaccaagaaaccacccataaacaaacctatggcncgacacctcgtttctcccttctctatgggcaatggtttcgtcaacaaacacaatatcgttgctgtgtccattgtggtgtttacctttgttgaccctcgtggatggcgagctcttgaaggtcgcaacggatcgtcgagttggataaccctaacaaaacaccccaccgtgtctaggttgtccatagggacccaccgcgattgtgtctataccgccgtatcatatgtgcctcacgaaccgcgtgtatacgtctacacacttcgggcgcgccgttagcatgggtcatctccatttgtcacccctttgttaaggttgagcaggaccggtctttacgccttcgaatttagacggaatcgtaccgagtcatatccaaaactaggtaacgacatatatatnaagcttgctaccttgttacactatgagagggtggtgcttttgccttacagattggaggcaagacacaggtttacggcttcagagcgtgaaattccactgttttaggaatagcaaaggtggaataactttatccctaacagtgtagaattacccgaacgagacataggtccatgtgactacatagtgcggtgcaaaagggttaggactccttatagcgcatagtgaacaaaccaaaatacgcttatgcgaccccggatttaaatccttttgacagacgtcgcagaacttttatttggacacggcacaaacgtttaggtccccgagaaccttattgacggcggacacaacagcggggttggcgaacataatcccgggaaattgggacggttaagtttatccagaacgtgggtatccacggtggaaaatttagagacatttcacacggaatttgggcttccagcgtcaagttttacttggccaagaattaaaaacaaggcataggatgtaccccttagttatggtacacccggggggtttatgccacactcttttgaaaacacaaccacttgtgtgtttggggcatattatgaaagacggcggataaccagtaaaccagcgagggacaaaaggtgtggaacagtggtagggctacggggccacccgagtacttattctagggtcagacccccccagacttaatattgcgtgcgggggttataatcacaaccacatccggcgggttggggtattacagaaaccatttgtgtttcccctgagtttagattatcaaacccccacaccaagcc

SEQ ID NO: 615455 - DNA, 202 bp, Homo sapiens
ggactttttgccaactggccaagaccgtgccctgtagcagactgtggagttgattccacacaccccgacccggcacccgcgatcgacgccatggccatctacaagcagtacacaacacatgacggaggttgtgagtgcgctgcaccccaccatggagcgctgctcagatagcgatggtctggcccctcctcagcatcttatc

SEQ ID NO: 615456 - DNA, 1166 bp, Homo sapiens
  misc_feature (851)..(851): n is a, c, g, or t
gctttttcgctaccttttccccggttgctgcttgctgtgagctgtctctagggtgatacgtgggtgagaaaggtcctggtccgcgccagagcccagcgcgcctcgtcgacatgcctcggcaacaacttgacggaaatcaaggacttcctgctcactagcccgacgaaaggatgccaacatctgtcaaggatcaacgaacacacctacggaccaacgtgacgtcctccacgtctcgatgcagcagatacctttacaccctggttcatcactgaccaaagatgaagcgcacgagcaagctgaagcagtccctgccccccggttgggccggttgacaggaaacctgacacttgacacctaggacaccactgcattggaaagcggtcataactcattcaacaactactaaagatagtccgtaagagcagcaactaacccaaacacaacgcctcagcaaccaacctcaccaccacattttgagagggcgaggcatcatcgcgcacactcaagagcaccctctctagtccaacaacctcaggttgtgctctacactatcggaactcccagaatgatgatatatgtatgttcaaacacgtgctaggccattagcctttgtctacacctctagcagagctaaacccttagtgtacaagtaaccataaattcagcttgtcatcattcatcaccacttaatagacaactacggcgccatggggtcgatacaaccactgtagtccttagcaacgaaatcccgcaaatgtgtagcgtctctgacgcagcgtcattaccatggtggcaatttatctcacctagtagatctcactacgtcaactgttaataatcacatttagccncgctagctcgggggattcaaacccatcacgagtaacacgacggagcacacagatcgacaggacacctacacaacacaacatcaacaacaacagatcaagatcactacaatatgcaaaatggcgcatcggacaaccgagcggaagacacaagcagcgaagacaccgactggagacccacgcacagcagagagtcaacgaaaatgcaacggacgaatacacatacgaacggaaaacacagaaagcaaccacaccagacagagaacacaaggaaacataatagacaatgagacagagatgatgaacagaacaaagcca

SEQ ID NO: 615457 - DNA, 295 bp, Homo sapiens
  misc_feature (58)..(58): n is a, c, g, or t
  misc_feature (90)..(90): n is a, c, g, or t
  misc_feature (113)..(113): n is a, c, g, or t
  misc_feature (190)..(190): n is a, c, g, or t
  misc_feature (236)..(236): n is a, c, g, or t
  misc_feature (260)..(260): n is a, c, g, or t
  misc_feature (266)..(266): n is a, c, g, or t
  misc_feature (270)..(270): n is a, c, g, or t
  misc_feature (274)..(274): n is a, c, g, or t
attggttttcctcatccactgagaatgctgctggttactgcaaacgttcaccaaccanagctttggtccatacagctttcttctagattnggagactctcaaggacagcaggngctttaaaatccctggactgtgttgagagggcttctttaggcttttcatgatgtgaatagccagtcatgaactttgngtctgtttcttttaggctctttttgcagcagcagagccatgctatngaaggagtgagaacctatgcgagngacccngtgnttgnacttgccagggagcttggcgt

SEQ ID NO: 615458 - DNA, 853 bp, Homo sapiens
gtatttttagtagagacggggtttcaccatgttggtcaggatggtctcgatcttttgaccttgtgattcgcctgccttggcctcccaaagtgctgggattacaggcatgagacactgtgctcggccgatttttttttttttttttttggcccaggttgggagcgcatgggggcaaagatcatgggctcactgggggcctcaaactcctggggctcaagcaatggttcccacctcagcctcctgagtagctggggattacagggtgtgcaccaccatgccgggctattttttaattaccattttttttgtgtcagacgacagaagtcttgctatgtgcgcctaggctggctctggaactccgggccttaaaaaatcctctcacccgtcatcctccaaaaggtgcggggatcacagctggtgagccatggccaccgggacctattatggattttataaaacccctttaaaatatacatgggaaaaatacccttagcaaagtaaccgtatgtcattctcaacctaaaaccatttgagaggcctaaaattagggatattgggaggagcttttccatttaagattcgggaacccaaaattaaagaacggttactattttccactaaaatggttaagagggtaatttggggggaatcattaaacccagtgtgttgccctggctgtgaacaggaacacactatgttgagagtcttctccaaggaaaaattgctggagaggggggggttactatgaaacggttgtgtggggcaacaatgaggggggaaatttgtggggatgtcaaatttttcccaagagaatatataatgacaaaggggcttaattcgaaagcacagtgct

SEQ ID NO: 615459 - DNA, 212 bp, Homo sapiens
tggccaagcgcaaactttctctatacatttgcacgctattccgaggcgcgtcctgttgactctatgctctggatcccagagctctctgagacctagggccctgtagcacacaccgcgccttcctctggccacaatgtccgtgtgaatattcaggctcgacatgtaccacctttcttccatgccctggtggtccgggctctgttggcttccgc

SEQ ID NO: 615460 - DNA, 1185 bp, Homo sapiens
tgtttctataagggggtgtataaggggggtttatatatgggggaaaatatagggcgccttttttaaaaattttttagggagaattttttttatagaaaaagtgggtattaaaactgtgggtttggtcccaaaatttttaaaaatttgtgtgcgccgtattttattccccgcgggtgtggtgtgtgtggcgggtaaaagagtgtggtgtgtgggtttaaagacttctgcgggatatattggtttgtgtgtttttaaaacctttattgtgggggaaaccgcctccatgtggtgtgtgaaaaaaacgctttttgtggtcgtgtttattatttttttctacaaatatgtggggggttttacaagcgggggagaatctccttccctcgagatgtggtctaccgcgcctaaggagacttctccaggtgtctcccgtgtgtgtctctcctgagaaatatattgcgcgggggcaaacactttttgtgtaggcccccttgtcaacattatctcctctcccgcccgataatcgcggctgtctacccgcggtggggtcttcaacccccccttgtggtggcccacatatgtgtgtcttgtcggctgtggcctaaggggcgcgggggaactctcggttaacaccctctcctgtttgtgtctttcttctcacagggtctctgcctctcgcgcctctttggccgaggccgccacacccacgcgacccccacggacaatacctggcgggggacccaagacatatctctcccacagcgcgggctcctactatctcccccctccagccccccgcttacacaccgtctcccccaccaccccacaactcttacgttacgcccacccgccctccacgcaacaaagcggccccaccccccggccccctggacgccccccccttacgcgcccaaccagtattctatagcacgcgcgatcccccaccaacacgccgtgcaaacgccccttcccctcaccccggcggaccatcgtttctcaaaacatccgcaccgcccgcctctcatcaaatacccccaggggggccccccacactctcgccaccccccagctttcttacccgtgcgtcccccatgacctccaccaactcttcagcagccgccgcggctcttaaaacctcttacgtcgaaaacgtcacctgcaaccatcttcagcacacaccaccctcgg

SEQ ID NO: 615461 - DNA, 552 bp, Homo sapiens
  misc_feature (142)..(142): n is a, c, g, or t
  misc_feature (160)..(160): n is a, c, g, or t
  misc_feature (164)..(164): n is a, c, g, or t
ctaggacccagcgctgatagctcgacatctatgtacacataagaggtgcacgcaataagtctttaaggtagactgggcaatcacacagaactagaagcactgaagggagtgataccactaagcatgctacttttgtgtaganatattaactggtattgtnttgngaaaaaaaaaaatccctgtatctatgtaatcagagctggctttctggagaggatgacattttgaggtaaagagaaatgagtaggtagagatgaaaatgagatcacacagtgggtgagtgggaggatttaggaaaatgggttaggatccaaaaattacactgaaactttcaatattcaaaagagattatctcactccagtaggtatagcaaataaaaaataaaaagagagagactagaaaccaacccatgacatcaactagctctccatatgggacatttaacaacactacattttatggctagagtgtatcacttaagtcaaagtcaatatggggaggccaaggcgggtggatcacttgaggtcaggagtttgagactagcctggcca

SEQ ID NO: 615462 - DNA, 607 bp, Homo sapiens
cggcacgagcgcaaacccactctacattactatcagacacccttagacaaaccatatacccacataaagtgatatgcgatagaaattgagacctgtggcaatagatataggaccgcaagggaaagaggaaaaattattaccaagcataatatagcaagggctatacccctataccttctggatatatggattaactatgaaataactttgcaaggagagcgcacaagctatagacaccccgaaaccagacgagctacctatagaacacggttaaagagcacacccgtctatggagcaaaatagtgggaagaattataggtagaggcgacaaacctatcgagcctgtggatagctggttgtgcaagatatgaatcttaagtcaactttaaatttggccacagaaccctttaaatacccttggaaatttaactggtagagcaaagaggaacaggtctttggacactctgaaaaaaccttgtagagagagtgaaaaatttaacacccatatgtaaggctgcagacaccaatttaggcgggtaagctcaacacccactatctaacctatagaagaactcatgtgagggtaagtgacatgagcttctcctcc

SEQ ID NO: 615463 - DNA, 274 bp, Homo sapiens
ctggacagatggttctggcttcatattccatacaaacttatatcaaatagctagtcaagtaaaaatttacctgttctaaagatgaggccaggcacggtggctcatgcccgtaatcccagcactttgagagcgtaaggtgggaggatcgcttgagcccaggaggtggaggctgcagtgcagccgcgattgcacccactgcactcccagcctgggtgacagcagcaagcactctgtctcaacaaaaactcagttttcttttttttttttttttttg

SEQ ID NO: 615464 - DNA, 165 bp, Homo sapiens
atctccagctcggctctcaattgtggtatagaggcatgagcgcctgcacagcatatgattggctggacttgattggttcatccaggaatcctcaatgtcagtgtctttccagcttttctctttatatctcttccctggtcagatttccagtagagttctctactg

SEQ ID NO: 615465 - DNA, 791 bp, Homo sapiens
  misc_feature (14)..(14): n is a, c, g, or t
  misc_feature (59)..(59): n is a, c, g, or t
  misc_feature (66)..(66): n is a, c, g, or t
  misc_feature (161)..(161): n is a, c, g, or t
  misc_feature (165)..(165): n is a, c, g, or t
  misc_feature (203)..(203): n is a, c, g, or t
  misc_feature (259)..(259): n is a, c, g, or t
  misc_feature (261)..(261): n is a, c, g, or t
  misc_feature (264)..(264): n is a, c, g, or t
  misc_feature (307)..(307): n is a, c, g, or t
  misc_feature (310)..(310): n is a, c, g, or t
  misc_feature (328)..(328): n is a, c, g, or t
  misc_feature (343)..(343): n is a, c, g, or t
  misc_feature (390)..(390): n is a, c, g, or t
  misc_feature (414)..(414): n is a, c, g, or t
  misc_feature (475)..(475): n is a, c, g, or t
  misc_feature (619)..(619): n is a, c, g, or t
  misc_feature (669)..(669): n is a, c, g, or t
  misc_feature (789)..(789): n is a, c, g, or t
ggcggcggagggtnatgggcccgcgtggggctgggcgcggcgccgcacgagcaccagcntagagcnaggactgaagcttcaagatggctgatcaggaccctgcgggcattagcgccctccagctaaatggtggcctcaggaaccggggctgtggttacttntttntttatgatactcttggacgtggtgaaggttcgcttgcngttttagcggccctccatggccagcgagctgatgctttcctccagactgtggagcntnttntatactaaattgctctttttttttcaattcaaagggaagtgcnttntgtattgcaatggtgttntggagcttttgtacntgtgctcaaatggtgcccgctgtgccacctggttttaagaccctacncgctttattgggaccatggatgcntttgtgaagattgtgagggacgagggcaccaggaccctttggaggggcttccccgctaccntggtgatgactgtgctagctactgctatctactttattgcttatgatcaactgaaggcctttctgtgtgtgtcgagctctgacctctgatctctacgcacccatggtggctggcgcgctggcccgcctgggcaccgtgactgtnatcagccccctggagcttatgcggacaaagctgcaggctcagcatgtgtngtaccgggagctgggtgcctgtgttcgaactgcagtggctcagggtggctggcgctcactgtggctgggctggggcccactgcccttcgagatgtgcccttctcagccctgtactggttnaa

SEQ ID NO: 615466 - DNA, 321 bp, Homo sapiens
cgcggactgaccgacaaactgaggacacacgaatgattcaagatcaccacccgctggccaaggactttcctgagttcaaggacaagatccacgcgctgaagacctcgaatacgcatttcgccaagctggaacgtgagtacgaagacctggacaaggccatcgttcggctcgaaaccggcgtggaacacggctctagcatcgaactggaacaaaagaagcagcagcgcgttacccttaaggatgagctctacaacctgctgaaggcctgatcaccaggcagcaacgcttaaggcaatcgctgcacgctacctgatcgggtag

SEQ ID NO: 615467 - DNA, 398 bp, Homo sapiens
  misc_feature (371)..(371): n is a, c, g, or t
cacgaggcctccgcctcgatcacggttcgcggcaccatcttcgacgtgttcgtggaggacggcggcacgagctggctgctgctgcacgagggcgccgtgcgcgtctgcaatgcgactgggacctgccgcgatcattccgaaccgggcaagctcatccgcatctcgagcgggggtgagctcagcaagccgacccgatgggccacgctgccgggcatcgagaagatctcgttcgataccgcattcccattcgtcggcacgccgccgtcggtcgatcccaagcccgtgctcacccgcgaggccgtgcttcagccgacgtccgacacggcgaaggagactccgaagcgccgcgctgaagcacctaagaagaagcnccagcagcaggcttccgccgaggctac

SEQ ID NO: 615468 - DNA, 1195 bp, Homo sapiens
  misc_feature (537)..(537): n is a, c, g, or t
  misc_feature (644)..(644): n is a, c, g, or t
gcaacggggtgcggcagggtggggagcgcgggagcggggccagctcccaggaacatgctggtctgcgagcggcccctggccgggctcctcaggtcccatgctgacgagcccacgctcgcttccccgaggatccctcgagccgtggctgaccgccctgctggtcccggaagctccagcctgaagcacatgtttgttcgacttgtggccgcaaatgaggcacatgtgtggtcatcactggggttctaggcgaagccacccgcagacatggtgggctgcgtagcgcgccgtgctcgttctggtcctcgtcgcctgtcatacccaagcgagatctcgagaggatctctctcgaagcagcactgacctcttcaactgtcagagagtgcaagaaggttgacactctggcctatggggtacccattctccagtcgactggtcatttgcgccaggttaagaaatccaggggccagatacaacggagactgttgggcggggcgactggtacatgagtgattcctgtggcgaaaagatcgggatggngtgaggacttgcctgacatttgcctcgtggagagcgcttgggaagcgggccatccgagagtggccagtcatggggccagagtgacgtagtgagagtgacgatcgtantaacgggagcatggcaggacgagttgctcgagaacacgggtttgcaaagatgcgccctcctcaagacctggggtcaaatagtggggcatcacagtgtggggtccacgctaccaactcgttgaagggacattacaacggatgacgaggaactattttggcactcgttagggggaaagggctcgagacagttcaaagtccaaaaaaggatgcccggattgggaggaagcagaggccaggagagatgctgggatccggaaaggtagaggcacaggcacggaaaagggagtctggagcaggacctgagggcaatccgagactggcaagggcacgcaaagaattacggcactgcaaacagggccgctctatgacatgcagggcaaaaaccggacgaaccagggtggaccgtgcctactagagatagaggggccaagacacgccggacacgagaacaacagatgcagtgcacagcgcggagccaccgagcccagagtgagacaggaacaaacaacggtggaaaagacagcaccgtccagacaagagagaagcaacgg

SEQ ID NO: 615469 - DNA, 378 bp, Homo sapiens
ctttatcgagggtgttcaataaagtgaaagaagttatatcatgtaaagacatgtaattttcaagtaggcagaagaatcacaatctaaatagatagccaaatttggttttaatgggttatcttctataaaactaaggaggagagatacacaaaaacaaatggtaaatgtcaagttgaaaatagtttggggggtgggccaagacggccaattagaagcagctgcagtctgtggctgtcacagagaacaaaaacagggagtaaattctacaccttcaactgtgatatccaggttcttgcactgcgactgatgaggcaatcggcatgacccacggagagcaaggaaaagcaggatggggcaacaccccacctgggagagaca

SEQ ID NO: 615470 - DNA, 179 bp, Homo sapiens
gttccccaagggcgggggggttttttaaaaaaaaaaaaaaaggggggggggttttttttttttaaaaaggtaaaattgtttttccccaagggttatggggggggtgtttccccccttcccccttgggggggaaaagggtggggggtttgaaaaaaaaaaaaaccccggtttttttttca

SEQ ID NO: 615471 - DNA, 684 bp, Homo sapiens
  misc_feature (1)..(1): n is a, c, g, or t
  misc_feature (72)..(72): n is a, c, g, or t
  misc_feature (93)..(93): n is a, c, g, or t
  misc_feature (96)..(96): n is a, c, g, or t
  misc_feature (175)..(175): n is a, c, g, or t
  misc_feature (248)..(248): n is a, c, g, or t
  misc_feature (251)..(251): n is a, c, g, or t
  misc_feature (261)..(261): n is a, c, g, or t
  misc_feature (275)..(275): n is a, c, g, or t
  misc_feature (278)..(278): n is a, c, g, or t
  misc_feature (282)..(282): n is a, c, g, or t
  misc_feature (296)..(299): n is a, c, g, or t
  misc_feature (305)..(305): n is a, c, g, or t
  misc_feature (307)..(307): n is a, c, g, or t
  misc_feature (314)..(314): n is a, c, g, or t
  misc_feature (327)..(327): n is a, c, g, or t
  misc_feature (364)..(364): n is a, c, g, or t
  misc_feature (388)..(388): n is a, c, g, or t
  misc_feature (445)..(445): n is a, c, g, or t
  misc_feature (526)..(526): n is a, c, g, or t
  misc_feature (530)..(530): n is a, c, g, or t
  misc_feature (533)..(533): n is a, c, g, or t
  misc_feature (576)..(576): n is a, c, g, or t
  misc_feature (683)..(683): n is a, c, g, or t
ngggggggccctgccaggagagggcagctctgaactgctggctgggaccagctcagtgatggaacagatganagagaaagtcttctgaggccngtnggctcgagcgccagttgtcctcctgcgggtactacaggtgccactgccagtttctcaccgcgggaccatgcggctggtnagcagccccacgtacgcaatatgctttccagccgcgtctgtccgtctatatcccatctgaaagcgtctgtctncgncccgagcctnttatcctgcctccnatncagncttgtccctggttnnnnggcgcngncagagcnctggctttcgatnattaattattgaagttgtggtatggaaatccagtttncccctgtagcacctccggcaagtnaaccaagcttgactaaagcgtctgaagacttctcaccaggaggtagcggcaggtctngcacccagggatgcccaccacttttactgtgtcctcttcctcaggacacgtaaggtttttgtccaccatatctggcactgngatngantcaacagccccatctttcttggaggcatcttcacttccagagncccactcctcctcttcctccagctccctgcaaggggtctcctccatctcctgctctggtgtctcctcatcctcaggcagcgtcttagcacccaaaggggtctcaaang

SEQ ID NO: 615472 - DNA, 1586 bp, Homo sapiens
tccaaaaccaaaactttttaactccttggggcctcggggaagagggccgaggacagaagtgtgccagaggtgtgttccacgaggagaggggttaagccagaagagaggagctctacaggagggccgtaccagttccaattaccctgttgggggaaggaactgaagggaatgggagaattgggtactcccggagaggggggagctacacaggttcctggtgtggcccaggtttctctaagaaacctctggcgcctctcctctgagagtgttaccaacatgtggagatatccctatgcgacaggtcctgagaacaccacacaagtggctctgcgctctgaaaacaccctgagggggctcacagagcaagaaaaaacaccactgtcgtggcgcaaggggcgagaaaagggcgacatgcggcggagagcgcaaaacccacaaatgaacggcgcctctgtagcgctaccaatacacagtggggcgacatggagagagcaacatatccccaagtaggggagaaacaaacaggggagccaacagccgcccacagcgcggcaccagacgaacggggggccagcagaaaaagcggcctcaggacgggggcgaaacacaaccccccaaggcgcaacctagagaaacaaaaagccaaatagcccaccaatagaactctaccaaaaagggcgccaacaaagaaatcacaagcgagggggccacccaaacggaacaagagacgagaatatcgcaagaggggagggggacaacaacaagagagtcataaacacaacggaggggagcgcagcgaaagcatgactaaaacaaagcgagacgaatcgcccacacaacaatgaaaacacaggcccccaacacactcccccccccaccagaaagcagagaaaagaaaaaaatcaccaccaaacaaaggaggcaacccaacacaaaaacaacaaaagtaacaacgtttaggaataataggaatcaagagagaacaaaacaaaccactagtacacgcaccagcgcacgacaagaatgagacacaccaggaactgtgccatcacacacataacacaagagagaaaacaagaacacaccaaacccagccccagggggataaaaacaggagagaagcaaaccacacgtaatattggcgagaacaacaacaagaagaacataggacacaaaggtacaacagaaggtaggaataaactataagccccactacgacaaagacaacatatgtaaggtatgagagccaaaccaaaagaagaaaacaatccagacacaaaagcactaataaacagcccaggaggaaggagaccccatgtcaaccagagaacccgagaagagctacatctcatagacagaagtctctaagaccagaggaagaactccaactctgccttactcactagaaggaccacaaactacaaatcagtgagaaagagcttctcgacgccagcagcaccaacgagcggtcaagactacacactacaccgaaagtagacagaccagagaagataaaataacaagggcacgataaacagaactagaaaaagatgaggctgaaactcgtcagccggtaagacaggact

SEQ ID NO: 615473 - DNA, 134 bp, Homo sapiens
tggggagccttatatactagcttgagaatgtgtaaggcagaggggccgggaaacatagtggctaaatacaaacagttattctagctgtgtgtgtaaacataagtgcagacagaggtgtttaggccacaactaca

SEQ ID NO: 615474 - DNA, 141 bp, Homo sapiens
cgatccccttgctatacatcggcaccatcatgagccaccatcaccctccttaacctctacttctacctacgcctattttacaccaaccccggtgccgatgaatagcgaggtgccgattaacgaggtgccgattaatagcga

SEQ ID NO: 615475 - DNA, 696 bp, Homo sapiens
tgctcatgtctttcaacagattcgagggttacagctgcgtcatcacctctggtacactgtacccgctggacatctaccccaagatcctggacttccaccccgtcaccatggcaaccttcaccatgagctggcacgggtcgtgcctctgccctatgatcatctgtgacgtggcaatgaccaggtgtgccatcagttccaaatttgagacccgggaggctatagctgtgatcctggaactatgggaacctcctgctggagatgtccgctgtggtccctgatggcatcgatggcactatcttcaccagctaccagtacatggacgagcacacgtggcactcctggtatgagcaggggatccttgagaaacatccacgagtgaacaagctgctctttattagagacccaggatggtggctgacacagtgtcgccctgtagcacagtaccaggaggcctgcgagcaatggccgtggtgccatcctgctgtcagtggccccgggggccatagtgtccgcagggaatcgacttttgtgcacccactacgggctgggccgccatcatggatggcgtccctacgttatacacagagcgcatctcaagcgcgctggaatacctgcggaccagttcagatcggacactgattttacttcgtgcatggcagggccagtgtggcgggcatatggcacagacacgctctg

SEQ ID NO: 615476 - DNA, 255 bp, Homo sapiens
  misc_feature (158)..(158): n is a, c, g, or t
cttgttataagagaaaggctagagggagaagagtgtgggagcagggataattagtgagctattgaatatctggagaagagataatctgcagtagaggaaggtgcaaggcatgtcaggataagcctggaggatttgcccattgattagattgtgggtanacgatgaaacagtgaatcgtggaggattcccccagttttactggactcggaacttaatgaacgagttttgacttacgtaggatgggagtctccccag

SEQ ID NO: 615477 - DNA, 252 bp, Homo sapiens
ctcccgggttcatgcaattctcctgcctcagcctccagagcagctgggactacaggcgcccgccaccatgcccagctaattttttgtatttttagtagagatggcgtttcaccatgttagccaggatggtctcgatctcctgacctcgtgatctgcccgcctcggcctcccaaagtgctgggattacaggcatgagccactgtcctgggcccaacttgttttttcagtgatgcacatctttatcccaaaagt

SEQ ID NO: 615478 - DNA, 614 bp, Homo sapiens
  misc_feature (178)..(178): n is a, c, g, or t
gagggtgtcattgaactatctgggacggaaaaggtatacctgagtagatcatgccccaagtatagtgagctatcttgtctctgtcgggatgggacgtagaataaagccattcaactctctggtttgacagcaggataatatcactatatgtgacatacactgggctatgaatggctgnagaccacgttctgctctctacctaaagatatagtctacgccttttcatttagtcaagttgactgccactcacagtcctcttgtaccactcgtgaatgtgctccacagactctctccagtcttaatgtcatgtgtccgagcatcagttggatccctctcgtagacccttggcaatgtcacttcattattctgagatctatgatgcaagtccatacagatcttgtagctcggggtaataatctgagtgtttagctccatacaaggtcgaggtactcccccagaacccgagcatcataggtaggtggcgcaataatggtcagaccagcttcgatctctatcaccagttattgctgcacttcagggtgcttgggtagttcatctagagtctgccagaggtctcagatgatggtgtctcgtgccgaattcatgcagccagg

SEQ ID NO: 615479 - DNA, 190 bp, Homo sapiens
cggtcgcggtcgcgggctttcgatagaaccgaaggattctgggttcggcgacatggggatctcggggcggttcctcctcctggccgtggcgctggtgatcgccgccgccgcggtggccgcggatgagcaggcggcggtggacctggcggggcccggggagatcgcggcgggcgtcaaggaggccgccgag

SEQ ID NO: 615480 - DNA, 102 bp, Homo sapiens
cgccgcatgcccggaaacgggcgctttagcggcgaccgaggagcgaggaccgatgagatccgaaagctggacgcgttggctcgtgtttgaacaagcgcaaaa

SEQ ID NO: 615481 - DNA, 128 bp, Homo sapiens
tcctgaatattttcgatgaaccccttgtagataaaacttacgaagctgctctggaaacaggtcagaacatgagcaaagtagtgtattccctctacaacaaagccaagaaactgacatagagttggatc

SEQ ID NO: 615482 - DNA, 715 bp, Homo sapiens
atcaccttctgaaaatgcgatatagccccttgctattcccggggtccaatctgtctgcagaccccataataccatggaagagctgggtgttctggcacccagtgaaacaatacctggttttttattttaaaccagcccatcttcccctgctgcatgtttggaacctgttctacgtggatttgggatcaaccagcaggcctttcctgagctgttacttgttgtggagtgggcgctgaggctccatgccattgattgcaaagaccccaatcctgacctgaagggctgctcacaaatctctcacccaagtggcctggtgttgaacactgcagacgcaactgcagtgcagggcattctccccaggttggctgcctgtagagcaaatggttgccagaaaatgggtcacttcctcaaaaagcaatgccgggtgagcccagcacaagctccccaagttttttgcaacgacaacacataacatcaacagcttccatttttcaaaggatttcaaggtggcatggttcaaggaaccaggccttggaactaagacaaggcctcaaaatgtgcattaagttgagaagaaccccctttaaagggctccttaaaaaaaggtacctgacccccaaagagggctattgtgtataaccacttggtcttattgatattaactctagtggacattaaacacgttgggacgtttataccatggtttatttcatta

SEQ ID NO: 615483 - DNA, 484 bp, Homo sapiens
gcagcttacaggaatcgttacggtgctcagcgtcgtgctgagacgaggcaggtctccagctgggttgcacgtgcccaccagactgccgaaggccaagacgccaggtacggtggacgttacacgcaggacatgacatggtccggtgtgacggctagcacgaggaggcgcgtccggccttcctgaacaccttaggctggtggggctgcggcaagaagcgggtctgtaactttacttcctccacggagtcagcacactatggactgccctctgggctcccagaacccacaacatgaaagaaatggtgctacccagctcaagcctgggccttagaatccggacacaaaaccctctagcttggacatgaatatgctgcactttacaacctctgcactacctgactcaggaatcggctctggaaggtgcagctagagaaaccagacctcatcagcccaacatagaagacaccatcggaccctcctcgcga

SEQ ID NO: 615484 - DNA, 194 bp, Homo sapiens
  misc_feature (28)..(28): n is a, c, g, or t
  misc_feature (133)..(133): n is a, c, g, or t
  misc_feature (157)..(157): n is a, c, g, or t
  misc_feature (180)..(180): n is a, c, g, or t
  misc_feature (193)..(193): n is a, c, g, or t
tatcactgtgcccctgttccagataaanccttatccctggcatttctctgcttccccactttgcctgtaaaaatcaagcccaggtttggtggttcatgcctataatctcagctacttggttgagacaggaggntcgcttgaggccaggagttctagnccaggctgggcaacataacaagnccccatctctttna

SEQ ID NO: 615485 - DNA, 756 bp, Homo sapiens
  misc_feature (230)..(230): n is a, c, g, or t
  misc_feature (236)..(236): n is a, c, g, or t
  misc_feature (240)..(240): n is a, c, g, or t
  misc_feature (248)..(248): n is a, c, g, or t
  misc_feature (270)..(270): n is a, c, g, or t
  misc_feature (272)..(272): n is a, c, g, or t
  misc_feature (278)..(278): n is a, c, g, or t
  misc_feature (284)..(284): n is a, c, g, or t
  misc_feature (309)..(309): n is a, c, g, or t
  misc_feature (312)..(312): n is a, c, g, or t
  misc_feature (320)..(320): n is a, c, g, or t
  misc_feature (331)..(331): n is a, c, g, or t
  misc_feature (337)..(337): n is a, c, g, or t
  misc_feature (342)..(342): n is a, c, g, or t
  misc_feature (344)..(344): n is a, c, g, or t
  misc_feature (358)..(358): n is a, c, g, or t
  misc_feature (371)..(371): n is a, c, g, or t
  misc_feature (376)..(376): n is a, c, g, or t
  misc_feature (384)..(384): n is a, c, g, or t
  misc_feature (443)..(443): n is a, c, g, or t
  misc_feature (448)..(448): n is a, c, g, or t
  misc_feature (493)..(493): n is a, c, g, or t
  misc_feature (655)..(655): n is a, c, g, or t
  misc_feature (737)..(737): n is a, c, g, or t
tgcgttcctccacgaagtcccgaatactctagccccgctctcttcccctctttctgtccccgccattttccagtgggctatataggtcagtagctgctctccaaatagagtgtaccagcgcagctgtgggcaagctgcctctcattcccaggcctgttactctcgtgtcagctctcccctcactgttctgcagacagggtcgtccccctaaaccctctgcagtgagaganagaagntggncccacggncgtgctgtggcacaagccttancnctgtgngtatgnctgtgtgactgtgtgggagctggtntgncagatagnccaggctactntctggnatctncnggtgtttgtagcancagcactatgctntgtcntggactcnctcagctcaggatgggaatagccaagaatggcagcctcagcgcagaggcaaggtcaganagagncggcgcttcagagtttcctttccagacacccctccccgcactgtnaagttcccctgaccgccctcctggttcacaaagagcattaagaaagctgcggtggtctgagcaacatagcccagagggctgagcctcctggcctgcctgcccgccacctggagtcccagtggtgaggctcaagaacttctaaggggaaagaacagtggagtntctgttgatgtgaagaaggcagtcttggctcccactcccattctttggctataaatctttctacagcaattgagctacctgnaggagaggccaggcaaagg

SEQ ID NO: 615486 - DNA, 348 bp, Homo sapiens
tagaggatcgctgggctcagtgatcctcctgcttggccttccgaagtgctgggattacaggcataagccaccatgcccagcctatttgggcgaattttaaggcaactgaactattgtatgtctagagctctgcaagggccattagaaaatagtctcagatttttttttttttccattaatgatgctaactttctctcagcacttttccttgggagtggatggtgaagttaagtctgggaaacagaattcacaaccctaaaagcgtagtgcttaaacttggggagatcaagtcacagacaagaagaacttcaatcccctgtgcagagtataaccttgttcaaataaaca

SEQ ID NO: 615487 - DNA, 658 bp, Homo sapiens
gggcagtaggcggcggtggcagggggaggtggaggctgtggagcggagcgagagagcgggtcccgggactgatggcagcatcgcggggctggctggcgtggctggcaagctgaggtgacgaatggcagcgtgcgtgcgtgcggcctgtttccctcacggtgtgcggagaccaaggcggcggcggcggacgtggggagctggcccggccccgggtccccctgctcgttgagagtggtggaccaggggtacggccgggggtggcccgcgccctgggcttctctgggctcacacggcggacacttcccacctttctcgggctactcttccttcgcgtgcgcaacaacgcgcagggagggcccttcggcccaccggggtcccgggacacgttcacgcaccttgcgtgcctgcatgccccgttctgcccggcggacaaagatcccactaaatgtgcctagtgctgggtccagagctggcccaattggtgcacagttgccgttggacccatccatgtgcggcgcgcgaccacttgtcggaagcgaccgagtatgttttgccacccgatcaagcgctgccacattgattcgcaaacgcggggccccttatccatcacagtgcgtcttatcgggcgaaacacacgtggtcacagtggaaaggaatt

SEQ ID NO: 615488 - DNA, 124 bp, Homo sapiens
gctcggtaccagaagatcactcaccataatttaggtaacaaaaaaagggacgatgacaatgaattgatgacatctggtccacgaatgagagtaagagattcaacactacatttaaaagaggttt

SEQ ID NO: 615489 - DNA, 391 bp, Homo sapiens
atagcacatgccccttactactaaatacaatacatcgttgtataaacgccaagaggtctgcactgaactataccatagccaagaaagggtgaaaaaagccacaattataggcaatccaggctctatttataagtactgcacacttaagtgtaaggggctctcagaaaggagaaaaattgctagaaatgcagtattttagacttaataacagaatcatgtctcatctcttgctgcagcgttgggaatcgctaacaattttatcaacaacacctgtatacatgactcacctattcacctcattcctagccacctttggttgggtgagtataaggaaaaatcgcaaacaaacttcttgtatgacaggaactcatgattttctatatacattttg

SEQ ID NO: 615490 - DNA, 296 bp, Homo sapiens
ggtgtttaaggtctcccatttttctaagtatggccttcaggattctgatgaagaggaggaggagcatccctctaaaactagtacaaagaagttgaagacttctcccttgccttctgcaagacagactacggccttacagagtaggctctttaatgtgcaaacctgcacctccacctcaggtagagagaaaaggacagtgtatttgaatagagtccgcgatacccagttgagagcacgtgcatacagctcatacacagctgcttttatgacccccggagctctgaagagtacacaca

SEQ ID NO: 615491 - DNA, 855 bp, Homo sapiens
gcagccgcccgggcggcggcgccacccaactagtatattcatctggaagctagaggggggtgaggcggtagctgctcctcggggaggagcggtacttatgtcaagttgtcccttgttgaggaaagtcctgcaacccgaatttatgatatattcgtggtaggagtaatggtgggcttttggtggttgccgcccggccccccgtatccccccccacaactactgcgaactccgaggccgggagcggggcggggtgggaggaagtggtagacacaaacctacaaaatagagaaatgtgagacggaagcttggtgtggtacggttggtgggcggagtttgctccccgcaacgccactcactcatggcgctcaccagcctagacaacccgcacgccccccagaaacgctaaaaacaacaccaacaacatctatattgacgtcttaacgaggagaaactgtagacgtgtctgcgatcgcgtcgggtttacgtgttagttaccacgccggaagcacgccgagaggggcgggacgctcaaacagacggcacgctcttgcgagatgggggatgtagtgaagatactaaatgatcgagttggtggaaattaggggagggtggacggttagtattctcatatcttgtcgctccagtagtcggcttactggcgactggggagatagatgatagatgccagcctatcgctatgtttgtcattgatacaatactcttctatatcacccccgcagcggcgactcaaggagccaatcagcagagatacagattatacccgaacgggaagagatgatcggcgaggatagaataggaggcatgtgagagagaacatggagcgcgtcgcaccat

SEQ ID NO: 615492 - DNA, 128 bp, Homo sapiens
ttgtccagtccattgtgaaattatcccagcagctgtaatgtacagtccttctgaagcaagcaacatcagcagcagcagcagcagcaagcacaattcgtgtgttttataaagacaacagtggcttctaa

SEQ ID NO: 615493 - DNA, 259 bp, Homo sapiens
ggaaaaaaaggttccccccccgggggggttgttttttagaatggtccaaaatcccggcctttccggcctttccatgtttaagggagaaaaaaaaacccctttcctttccaagaactaatatactttggttttgggggaaccctaccccaggtttttggccagcctttaccgccctttttgaacttttttaaattttgggccccccaattttttggttttggtgccttttttaaccattaattttccctgggccaaagga

SEQ ID NO: 615494 - DNA, 147 bp, Homo sapiens
cctttcttgtccagaattgtctgtgtctccaaatgcttggtacgaccggaacagctgagtctacctgaaccactgagatggcacgccacccctcccccctgggagctctgtcccaggggagagatcagagtacttgtctgtagaacc

SEQ ID NO: 615495 - DNA, 519 bp, Homo sapiens
gggtagtacggattttttaacacagctattccagtgaaatgggaggttatcacacctgcacaattatcatcgctgctcaatcagatttcattattattatccgacctcctacatatcaagcataagtttgcctatggatccttaattctacgctggcatgtgccaaactttactagaacaagctgggaaagagagacagagcatgcgtgagcaaaccctataagactcttttagtaatagacctcaaggggaattcattaaatttaaaaaagaagtgtaagatgacaggaataccaggaatcctcccactgtgtatgggggtaatactgccttgacacatgaaagatttggtttcttagggtgccaacaaatgccagttgtactgtggagagcactgtcttttgtatcaaaacagaggtacctgttccaaaaataggatagctgcagtctcagggtctatgctcgtgcccagtagacggaagaaaagcacgtctcacgtaatgagagaacgggattttg

SEQ ID NO: 615496 - DNA, 598 bp, Homo sapiens
catagacgcaatttaaactttaattgaacactatcacatggctgcctctcacgcggagtcctaacaggtttctaccatcgtgtattaaatgagcctgtagcagttgatcatatgaagactcctactttagtccgccctctgatgctgaataaccaggatatttcttggaggagggggtgaggcgaggtgcaatagactagtgtgaagggcactgcatctgtcatccgtcctggactcagtgggatttttctcatgatacgatgcctataccaggagctgctgacctcacaagagagcgttggggggatggcggatctctttggtttggtacaagtcaatccacacagggacagaggttcagttggtcggtcgccgttaacaggcatctaacagtctagtatgaagacgacctccctcatatagattgggccatatgctaccatcggatgctgcactcatgctcatcaacttcatcatgactggataacacagttttacccgtattattgccagtgtttacttcaaccaacatgatccaatgcgatcttcagatggggaccccacaatcttatggcccaaaatctcctgaaccggtcta

SEQ ID NO: 615497 - DNA, 168 bp, Homo sapiens
ccgatgcagatgccgcttgcgtttgaatatttgctactaccgcaaccaatcacgccgttttagactcctgggctcaagcgatcctgctgcctcagcctaccaaatagttgggactagatgcacgcaccaccacgcctgactcgggacattattcttaagggtattatc

SEQ ID NO: 615498 - DNA, 184 bp, Homo sapiens
tctcggcacatggctgctgggcttgcattgcattctccatgcaccagggcgcgctgtgtccatcccacagtcagtgccgcatggccgctgtcctgcatgcatgctcaggcggggggcatcctctcgcagtcgcacctgccaggccatgccaagctttggccactgggccggtcggtttttccca

SEQ ID NO: 615499 - DNA, 947 bp, Homo sapiens
gaggagaaagagcaactaagaatgtgtgcatagagaccaggatgtgaagacataataagaaggcagtgtggctgggtgcagtggttcatatctgtaatcccagcactctgggaggccaaggcaggtggatcatttgaggtcaggagttcaagactatcctgaccaacatggtgaaaccccgtctctactaaaaatacaaaaattagttgggcatggtggtgcacgcctgtggtcccagctacttgagaggctgaggcaggagaatagctggaaccgggagacgaaggttgcagtgagccgagatcatgccactacactccaacctggcgacagagcaagactccctcagtctcaaaacaaacaaaaaaagaattcccaaaatttagcccaggactatgtggggccacgttgcctgtaatccccagtctattaggggtggctgaaggcagggaaaatcgtttgaaccctgggggcggtgcgaagtttgacagttgacgccgaagatcaacaccagttggagacttccaaggccttggtggcaaccaggatgtagacagctctccaaagttctcaacaacaaacgtaatatagaccaggaacgacaaactcaagcagacgtagaaaaaaccacttcgagatcctgggggaagtaagggctacctgggaaactccagcgttacgccagtactcggataaagcgggacttccccgcactgggggaaattcccgtttagtcttaggaaaaccaccacagtttcataacaatctaacccggggacagcctgcacacagtacatcaacgacacttgcggggtttgccagcacagcacaccacaactaacaacaacaaacaaatcacacacgactagttgttcggacaccgccaggagcaccacggagaagagcgactttcatagcaccgatctcattgttgtaggcacgagcga

SEQ ID NO: 615500 - DNA, 250 bp, Homo sapiens
cacttacatacactattgttcaaaggaacaggaatgataaaaattgccgacgcattcaatctcttttcctccctgaagtcttcaatgatttagaaatcttttctgtattgttcaggcctataaagatatttcaatccaatctgtaaccctttttaggtcataatcccttttgaaagcaagaactggatttttacctccccccactatttaagggtttggttttgggaaagtttggataaaaagggcccca

SEQ ID NO: 615501 - DNA, 1016 bp, Homo sapiens
ggtcctagatgctttatgatcagaggtagttgcgggggtgttattttgggaagtggtggtggtaagggaattccacacttgttctgggggccctagtgaggagtgggagaattagggtgaaagtgctagctgtttcgaataaggtgaaacggcttgaggtgacgctataatgggctagaatctatctaagtacaggctttggcaagttgggaaaaagggaaagctctggattaagggttacaggtcactttcaagcgccttatggtacgcaatggtgtaccgagccgcgtttttagcaaatgttgtacgcattgtgcgccatcccgtgtacctgcaatgccaggatggagggtccaaggcaagcccgagtatgctcctcgattgtctctcaagaggtacgcaagagttaagcacgttgagcctgggcgtacgatatgcagtccacgtcgccctggcgttctgcctaatagctctctgcatagttggcaatgcccagacccagatgtgcccatcccgcaccagatgcccatggctgattcacagcaaactacgtcccaatcggaagcccacgttctctgttcattccgtcctgctagtctcccgattgtcagtgagataggaacgccgccccatctccaggccccacaagccatgaagcgtgggcataatgccaatgtcgctcctgcttggcgagcccaatcaccacagcttgcctgaacagctactaaccacacgcccactccatgctcatgtcctttccctggtctgcttcatctccttctcactctagactcatcatggcagatgaacagaggaagatgagtggtgacaagccaagaactcaggccaggctgcccagggtcaaaccccagctctaccactggggaacgttgggcaagtgactgctccctctatgcgcccagattcatctgttaaaggagacagaataaacctacctcagagggttgttagggggacaaatcaggtataattagtcatgagtgctttatgtctag

SEQ ID NO: 615502 - DNA, 860 bp, Homo sapiens
gatggacgggaggctgtggggtcccgggtggggaatgcagtgggtgttgctagacgatgggcaactagcctctcgatcgacttcctcagtaccgacggctgggccactccgtctagccggaagcatgggggcccggagccggggtgggcagagagtagtgctcggaggtccaggagagcggtcagactcggcggagggagtcagggtgcatggccaatctgtcaggttgatagaacccgtaccgtcgatagcgtggcatatgagtggctgcagatccaagccgtgcatatcagcgatcagaggtaatcctgaaggcacatggtcgagtcctctgggatcacatgagtcacgaggaaggagtaaatccaccaatgcttttgagggctttacactagtcggtggtaaattatgatagctctgtcgtgagcaatcgacctgggactctgtactactgaggatagtaacctgaggatgattatgaaggaatatgcgagtacaggcagatagctgagttgagtaaacagtaacgccaaaagaaataacagatagattggagagaatgcaccgttaagcaggctgcacagcaatcagggtgccaaatgcaagctgtatgagagaaaatgggattggatgtatgaatgagtggtggcacaccaggaatgtttgtgacttatagatgattggcaggttatagcattcatcgaaactgctgggatgacatagatagatgctgtaagcatggctggtgaagaaactttatcagatcataagaagccttttgaaagacaaatttggccaaggagagtagtaaattatgggaggaaaacctgtatatataactacaggcttgaaaaggttga

SEQ ID NO: 615503 - DNA, 329 bp, Homo sapiens
tgactctagaggactcccgtccattcgtggcccgcgcatacaagcacttcgctcgttagtcgctgtcgcctcgcttcgcttatcctccgcaatcatgtcgtgacacatccgatatggctgagatcgataaattcgatcagtcgtgactgaaaaagacctagaggcaagagaaccatccactgccttccaaagaaacgattgaacaggagaagcaagcaggcgaatcgtaatgaggcgtgcgccgccaatatgcactgtacattccacaagcattgccttcttattttgcttcttttagctgtttaactttgtaagatgcaaagaggttg

SEQ ID NO: 615504 - DNA, 260 bp, Homo sapiens
cgcctcctgggcaattctcttgcctcagccttctgaactagctgggattacaggcacctgccaccatgcccagctaattttttttttggtatttttagtagagatgggatttcaccgtgttggccaggacggtctcgctctcctgacctcgtgatctgcccgcctcggcctcccaaaatgatttggtggctttttaaagttctgaagacacccaacacaatttggcaattatgtggtatatattcccaggaatacttacc

SEQ ID NO: 615505 - DNA, 198 bp, Homo sapiens
tgtggtgcaagtcttgtgtgggaggatctgtcatggctcagcaggtcactgagtcagtacagaagcactctgaagcagcacccatttcacacatatgtttccaggcagagagaggtgatagagactccaggtgcatcaactcagcacatctgaagctgtgtgctgcggtggagaagcaggaagcggtaccgagctcga

SEQ ID NO: 615506 - DNA, 820 bp, Homo sapiens
ggcaaagatccatgttgcacacagacaggtgttcagtaaataatttttggaataaatgtgaacactgaatagcgaataaatgttatagatcgtaatagttgtagaagattggttggagatgtagggactggatgtggggcaatggctgtgggtctagagtatattcattgtgcagtggacacacacctaatctgtcctcaaggacacgtaaccatgtggcagtgaataggaaagaccaaggtagaagcaggcaacgagaagcggaggcagggagtacagcagctatgaaatgttacattgggttcatccagagcaagaaaagctgagagctgtccgtgagggaaggccacacaggcaagaggagtgggacaggggagtaaaggagtgggctacaacaggccctgcagatgtgtgacatgccagacccgaatcagaggcgacttagaaagtgaggatcctggatgaattattttagggagaaagtgtaggtttagatcaggtgggtaggatgtgttctgtagggcgtacagaccaagtttggtcaggactaagaaggtagctaaaatggaagtagaacttctgggggacaggagatctagggtactccagaaccagggaaatgagaaacaacgaggggacattttacgaaagagagggaagatcattctatgaggtggacgatgacaggtgtgggtgatggtgaggcacagtccaagactcactcgaagggagggaactctgttattgttcctattcccgagttgtcatgagtctggccccgtgggcgcctcggcctatgtttcctgtgctgcctggtgtg

SEQ ID NO: 615507 - DNA, 116 bp, Homo sapiens
aaaaatccaggtactgggcgctctcaaagggaagagaaggctacatagttgaatgtgcattgaacctggatctaacgggggaacccaatggaacaaggaatgtgagttattgtttt

SEQ ID NO: 615508 - DNA, 260 bp, Homo sapiens
  misc_feature (11)..(11): n is a, c, g, or t
  misc_feature (96)..(96): n is a, c, g, or t
caggcactagntagtacctctgggaacttttggtaaacccctggaatacagaagaggctgttctctttgatggaccctttagtcattcgaccatgngagctagcaaggtgtcttggccaagacccacactagccctgagggcctctcatagtagcagaatgtcgaagctctgcccatcagcttatctgaaatgacacctcttatctttcactcctccactccctgggtttaacagcaaatttttgccccatgctcagagt

SEQ ID NO: 615509 - DNA, 2075 bp, Homo sapiens
  misc_feature (955)..(955): n is a, c, g, or t
tactaaaaatacaaaaattagccaggcatggtggcaggcgcctgtaatcccagctactcgggaggccaaggcaggagaattgctcgaactcagggggtggaggttgcagtgagttgagattgtgccattgcactccagcctgggcaacagagcaagactctgtctcaggaaaaaaaaaaaaaaaaaagaaaagcaacatagtggggtttctgtcaatctgtcctcggctgcccttctcatttgttgatgggaccttgaaagcaagcttgctaggtgccctctgtggctccagcctttaccggaagtgtggtgcatgtttttaacttcagggaagcggtatcctgtcactggggtatgggatgagcatggagaagaggcaccagccacgattccttcctaagcatctcctgttctgactgctcatgaattgaagaaactgacccttgtgttcactctgcttcctctgattgtttctatcatggtttccaaaaattgccatgggaacatgtcaaagggccacttttggagactctgctccaggaagaactagtccccatagctcccctatcccccaccataccacagacatgctgtgacttagagaactacacaaacatccttgggacctagatgctggaggaatgacttaatttgatgcagaaactccatcacccaagggagtacctctcactgtaaacagtgctgtgcttgctctgaaggattaagcaagaagtcccaacagaagcaatgcaccagtcctgctatgggaatgaaactgcaaagcctaggagatgggtgaagtccctttctggagacctttaatgagtacttcaaagcactcgacacagatgcagcaaatagggcatcacacatacacaggcattaatactcacgggcatatagatgctgacatgtgtacactgacttacgcccttcccacagctacagataaggnctcgcaaagttggcctcagagacacatcaggaaccaaggtggaccagcaggtgccgagcctgtgtatctgcttggaggagacgttccaatgtgctgccttgttcagagatggtgtagttgcaagaaacagaaacccaccacaatttctcaggcaaaaagggagttaattataaggacataagagcacaaagttccagtgcaagagatacatccaggctgcacaagctccgggagtggggcctggcaagccaaaagaaaccaaagtttgtcttgccttctgttcctctttctgaagccacatagccttttatgactgtgtatctttgcatcgcttttgttttctttttatgtctctgaagccagcttttcctgttcactcatcccttgattaaatatggacattctagcttcacatcacttcctaattcagggaccaacagagactggttagcatgttgctatcccacctccaaattgcatcagggaatttgattttgctgcttgggtcagggtccagtagtctgggccaggggactgggaccatctagcacatagccaaaggggctgacctaatggggcaggtctgacacaaatggggtcatttcttggacagacatcccaagggccactatgatagtagcttctctaaaagacgggttcctgagaagaattgcattctgtttcccagtgagttagcggagtcatacttactacatcccaaggcaggtggcatggtagaaacaggcctgaaagagaggtcaggttctaaccttctcccctctctgaggctcagctgctcccttctgtagaataaaaggggttggtctgtaacaagattttcaaaaatttatagtagtgaaactttacaattcgacttggacaaccagagattaaaagcaaatagattcttgttgatgtcaggtggggagcttagctctcccattctgtgattccttcctctgaaggccctcaaagcaactccataataactcacagagctgccagagccgatgttttggagcaccctgagacatatgaactctaatataacttccaggagaaagtacataggattccacttagagccaatctcagctgtctatctgtctagctacctgtc

SEQ ID NO: 615510 - DNA, 147 bp, Homo sapiens
catagttgtgtccattaatttcatgcccacagtcttcttttctcttcctgacctctcattacctcttttatactacttgatctctggttaaactttcttttgttgacatataattcatacactgtaaaatccacctttttttttttt

SEQ ID NO: 615511 - DNA, 116 bp, Homo sapiens
cacacctatcaccctaaataataatgtatctatacaaaagtattgtacaatttcgcaaccgctgctgcccaactggaataaggagtcgggagcgaaattcacatggatagaaatgc

SEQ ID NO: 615512 - DNA, 106 bp, Homo sapiens
gatctccctcatctggcgtgactcgcatcgggggtatgctgttcgaattcataagaacaggaggttagaagtagggtctggtggcaaaatatgtgtgtagagtcag

SEQ ID NO: 615513 - DNA, 394 bp, Homo sapiens
agagttggtaccttttagctatatttgcagttttctctgtggacttttagaggaagctggagaagaacagcgaaagtgtgactaagattttatatttcttgtcctctaaatattttgataatttctggattgatgcagtgatgtttttgttccttccgtatttataaatgaaacacctttttttagtgtttctaaacctaaaatctacttgggtttggaacatcgaagtggtgtggaacactggtgtggactatttatttcgaagcatttggttgattggaaaatttcattgaggaagtttttaatcagtgtgatcagtttgattctgtaatgagcacagcagctaatattttgaggagctctgtgttgaggaccaatgcttaaggtggacttg

SEQ ID NO: 615514 - DNA, 127 bp, Homo sapiens
ccccgctcctgtggagatcaaaatttaacctgtgtgttatctagtgctggagcctgaagagcccggtgggaatgtggagtgacggagaggatggggcatggacccagaggacactttgcatccagag

SEQ ID NO: 615515 - DNA, 1025 bp, Homo sapiens
  misc_feature (186)..(186): n is a, c, g, or t
cactcaaatctggtccttctgttcctgtctcagttactaactaacgatcatgtctatgagcgctacatgacagagatgtacaggctactgtgacagcttttgatgccagaaaaggcttctgtcacacacagtggcccatggagaaagaggctcttattaaacttagatgaaagagctgcttccatngtcagggtattttctaatttcagttcaaggaatatcctaaaatttagcctgttcagaatttactgcacataaaaaagggtatttcatccagaatagatcagttattgaagcagtgctgctaacatccattccctttcataccaccattttcaccctgtttcttcccctcctccagttcttgggaaatggtgatcgggggatcttagtgcttattgtttggactctgtgtgtgctgtgggcactggagtagagatttctggagaaaaacaaacagttttatttcatctgtgcctttggtgttggacgtccattcttcaataaattttcctgtaacactatctcgtaatattttcaactttgtaatggaaactggtctcacaatgtcatttcctaatacaaggcacaggatatgtggggaagaatatgtacaatttatttgatccaacattatttcccactgacctacactttcagtgatgtggtgggacccaaatacactaactgtcctaaaccggaaaaaaaacaataacaacaacagaccacctttggtgggcggcgcggcccaagaaaagttttagaacccatggagtggggcggcgacccatagttacgacaagcgcaccgcgggtcacacgaaccgcgcaggagatggtgtgatcaccaaaaaaaggcggggacacgcgcggtgacaaccaggggctgcggcataggcttacgggcacgagcagatatccggcgggatacgcacgcacagacagcgaaaacgcacacacgaacaggcagaccccaggcgcaccaatgcgcaaacacacacaccaaacacgaacacactacacaga

SEQ ID NO: 615516 - DNA, 526 bp, Homo sapiens
acttgctctgccaagcaagctgttgccaacacaggcaagatggagtcacccgcctggatgcccaacttcccagcgtccatgcgtaatccaccgattcagactaaggggctgaccactctggagaccttcatggacacgttgccggatgtgaagaccacgtgcatcacgctgctggtgctctggaccctcagccgagagcctgacgacaggcggcccctgggacacttcccggacattcacttcgtggaggaggccccgcggaggagcaatagacggttccgccagcgcctgaaccagatctcacacgacatccgccagcgcaacaagtgccttcccatcccctactactacctggacccggtgctgattgagaacagcatttctatttaggagcgcgcttcccgtctctcctctccccattctgtgccctactattttcaacaaaacaaaacaaacaagcaaaaaacacaaaaacctcagagaccaaaacaccaaacaaacaaaaaaacaaaaaaccttcctttca

SEQ ID NO: 615517 - DNA, 434 bp, Homo sapiens
  misc_feature (1)..(1): n is a, c, g, or t
  misc_feature (149)..(149): n is a, c, g, or t
  misc_feature (176)..(176): n is a, c, g, or t
  misc_feature (222)..(222): n is a, c, g, or t
  misc_feature (357)..(357): n is a, c, g, or t
ngcccggaaggagacagacggccaaaggagaagctgcctgtctctgcacaggtccatgtccctgaggaaaagccaacgtcacagagaaatgatgaccactttctcaaacctggcttcggatttgcacgttggctgccaaagctgatcancagcgggctttgtgaagatgcctggtntaccacgtgcctccagctggtcacgcccaagactccctgagccctntggaagggcagcacttgcccagtgcctccctccaggtcctgccacatccaagaaccacctggactattatttacttagtattttaaaccaatgtactttttaaactccaattttttaataagatcatttatgtcnccatataacacccaaagcagtagaatttgtcatacacagaaggcaatgctaaaaatacaatgaaaatggaaccagga

SEQ ID NO: 615518 - DNA, 1038 bp, Homo sapiens
  misc_feature (124)..(124): n is a, c, g, or t
  misc_feature (325)..(325): n is a, c, g, or t
  misc_feature (398)..(398): n is a, c, g, or t
atcaatacctgaccttttttaaagaaaataatttgaacacagcagcagtactgtgaggaagaacagtgatttgacatacccgacaatcccaggcatggtgtaccctgccagttctcttcttagnggaattctctatcctccaaagacgacttgtggagtctggggtgttgtcggatcaacagaggagggtctgaaagtttgtgcatgtccacggcaaagaacatttggcctgtatcactaacacacggaaactgagaaatagggaaggagttggtgcatgcgaatggagataaatgtatggtgagggcgtgtctcagttctggcntcgttcatatgtgtactatggtggagtagccagtgagtagtagtaggtgatgtattatagaaagcaggagtancagtgctcaataataatttgtagtcgtgcaacgggaacgtataaggacgcattcagtggtacaacgataggcttaaagcccacgccttttgtacctatacatgtaataaaggttagagcattacgtgtcgacgccgatcattatgggagagggataaggtgtttatgcatacacagcttcccaaacggtttttcccacttgtttatccaactttgtccccaagacgttttcttgttatttttctcagaaacaggagacttaacacacagttcctcaacgttcaatagaaggatggaaaaccggtgctcgcgaatttaaccgtattgacaaaacagagacaaagacaccatagtcgtgtttccaccagagaataccttgtacaaagaaaacgaacaacctgcatctctctcgagaacttaaccgtctaaccgtcggtacagagaaccgtgtatctatttcccccccgtgggtttaaacgtggacgtatttaaatatggcctaaggacctactctcggagtgagtgaacgcataaatgcgacgcatttaaatgttaaaatttaccttcgtgggaactattttggagaaatcctatgggacgccttagtgacctttccacaagggggcgccaaacacccaact

SEQ ID NO: 615519 - DNA, 116 bp, Homo sapiens
gctaccggcttctcgccgtaacttttccgccgagcacgctacgcacgtaggtgttgtggcagcgtacgaagagcgattccccttcggcacccgtggcgtcggcgttgttagcttcg

SEQ ID NO: 615520 - DNA, 307 bp, Homo sapiens
tgaaacagaagttttggctctggtttgcccaggctgaattgcaagggcgcaatctcggcttcaaccgcaattaactggaattcacaggcttgccccaccacacctgaactattttggtttttttagctaaaaacgggtttcctccttttgggtcaggctgattctcaaactctcgacctcaggttgactccgcccacctgttggcctcccaaagttgctggaatttccagcgcattacccaccggacccgtggcctttgaccttctcatttctaaagtgtggagaggaaaaaaaccaggctccgtgg

SEQ ID NO: 615521 - DNA, 433 bp, Homo sapiens
  misc_feature (12)..(12): n is a, c, g, or t
  misc_feature (20)..(20): n is a, c, g, or t
  misc_feature (61)..(61): n is a, c, g, or t
  misc_feature (63)..(63): n is a, c, g, or t
gattcggcacgnggcggagngggcagatcacttgatgtcaggagttccaagaccagcctantnaacacagtgaaaccccgtctctactaaaaatacaaaaaatcagctgggcatcgtggcaggcacctgtaatcccagctactcaggaggctgagcaggacaatcgcctgaacgcgggaggtggaggttgcagtgagctgagattgcgccagtgcactccagcctgggtgacagagcgagactccatctaagaaaaaaaaaaatgaaattgaaaactctgttccttagctgcaccaagtctgctgtcaagtgttcaagtggcacacgtcgcgaggggctgccatcacggacggtgcaagatgtcccatatatccagcattctaaggacattctgtcagatggcaccgggctctgtcctgtctgctgaggaggt

SEQ ID NO: 615522 - DNA, 419 bp, Homo sapiens
gggagtggtgatctagaggatcctttttgcggcgctttcctgttaggcgagagtgcgaaagggagacgtgcgaaggggcaggtgtcgggcgctgtttctcgtttcatcatatagacaaaacagccctgtgtgcaaagatggtcacggtacctaaaaccggaagaaccttctgtaagaggtgtggcaggcatcagcctcacaaagtgcacaggtataacgaagggcaaggattctttgtatgcccagggaacggaggcgctatgactcggaagcagagtggctatggtgggcagacaaagccaattttccggaagaaggctaagaccacaaagaagattgtgctaaggctggaatgtgtggagcctaactgcagatccaagaggatgctgggctattaagagatgcaagcattttgaact

SEQ ID NO: 615523 - DNA, 1026 bp, Homo sapiens
  misc_feature (4)..(4): n is a, c, g, or t
  misc_feature (68)..(68): n is a, c, g, or t
  misc_feature (91)..(95): n is a, c, g, or t
  misc_feature (97)..(97): n is a, c, g, or t
  misc_feature (100)..(100): n is a, c, g, or t
  misc_feature (172)..(172): n is a, c, g, or t
  misc_feature (258)..(258): n is a, c, g, or t
  misc_feature (266)..(266): n is a, c, g, or t
  misc_feature (658)..(658): n is a, c, g, or t
  misc_feature (687)..(687): n is a, c, g, or t
  misc_feature (743)..(743): n is a, c, g, or t
  misc_feature (786)..(786): n is a, c, g, or t
  misc_feature (802)..(802): n is a, c, g, or t
attntttgttaaaagttcaaacattttaatgctctgggaggatgggagaacaacagaattcggtaaanacatttgggaaaagacatccttnnnnnanacntgtggttgatctaacaaatatagaccctgatgtcgcttattcttcagttccctatgaaaagggctttgcttnacttttttaccttgaacaactgcttggaggaccagagattttcctaggattcttaaaagcttatgttgagaagttttcctataagngcattacnactgattactggaaggatttcctgtattcctattttaaagataaggttgatgttctcaatcaagtttattggaattcctggctctcactctcctgaactgcctcccataaagcccaattatgatatgtattctgacaaatgcttgtatttccttaagtcaaagatggattactgccaaagaagattatttaaattcattcaatgccacagacctgaaggctctctcttctcatcaattgaatgagttttttggacagacgctccagtgggcacctcttccatttggggacataaagcgaatgccagaggtggactactttaatgccattaacaattctgaaatactattcagatggctgcggctctgcattcaatccaagtgggaggacgcnattcctttggcgctaaagatggcaactgnacaaggaagaatgaagtttacccggcccttattcaaggatcttgctgcctttgacnaatcccatgatcaagctgtccgaacctaccaagagcacaaagnaagcatgcatcccgtnactgcaaagctggtggggaaaaactttaaaaagtggattaaaagacctgcgtatgtgatgagttttagatgatttctcgttttttaaatggaattcggtaaagaaagtataaagacttcatgctcccatattaaaacgtgtctttattagttattggcgttttatatgtgtttatgttgagtgatttatactgagaataaaggttgagcgtactttcttaaata

SEQ ID NO: 615524 - DNA, 273 bp, Homo sapiens
  misc_feature (134)..(134): n is a, c, g, or t
  misc_feature (152)..(152): n is a, c, g, or t
  misc_feature (162)..(162): n is a, c, g, or t
  misc_feature (179)..(179): n is a, c, g, or t
  misc_feature (221)..(221): n is a, c, g, or t
  misc_feature (224)..(224): n is a, c, g, or t
  misc_feature (261)..(261): n is a, c, g, or t
ctgaactgggttaggtgccgctgttgctgctcgtgttgaatctagaaccgtagccagacatgggactggaggacgagcaaaagatgcttaccgaatccggagatcctgaggaggaggaagaggaagaggagganttagtgataggacttagnctttcagtgnatactggcaaccttggnaggcaggaatgtgaaacttttccctactacttagcatcaganttnaatgggagaccgcattctgccatttttggcggcagtntggctctgtcag

SEQ ID NO: 615525 - DNA, 146 bp, Homo sapiens
gacgcagtctcaaaatcaactattagtacagaagagtcaatcagaatatgaaaatgtgtaaatgtgcatattctcttttatactaatttggtagcattaacaaatacttacagcatcacaagttagagctttcatgaagaaggagt

SEQ ID NO: 615526 - DNA, 936 bp, Homo sapiens
gattatactagcattataccatactcacttctaggaatactagtatatcgctcacacctcatatcctccctactatgcctagaaggaataatactatcgcgtgcatgatagctactctcataacctcaagacccactccctcttagccaatatggtgcctatgccatactagtctttgcgcctggaagcgaagggtgggcctagccctagtagtctcaatctccaacacatatggcctagactaggtacatagagctaaacctactccaatgcgttagaagctaatcgtccgcaacaattatattactaccacgtgacatgagtttccaaaaaacacataattgaatcaacagaatcacccacaggctaattattagcgtcatccctctactatgttttaaccaagtcaacaacaacctgatttagctgttccccaacttttcctccgaacccctagcaagcccgcctcctaatactaagctacctgactcctacccctcagaatcatggaaggccaaggccattatccagtgaaccactatcacgaaaaaaatctacctctctatactaatctccctacaaatctccttaattataacattcagaggcacagaatattcatatattatatcttcttcgagacagattatcgcaactgggtattatcaccgatgaggagcaagacagaaagcgtgaagggggaatatttctaattataactagtaggttccttccgtaatatggagtttagatgaaagaacctaggtgactaaaattataatgagttgaggcagagaataaatctggcgaaataaaggaggttagaaggttaggagaacctaggcccttgactagcgtgacccggggtagtgtggaacaaaaggggtaggcgctttccgaaggctgtgtttgtaggggaaatttagcggatgaact

SEQ ID NO: 615527 - DNA, 781 bp, Homo sapiens
  misc_feature (53)..(53): n is a, c, g, or t
  misc_feature (194)..(195): n is a, c, g, or t
  misc_feature (200)..(201): n is a, c, g, or t
  misc_feature (223)..(223): n is a, c, g, or t
  misc_feature (228)..(228): n is a, c, g, or t
  misc_feature (237)..(237): n is a, c, g, or t
  misc_feature (242)..(243): n is a, c, g, or t
  misc_feature (253)..(253): n is a, c, g, or t
  misc_feature (262)..(262): n is a, c, g, or t
agcgggttgtacccgcggtgcatggtggggcggtctccttcggcaaccccggncgaacgggccacccagaggctgtgctgagctggcgcagcggcagcagcatgagccggaccctcgcatcggccgtgcccctgtcgagtcccgactactacgagaggctgggccaactccagcacgggctgcgggacagtgannaaganngagattggacctggaaaagaanctttnatgaatatnatcanntctgatacantgcaggagnttaagctgaaaatattgtcaacactaacagaattattctgaccggccactatgtgactctgacacgacggctcatactcgaaaccaagaatatttacacagcgatttgagcgtgtccaaggctcatgttgtacacttcaccacaaataccgagaagcttcaaaaactgaagctcgaatatgagactcacaacttacgaagatgctatgctcaaaagatagcctgggactaaacagaggaactgacagatgaacgacagagaaacaggttgcagtgcaggagggggattaactcaggaaacagcccatgtccagaggattgtatcaaccaggcaacaattctttatgggccgccaagatgtcagccatcttaagcattgagagatttcagtaccaggagcacaaatctcaccagccaaaaaagaactttttcaattcctgacccacattcacaccgacagaacagccagagcagttatgtgaccagacagctgtgtagttacaaactagtagtgagcaga

SEQ ID NO: 615528 - DNA, 163 bp, Homo sapiens
tcaatggtgacagtgttgaaggaaatgtttcggtacccatgtctgtcatctccagattgggtgatcattgagactcaggagcaagtcaccacagtctttgaccacaggaggcatgcccatgatggtaggagaaccgcacaagtgccgcaaccatgttctctga

SEQ ID NO: 615529 - DNA, 144 bp, Homo sapiens
ccgggcgtgagagagaaaagtgtgtctgtactgcccccacctttagctgggccagcaactgcccggcctgcttctccccacctactcactggtgatctttttttttacttttttttcccttttcttttccattctctctccact

SEQ ID NO: 615530 - DNA, 289 bp, Homo sapiens
ggccggctgatgcatggctgctactgtccagtttcctagtatttcttttgtttttgagaacggagtctcgctctgtccccccaggctggagtgcagtggcgtaatctgtggctcaatgcaagctccgcctcctgggtttcacgccattctcctgcctcaacctctcgagtagctaggactacaggtgcccgctaccacgcccagctaatttttggtattttaagtaaaaacaggttttcaccgcgtttagccaggatggtctcggtctcctgacctcgtgatccgccca

SEQ ID NO: 615531 - DNA, 190 bp, Homo sapiens
ctcgatatgaacacaaactagaatcactgcattgacttcccttctccaatcagggggagtgatggtgatggtgcatgagtgtctatttgcattgagtcttaatggaaaataaggttgtgtcactcaaaggaaaaacaaatcacagcccagactggagctgtagatgaataacatggctgagtgttggtac

SEQ ID NO: 615532 - DNA, 418 bp, Homo sapiens
atgtatgggatgctgcatagtcagtctgtaaatactgtggtacctcagaatgatagttggccgcacgggagctcatagcctatgaagtctgttgctataggtgcaagcaggaggataacaccgatgtctcaggattgtgagtagtgaaatgaaccgtcatatagacctagtcctatgtgtagttagaggcagatatagaatattaaggcgcctttggcgtgaaggtaccgtatgattcagacataattcacgtgacgagtgatgtgcccgattgatgtataggcgctgtaggcgtctggtaagtagtgcatgtctaggaatagtcccgttgtcaggtgtcggttcaggcaagagtcaaggagtgagaagtgggttcatcataggcagatgttgaatgtagtgtgtaggtcaatgaatg

SEQ ID NO: 615533 - DNA, 218 bp, Homo sapiens
ggtttaacctgtggaagcatgctacaggcgtccacacgatcttcaagtggtgatcggctcacattgcctcactatctgcatatcatccgacagctaatatttcactatacatccaaacctcacttcggcttcgaagccgccgcctgatacaggcatcttgtagatttggtttgactattgctgtatgtctccatctagtagatgagcgtcactgttgt

SEQ ID NO: 615534 - DNA, 592 bp, Homo sapiens
atatctaacatatcactataaagaattaatctctctaatatataagaactctaaaaaaaaaaaaaaattttaaaacattgagagaaaaccaaaaatctttaccaaaaaaatgacaaaatacatgcacagattgttcacaaataaatgactcttacatgtaaaaatacactcaacctcgctcataagagaaatacaaattaacaccacattcacataccatgtttgaccaagtcacaccagaaaaaaaattaacagcttgataataaattgtgttggtgaggctataggggaaacaggtactctaatacactgctgctgggaatgcaaaatggtgaaatttcaatggaggggaatatggctatatctaacaaaactatacatgtatttacccttaaatgcaacaggtccactctaggaacttatactgaggatacccttcccaaaataatggcgaaaaatacacccgaggtatacagtagtaaatacgcacaatttcggaaacaacaattcaaatttccaccacgtatgagtcttgttggccaggtgtggtggctcatgcctgtaatcccagctacttgggaggctgaggcag

SEQ ID NO: 615535 - DNA, 95 bp, Homo sapiens
cgcggccgccttttgagaagtgcggaataggttgcttctaccacctgttcttaatgtaacagtaaaagttttcacatttttctcagaaaaaaaaa

SEQ ID NO: 615536 - DNA, 480 bp, Homo sapiens
agggtacatgacgagtaagtcagagacgtaggctgctgcgtgccgttcgtgagctaaaacaccaaaagtcaagggcaacacaagccacaatgacaaatgggatcggattaaactaaagagcttctgcacaacaaaagaaactgtcatcagagtgaacaggcaacccacagaagggaagaaaatttttgcaatctacccttctgagaaagggctactacccagaatctacaatgaactcaaacaaatttacaagaaaaaaacaaacaacgccatcaaaaggtgggcaaaggatatgaacagacacttctcaaaagaagacatctatgcaaccaacagacacatgaaaaaatgctcatcatcactggtcattagagaaatgcaaatcaaaaccacaatgagataccatctcacaacagttagaatggcaatcattaaaaagtcaggaaacaacagatgctggagaggttttgtcaccaccag

SEQ ID NO: 615537 - DNA, 114 bp, Homo sapiens
gtattttcggcgcgcagtatcgcctgcgttcggtgctgatgcggctgctggacagtcatgcacaccgtgcccagcgttcgtgtatctgatcccggtgctgattgctgttcggcc

SEQ ID NO: 615538 - DNA, 184 bp, Homo sapiens
tgtacttctggtcttatttaggacttatacattcatgagaaaagaacaaattttttatggaatacataacttccaggaacaacagtttataacgtattcagttgtttaacataacacagaactattttccttcctaaaatgtaaacatccagctaaatgcgggcacggcaagatcagggcgatc

SEQ ID NO: 615539 - DNA, 136 bp, Homo sapiens
  misc_feature (1)..(1): n is a, c, g, or t
  misc_feature (76)..(76): n is a, c, g, or t
  misc_feature (100)..(100): n is a, c, g, or t
  misc_feature (117)..(117): n is a, c, g, or t
  misc_feature (130)..(130): n is a, c, g, or t
nttctaccaacgccaggacgtggcgcgacgctgtctgtccccgtccggttcatctggcgccccagcctcccctgcntgcagctccccacccagctctganttcatggatgttaattnagagccctggttnctgcca

SEQ ID NO: 615540 - DNA, 150 bp, Homo sapiens
gctcacactccgcagctcttgagtccgatccttcatcctgcgacggctcctcctcctcctcctagtcctcctgcctctgctgctgctccgggtctcccgcctctgtgccggaggccggggtctgggggcgccggggggcgccgcggccgc

SEQ ID NO: 615541 - DNA, 1790 bp, Homo sapiens
  misc_feature (1038)..(1038): n is a, c, g, or t
ggcccctcattgacatgaatatcatactagcggatacctatctctctctacgtaggaactacctagccattatacgacttctagtcgcctcgatgatccattcccctacaaatgtcctttacgtatagcgaagtaaatgatcatgactacagactggtggccatttatcatgactcatcttctccaattataccactcttacataccacctctaaatcacgcctactttaacgcctctaaattaattggtctgccttcattttggcgcaatgacgttagtgtcggttcttggccgactcattgcggaaaagtctaggcggagagggggtccttgagacgcttatcatggggtccattcaagatactactcgaatcaaccattatatgggctccgtataagcgtaacgattaatcattaaaatccctgacatttgcacattatcttactcatattttgtccttgggcactcctctaagaattcgggttcacccaaatcaaaggtcaatttactttcaccatgaacacggaccggggaactatttagtacctttatgtacgcacaataaatcccatcaatcactatgtgcgatatcgatgccacaaaatgggcacccaaccaagggcgatacaatgtaacatttaggtccacgttcgaggtcaccccggtcgtgaacctcatgaatttacacaaataacggattagagtccacaagatagccaattccccgtaagtcatccgggccatgtgtgttttccaccactatatatcccgcttccctaccacttccccagaacacactcggcgcgctaaaaggaaaattctctccccaccggtgcgccttcaaacatatacattttaagtctttaaaaccccttgaacttcttccccgttaaagcacaccgtgtgtcatgtatacaccaaccccactgtggtgtctacaatggctccgcaaacaagatacacatccgccttaaagtgcgccaaagtttggttgtccctcgcgacaaatctcacacaacattcagtaaagaacaancaacatgggccgctgccggcacaaatataacagaagacatcattccaccactgcggggcggtcacccgaaataatgtgcgtattaaacaccaccacaccaatataggtcgggcgggcgacagctgcacgacccactaacgactgctcacacacacagcgctgggtgcgaacacgcacacaaccagagatgccgcccaggccatggtgaccccagcgaatcaccacgcaaagcacgagcgcaccaacaccgggcgacccactacaacgactgggacgacgaacaccactccaaataaagaagacaccaaaatcgggtcaccacgcacaccacacacccacgcatcaacagcagagaacgagacaaaacagcaacggagcgcgtcacaaatcgatagacccagtacacaactcccacgacaaccacaacacagcgaggcgacaccaacagcatagacaacgcacacaacagacaaacaacagcacagagcacgagcaggcgcaccaaacaagactaacgagcagcgagatcaagtaaaccagagtaaatatccagcagacagaatgtgacaaggcacaaccaatcagtcagttagtgacagcacgagactcagcaggagaacgacacaccagagcaaacaaacggacacaccaaaggcaagacacacaccgagaccaaagccacacagtcacaacaccatcacaaagcgaaacagcgacgaccagcagaacggacacaaaaccagagcaagacc

SEQ ID NO: 615542 - DNA, 960 bp, Homo sapiens
  misc_feature (23)..(23): n is a, c, g, or t
  misc_feature (68)..(69): n is a, c, g, or t
  misc_feature (311)..(311): n is a, c, g, or t
  misc_feature (379)..(379): n is a, c, g, or t
  misc_feature (406)..(406): n is a, c, g, or t
tcccccttcctgctagttggcgncctcatggctgtgaacaactgcgggctgcaagctggctcccccannactccccagtgttcaaatcctggattcactgctggaagtacctgagtgtgcagggccagctcttccgaggctccagcctgcttttccgccgggtgtcatcaggatcatgctttgccctggagtaacctgaatcatctaaaaaacacggtctcaacctggccaccgtgggtgaggcctgaccaccttgggacacctgcaagacgcactccaccccaacaacaaccagatgtgctccagcccanccgggcttcagtcccatatttgccatgtgtctgtccagatgtggggttgagcgggggtggggctgcanccagtggattgggtcacccggcagacntagggaaggtgaggcgaggtggggagttggcagaatccccatacctcgcagatttgctgagtctgtcttgtgcagagggccagagaatggcttatgggggcccaggttggatggggaaaggctaatggggtcagaccccaccccgtctacccctccagtcagcccagcgcccatcctgcagctcagctgggagcatcattctcctgctttgcacatagggtgtggtcccctggcacgtggccaccatcatgtctaggcctatgctaggaggcaaatggccaggctctgcctgtgtttttctcaacactacttttctgatatgagggcagcacctgcctctgaatgggaaatcatgcaactactcagaatgtgtcctcctcatctaatgctcatctgtttaatggtgatgcctcgcgtacaggatctggttacctgtgcagttgtgaatacccagaggttgggcagatcagtgtctctagtcctacccagttttaaagttcatggtaagatttgacctcatctcccgcaaataaatgtattggtgatttggaaaa

SEQ ID NO: 615543 - DNA, 298 bp, Homo sapiens
gtctctgtttcacactctctgacccattctttgatcagcctatgtgttctgatgcggaatttgggaaatagaataaagacaggacccttcctgtcatgctcttagaatctctcaggcaaggtactgtgctgcaccttgaacatggtaggcattgaacaaatgtttcaagatcatttattataagttccaggcattctgatagattttttttcatgtatttctttctgtggccttgaaagtaagcccttcccaataaatgcacagtcccatttgcctccattttaacgtactttgcaaa

SEQ ID NO: 615544 - DNA, 850 bp, Homo sapiens
acctgttggtgtcctgtgcctgttcagttgccctgccattgctgagcttggatcctgttctggctgcccctgcctggctgcccctgtgctggtccctgctgctggttgaactggagtggcctggctgcctgtgctgaatgaatgaccctgtgcttgctgtgccttctatggtgctgcatgcgaatgatgatgctgatgatttgctgtgtgcatctgatgaactgactgatggccttctgcctatcctttgactgtgctggctgccccctgtgtgccctcaagcctgcacttgctgatgcctgcctgtggtgtgtgtcctgtgagtgctcgtgttgacttgtgatgtacacttggaattgtgttgaagtacgtagccatgtgaaagtgtacccttgtgtccacacaggaccatggttcttgcacgctagttttcagcagagttgtgattctgagttttgcattgtacaggatggccgcattgaaaggtcatccctggtaagaaccttggtgccgcactcgagacttgagatcagatgagtttgtgagagctggcatgtggaggaaggcgcccgttttggagttgccccacacgtttcccttcctgtgaacaatgtcgacaatggaccagtgcccgagacatggtttcggcgcagattctggagcatctgactgtggccagatcttcacacgaggtgtctgcatcgagcttccacgcacccgtggcaattctgctgttagtttcgccagacttgaaagcagtctgggaacatgcatagtcattgctctttccccatctgatacagtagtcagatacatggctcagcactcctcaatctacggtgtggcatcg

SEQ ID NO: 615545 - DNA, 750 bp, Homo sapiens
  misc_feature (13)..(13): n is a, c, g, or t
  misc_feature (64)..(64): n is a, c, g, or t
  misc_feature (77)..(77): n is a, c, g, or t
  misc_feature (83)..(83): n is a, c, g, or t
  misc_feature (95)..(96): n is a, c, g, or t
  misc_feature (101)..(101): n is a, c, g, or t
  misc_feature (105)..(105): n is a, c, g, or t
  misc_feature (128)..(128): n is a, c, g, or t
  misc_feature (130)..(130): n is a, c, g, or t
  misc_feature (132)..(132): n is a, c, g, or t
  misc_feature (134)..(134): n is a, c, g, or t
  misc_feature (137)..(137): n is a, c, g, or t
  misc_feature (139)..(139): n is a, c, g, or t
  misc_feature (152)..(152): n is a, c, g, or t
  misc_feature (156)..(158): n is a, c, g, or t
  misc_feature (160)..(161): n is a, c, g, or t
  misc_feature (192)..(192): n is a, c, g, or t
  misc_feature (194)..(194): n is a, c, g, or t
  misc_feature (202)..(203): n is a, c, g, or t
  misc_feature (208)..(208): n is a, c, g, or t
  misc_feature (213)..(213): n is a, c, g, or t
  misc_feature (221)..(221): n is a, c, g, or t
  misc_feature (226)..(228): n is a, c, g, or t
  misc_feature (230)..(231): n is a, c, g, or t
  misc_feature (237)..(237): n is a, c, g, or t
  misc_feature (239)..(239): n is a, c, g, or t
  misc_feature (244)..(247): n is a, c, g, or t
cccgcgtttgtgncggtttggcggtttttttcttggttcggcggtttttcgcggttgcctcgtngtggccgggccgncgccgnctcttttgtggnngggcnggtntgttgctttggctctttgggctntntntntgncncttttttttttcngttnnntnnatgtggcgggattttcttttttgcgggttgntnggtatttnnttttnttgtntttttttnttttnnntnntggggntnggtgnnnnatttgctgagtctgtcttgtgcagagggccagagaatggcttatgggggcccaggttggatggggaaaggctaatggggtcagaccccaccccgtctacccctccagtcagcccagcgcccatcctgcagctcagctgggagcatcattctcctgctttgcacatagggtgtggtcccctggcacgtggccaccatcatgtctaggcctatgctaggaggcaaatggccaggctctgcctgtgtttttctcaacactacttttctgatatgagggcagcacctgcctctgaatgggaaatcatgcaactactcagaatgtgtcctcctcatctaatgctcatctgtttaatggtgatgcctcgcgtacaggatctggttacctgtgcagttgtgaatacccagaggttgggcagatcagtgtctctagtcctacccagttttaaagttcatggtaagatttgacctcatctcccgcaaataaatgtattggtgatttggaaaa

SEQ ID NO: 615546 - DNA, 318 bp, Homo sapiens
cgacagagtgtcaccccaatgttattaacagcacagagccatatacggaactacctaaatgtccatcagtagatgaatgtttaaagaaagtgtggtatttaccctgggcatggtggctcacgcctgtaatcccagcactttgggaggccgaggcaggtggatcacctgaggtcaggagttcaagagcagcctggccaacatggtgaaaccccgtctctagtaaaaatacaaaaaaaaattagctgggcgtgataatgggcccctgtaatcccagctacttgggaggctgaggcaggagaatcacttgaaccttggagg

SEQ ID NO: 615547 - DNA, 579 bp, Homo sapiens
ggagagggggtctcatcaatagcaatccgaggcccggggccttagcaagagcctccttgagagccgggatggtggggcaggtgaacagggatgttttccggcttcagggataatgggcctcaagggtggcggggggatgcttctgccgggcctccaggcagaggggggctttctcctcccagcgttcagcaagggtcagcagttcctgcagctcggccggggcttaatccacagcagggctaggggctacacgggcacccgcgaccaacagtcctcgcatgacagccaaggtgccccttcgggctgagggggccagtgtgagtttcacctcatccagccatcgcgccggtccacctgccgcgggagctgctggggcctcaggcacctccacccccagtggccgccccctctccaacagggacggcagtagcccgggatggtagggcagtgaggccagtgcctcacgagcctcagccgggtaggcctccaccggttccagaacacccttgacatccccaatcgggtgcatggcgcagggcaggttgttcatctggtccagaaagtgccggagctcagtca

SEQ ID NO: 615548 - DNA, 133 bp, Homo sapiens
ggtcggaggtcgctggcggtgtggtctttcggcgtgtgcagggccaggtcagtatggacgaagttgttggtgcacacgccgtagtgtgcagaccagagacggtgtggagaagtcgcagtggacgaagttgtgg

SEQ ID NO: 615549 - DNA, 329 bp, Homo sapiens
gcaggggccccagtttgggagccccggatgaccctggacactcaagccaaagttaggcccccccaggcccaaccctgtgctggtcaagccagggcagtcacagctgcttggggcccccagcactgctgcctggtttccccagtagcctccctggccgggttccagccccctggatgcccgtttttgtcccaggcgggatggggcccagtgcaggacccagccatgtaccccaaaaaaagagtaccaagtagttttttgttcagctttttctggaaactgctgtttagggccccctgccctaaccaggaataaaggcaagacagcctgga

SEQ ID NO: 615550 - DNA, 1526 bp, Homo sapiens
cgctggcggcgcgctggtcggtgttgcgcggtggtgcgtcggcgatgatctgctggtgtgtacgctggcgtgtttgcatcgcagctgtgggggggtgttggcgtctggcggtggtatgcgcgcatgttttggtcggccgcgcgtgcttgtttggtgttgcttcttggtggttgctcgagggtgttgtgtcgcgttttctggctgagatggaggggcctcgtgctgtgcgtgctgggggaggtggagttcgtgtgtggagggtacgaagtagctgtatggggggggtaagacagtcgtgtccttttgtttgggggggtgttcgtttggcgtggagtggggcggagtggcgctgcgttgggggggggggggagttgggggctgattgttgccccccgtggggtgggagggtggttgctgcggcccgcgtgtgggaggggtggtagatgcgagggggtgtgtttggtcgggtgtggttggttgtttatgatgggtcgaggtcgctgttgagtgcgggtcctcccgtagatggcggcaccatcgtggtgtggtgcgagcggttggtagtgatggcaccgggggcgttttgtgttggagggtgtgggacgacccaccggggggaggattcctcccggcgtgggtgtgtgtcggcggggaggagggggggtgcgccgcacagggggtggtggaaagtgagtgcagcggtgagaagatgtgtcgtgtatagggcagcgctgtgtggttgcctctatagaaaggggtggtgagataggcacagctcgtggaaagaatgggtgtgtttgtgggaagcgcgcttctctcgtagaggggggccctagcagccccgtagtcccggggagagttttgggtgtttgtcttgtgggaaacgcctcgtgcttatatggtcacgccgcgcgcgctgtcgttgatagactcgccgctctcactggggggggggcacacaccacgggctgtctctatagacgtctctctctgaggttgggaggctccacgagggagattttatatcttcacatataagacccttgttcgtctcactctggtatccctgggggagggcgtttatatatatagagccacaccccagagagatataaaatggcacactgttctctggggcctctctttatataaaagactctggggagaatttcttatagagagaagacgcggctcttctatatgtaacccgcgcctcgtatattataggctcggtgattatagtttttttttgtttttcttctctataagaatgtgttctcgttatattaggttctgaagaccacacccactcttgttgtgttgtttataaggagaaagaatatcacgtcacgtgctccgcggaaggtaatttcctcgtggggtctgcacccctcctcgttctgggtggtggaatgtgggtttgagaaagtaaggagaagcacgggtggtaaccgctgtgggctcttaaccccttaatgtgattttggaccacagtgccttccattataagttttttttatccacca

SEQ ID NO: 615551 - DNA, 399 bp, Homo sapiens
gttgtaccgtggatgtatggaaaacagacgaacctagaattagaagtggagcctgcaagatgtgacagaattgtttcaatctcgtgaaaaaacttgaacagatgagaggctgctttgtatagataagcaaagaacgtggtttcctgaaatgaaatctactcctgaagatgctgtgaacattgttgaaaagacaacagacttggaatattacatcaacttagttgatcaagcagtggcgaagttagagaggattcagtccaattctaaaagaagttccactatgcgtaaacatgttaatcaaacagcgtcgaatgctaaagagaacgtatcccatgtcctgaagagtcaaaacacagcagcaatcatcactgcagactaataaaacagaaaactgccaca

SEQ ID NO: 615552 - DNA, 1234 bp, Homo sapiens
attccaaatagtttgtgccattgaaaaacttgaccttcaaaaaaattgtttttcagaatagaacacaataggaaccagtgcactgcacagttgtgcaacacaaggaaagcagcaatcattaaagcacacatgtaacacaacagcattttaagcaccgttgaaaatccaattatccaagcaacgtccataaaaacacctatggcttttgcactttgttattggatcccagattaattatccttgcattggggcaacactcatctttcatcactttgtctgcatgtacaagcatggttagaagcaagacataagtcatgagcaaagacacaactgcgcacatacaagagagacccacgtgataactaattcatataatgaggcaaaacaacatgtataccaaaataggaccacatatctcttatgagttatcaagagactagaaaagacttgaggaaaaagctttggaaaaacttctattaatagtagaatctagatacaaagaacaaaaagataattgacacaaggcataacattaaaagaaggtagtacaagataacaattggaattgcaaataaaaatcaaaaataatgtaataaaaagatgatgacaaatggatattactaagaagcaatgatagtcaaacacaaccgacagcaactcctgacgaacattcaaggacgcagacaacatcgataatatgggaaatccataaagcatacaaagacccagaaggtgcagacaaacacaaaacaagaagaaaaaacccagaatagggcaaaacaaacacaacgagacagaccacgaagacaacaacaaaaacagacaggaacccaagaagtccagacagagaaataaacaaatcatgtcgaacagcaataaaaaggcggatacagaaaaatgactacaacagaacaaaagagaccgatgaaaaagagaggagacaaatagccacgacgaaagaaagaggaaagcggaaaggaagaaaacacagaggagcagaaaagaaaagaacagtataaaagaacaaagagaccaaagcagtagaaacaaaggggatagaaaaaacgtgagagaaggcagaaagagagcaaaaaacagcacacgaaacaaggagcagagatagacagacacagaacaggagataagaccagcacaggaaaagaaaagggaacaacaaacgagctgtggacccacccaaaaaacaagaagcaagagaaaaacgaagagaacacaa

SEQ ID NO: 615553 - DNA, 202 bp, Homo sapiens
gtgtattagcaactcatcactagaacatcgtacacacgacacgtactacgttgtatctcacttccactatgtcctatcaataggggctgtatttgccatcatagtggggcttcattcactgatttcccactattctcatggctacacccctaaaccaaagcgtaagccacggtcaatccacaacgccactggtcaacccagc

SEQ ID NO: 615554 - DNA, 180 bp, Homo sapiens
gctcgacagggcatgtatgctgactggtggcaggagctggatgccaagggtgacgaggccgaggctgagccaaagcctgaactcgcatgagaaggggacagccacacccctcaagcttgggaagcctggtgccgatggcccacgctcaccagcctgggcagcagcaagaactatttatta

SEQ ID NO: 615555 - DNA, 128 bp, Homo sapiens
ggcacgagccacaactaaaaatggatccacatagtacctgttcttttgacgagaggatttactgaaactggataggatctccctgcatgacagtgccccagaaacttaatgaggcctggactggactg

SEQ ID NO: 615556 - DNA, 146 bp, Homo sapiens
ctgtgctctactactgcggtcctctactcctctacttactgccgttctctactgttgcctctactcctctacttctataatacttatcacagtactgtgattgtcaatcagttcctaccctgcagatattcatagtgaaaggaact

SEQ ID NO: 615557 - DNA, 133 bp, Homo sapiens
agctcgtcattacatgaaaaccaccgataaccacaataataacaagagacaagaagaatatacaaagatgactgaccagaaaacgattaacaaaataacaagagtatgtcctcacctgtcaaaaataactttg

SEQ ID NO: 615558 - DNA, 832 bp, Homo sapiens
gctagaactctacgttataagcgcggacatggctacatatatgaactgggtcatacatgtaacttacagagtagccatgtgcaatgagctagtgtgtgagtgattcttcaacacactacatactatcgtctccgagaggttgtatttcgtagccgattcgtagtaaacagaagttccatgtacaggagggtctctcgaggttccagacactggctttgtatgtcaacaagaggtgtctcctatgacggatgctgcgaatcattggggataaacctttcacctcgtggtctgtcgtggaggctgatattttattccctattatttaacaactggaagaatacacagctattcgaatcctctttattcacttgcaaggcattacaatggaaagcaatcatgtagggcaagtgactccatggcggcatcatgtgtacagcacatcagatacaatggtaaccagacgactcacacgttacatttacgtggagtgactgtaaaattacttcagcgacaaaaatgacagagcacagacactttctgtgatagaactgctggcccccaaaggtgtccagattcgaccatagctttttaacaatagcttttcaatggcctaggcgtggatggctcacacctgtaatcccagcaacttcgggaggccgaggcaggtggatcaccaagttcaagaagatgagaccatcctggttaacacggtgaaaccccgtctctactaaaaatgccaaacacacaaaaaagacacatcacaaacaaaagttctgatgacgcaacgacacaagagaaaattttcaaacaaacacgtcatgggaacaggcaa

SEQ ID NO: 615559 - DNA, 300 bp, Homo sapiens
atgcttggaaccagaagtgtttcagatttcatatttttttcatattttggaatatttgtattatacttaccgctcaaacattcctaatccaaagtccgaaatgctccaatgagcatttcttttgcatgttatgtctgtgctcaaaaattttggattttttagcatttcaaattccagatttttgaatttggtatgtgcacctatagtagtatgcttatctattcgacatatgacacagttgatcattttctccttctgctaacacttgtggttatcttgcttcaagatagcataatgccc

SEQ ID NO: 615560 - DNA, 448 bp, Homo sapiens
agcagttcaccaggccacggcccccagggcttcggtccgtggttggcacattgccgtctttcctacctgtgttttgcacagttgcagttagatggtgtttgcaattttacacctgcccgttttctctttacctttcttgtggccacgggtccacagcaccacagttgtttctagagtccaatttacggacggcgtaaaatttcatgatgctgatgatccagaacatcctccaccagtcccattattggacgtgtaaatcacatgcggcagtgcctcgttacccgcagttcactttctgcagtttgttacctgcagacagctacagtatgaaaatattaagctattctgagggagaggccacagccacatcacttctgttacagtatagtgttatgattgtatcttattattagttattgttataaatatcttattgtgcctaaaaaaa

SEQ ID NO: 615561 - DNA, 408 bp, Homo sapiens
ggacgtacactcagggaatctgattgtagtgacagatggtgttacgagaggagtctgggttccgtcagcaggctagatgtgcagaggggtgatctcagctcacggcaacctccgccatccgtggggtccaagtgattctcccgcctcagcctcccgagtagctgggattgcaggtgcccaccaccacgcccagctaattttttgtatttttagtggagacagggtttcaccatgttggtcaggctagtctcagtctcagtctcctgacctcaggcaatccgcccacctcggcctcccaaagtgcagggattataggcgtgagccatcgcaccagccccatccatctttcttgttggtgaagtagaatgtgtgtatggggaggggaggtgataggatacagtagggaga

SEQ ID NO: 615562 - DNA, 746 bp, Homo sapiens
  misc_feature (1)..(1): n is a, c, g, or t
  misc_feature (9)..(9): n is a, c, g, or t
  misc_feature (29)..(29): n is a, c, g, or t
  misc_feature (32)..(32): n is a, c, g, or t
  misc_feature (41)..(41): n is a, c, g, or t
  misc_feature (86)..(86): n is a, c, g, or t
  misc_feature (94)..(94): n is a, c, g, or t
  misc_feature (103)..(103): n is a, c, g, or t
  misc_feature (110)..(110): n is a, c, g, or t
  misc_feature (141)..(141): n is a, c, g, or t
  misc_feature (145)..(145): n is a, c, g, or t
  misc_feature (190)..(190): n is a, c, g, or t
  misc_feature (231)..(231): n is a, c, g, or t
  misc_feature (238)..(238): n is a, c, g, or t
  misc_feature (241)..(241): n is a, c, g, or t
  misc_feature (276)..(276): n is a, c, g, or t
  misc_feature (321)..(321): n is a, c, g, or t
  misc_feature (327)..(327): n is a, c, g, or t
  misc_feature (354)..(354): n is a, c, g, or t
  misc_feature (416)..(416): n is a, c, g, or t
  misc_feature (419)..(419): n is a, c, g, or t
  misc_feature (428)..(428): n is a, c, g, or t
  misc_feature (452)..(452): n is a, c, g, or t
  misc_feature (506)..(506): n is a, c, g, or t
  misc_feature (518)..(518): n is a, c, g, or t
  misc_feature (556)..(556): n is a, c, g, or t
  misc_feature (583)..(583): n is a, c, g, or t
  misc_feature (613)..(613): n is a, c, g, or t
  misc_feature (620)..(620): n is a, c, g, or t
  misc_feature (626)..(626): n is a, c, g, or t
  misc_feature (646)..(646): n is a, c, g, or t
  misc_feature (658)..(658): n is a, c, g, or t
  misc_feature (686)..(686): n is a, c, g, or t
  misc_feature (705)..(705): n is a, c, g, or t
nccattganaaatttgagaaggaggctgntgngatgggaangggctcgcttcaagtatgcctgggtcttggataaactgaaagctnagcgtgancgtggtatnaccattnatatctccttgtggaaatttgtagaccagcnagtnctatgtgagctatcattgatcgccccaggacacacgcagactttntcaaaaacatgattatcagggacattctcaggcgtgaactnttctgtnctnattgttgctgctggtgttggttgaatttgaagctngtatctcctaattaatagggcagacccgagagcatagcccttctngcttanacactgggtgtgaaacaactaattgtnggtgttaacaaaatggattccactgagccactctctatcagtccagaagagatatgaggaanttnttaaggtanttagcacttacattaagaaaattngctacaaccccgacacagtagcatttgtagccaattatcttgtttgaatggtgncaacatgtctgnatctcaagtgctaatatgccttggttcaagggatgganagtcacccgttagactggcaatgccantggaaccacgctgcttgaggctctggactncatcctnccaccnactcgtccaactgacaagcncttgcgcctgcntctccaggatgtctacaaaattggtggnattggtactgttcctgttngccgagtggagactaggtgtactcaaacccggtatggtggt

SEQ ID NO: 615563 - DNA, 1206 bp, Homo sapiens
  misc_feature (789)..(789): n is a, c, g, or t
gacgtacactcgtctacgtgacgggacacgaccacagcacgcaaaacaaactggcaatactcatgtgataacgttctttaacaacgaggtacagacgcaaccgtgctattgggacgcagacgacacgacgggagacacagcagcatcttgcctggatgagccaggggacacagaagagaagcccactatctcatttaatctttacaactctcttgcaaggttccctggtagtgaaaatacagtgagataaatcatgaaggccactatcatcctccttctgctagcacaagtttcctgggctggaccgctttcaacagagcaggcttatcttgacctttatgctagaagattgacggctcctgggataaggccagaagtacctgatgaccgcgacattcgaagccactccctaggcccagatgtagccccattccgcatgtcaactgccatcttccgacgtggatacaagtgtaactgataggcgtcctgggcaccacaacatgtgggccaacggcatcattccaccccttgacaccaaaatctggctacgcacctggcaacacaacacacaaaccatacacccagcacatcacgaagatcggacaccctttacaggaacccttgaacgaaaccattccacgccactaggaactcccttgatagacaccatatacactttcagcaaacaagttaagcgtcctgcgcaggcatttaacacccaccattctgggggaaagctggcgaaccgacctacaattgggtccaagcaaatacaaagaaaggagcatntggcaagaaacaagaatgcacccaaaaaactcatacaagaacagccgatgccacaactaaccacaaggcgatgccgcaacacgggcgaacaaggtatcgatatcaacggagcactgcgaacccacatgactgcggcaaagacccggagagcacaacaacggctgacaacagacccggctaatgccgaagtgcgcgccccccggaccagcaaaagcacccacacaaacaagaaatggaggcacacagaccccacacacatcgacaaggcatccacccgcacatagcaaaaactgcgatgccacaacgacggctaggcgaccaccgaccacgccacaccgcacacagcacaactcgaactgctcgatgacgagccgcacgcaccaagagaggaagcaaacaacaagagcggcgacgtcc

SEQ ID NO: 615564 - DNA, 370 bp, Homo sapiens
ttcgacggtgtactagaatagaaaagtgactggaagggaatttacttaaataccattagtgtttacacttgggtgtaaggattaaggaaatattcattttcttctttaatttccttttttttttttttggaaatgaagtctcactctgtccccaggctgaagtggcagggccttaatctcactggcaatctctgccccccaggttcaagcgattcccctgtcctcagccctcttgagcaactgggaccatacaggcgcaaaccaccatgcctgcctattttttggttttttaagtacgagacgggttccactgtgtgtacccaggagtgtctctcgatcctcctgtgattccatgtgactccccccgcct

SEQ ID NO: 615565 - DNA, 116 bp, Homo sapiens
  misc_feature (107)..(107): n is a, c, g, or t
tgtggtgcaatccccaaattacaatttatggagacctggaagagcagtgtctcatgggccgaggtataggtgtctccctcctgcgcttgttgttgagcggtacgagntgtcatgca

SEQ ID NO: 615566 - DNA, 119 bp, Homo sapiens
agagtatccccccggatgtctggggcttggcctctcagcagcatttgccagctgggatttaccacttgtggcgcgcatcctcctctgtgaaacatccccctgccgctctgcagcgccgt

SEQ ID NO: 615567 - DNA, 917 bp, Homo sapiens
  misc_feature (282)..(282): n is a, c, g, or t
ccgacgttgactattctctagcttatagccactaaagacattgtgaacattatacctattattcggcgacatgagactggagtcctagtgcacttattctaagcctcgcttattcgagccgagtctgggccacgatcaggcaatcttgctaaggttaacgacactactatctacatacgtatatacctgtcactagacccatgcatttgctattaatcttcttcatagatagtcatccagcatcaatctggaggcgtttggctaagttgagctagttccccntagatataatctgtgatgcgcccgtatatggctgttatcccctgtattaaaataatataagcattcatgacatcattacctctcgcatctctctcgtacatccttagcttgcctgactatcatgcttaatagctggaggccagtgagcaggggacatcatgggtgtgaggcctatgtgcttaacactcgtgcgctcttaaggcacgtgggaatctacttcgcacatcggctggaagactcctccgtgtaatactactaagtacaatctgtctaccttatcaaccctatgacaggatgtgtctctggttctattcgttaggtggccaggtctggatttccattcattatagcacatgtagtcaaatattacataagctcctcgcttgtccatatactcaccagataggcataaagcacccctctttcggtcctggatccggtcctacattgacaggtgggatccgtacattcttcctatcatcttcccgagggctctagcgtactgtggctttctaattgtacttatcttaacagaccggcgtatcgtataaaccgatcgttatttcgtacgccgccctggaggcatggtggacccgatactattcccaaaactaatctggagttttcggccaacc

SEQ ID NO: 615568 - DNA, 134 bp, Homo sapiens
ggatttgctggtgcagtacaactaggcttaatagggacatgcctcactttcttctagctgagctttaaatcattagagcttaaattgtcagatcgttcattgcctttccagggttatttagtaaagtttgttga

SEQ ID NO: 615569 - DNA, 328 bp, Homo sapiens
cgattcgagctcgttccctttttggggccttggctcttttgggattcgctcaaattcgtgtaaaaaaaattaaacccccgaacttgccatttcttatttttcgaggatttggcggtcggccttaaaaagctccggacaagatgctggagtttagccctgaaaaggagaaacttacacccccgggaaatgggcctacgccccaatttaaaccctttaacacttaaggaggaaactcccccttttttttggaaaataattaaagggttcccataagtaagccccaaaaaaacacattttggcgagcttcacggttttttcccacccactg

SEQ ID NO: 615570 - DNA, 493 bp, Homo sapiens
aacacatttactgcgggcgggggtctgagggcctgcaaacaactcgagctggagcctcggccaggaccggcgcgagaggcaggcacctggcccagtgctccagagaaaggccaggcctgcagcacccgccaccgtcgccggccgcccgcacgtccgtccgccccgtgactggctgcagtttccgctgcgtttcagctgagctgccgcacgcgcacgagccgtcaccggacgccgagacctgtttcaccctcagcgcacctggccctgcgccttcccccagcgcctgtagccaccctgagggcagatcgggagcaggtggcaattccggacacactgggctataccagggcaatagcgggactcccaggaagatgttattatttagcttaagtcaagatcataatgtgggctgctaagagtgcatttcagatgcagttcgtttttcaaacaatctttgccgcaccgagtatctgaataaaggaagaaaaataaa

SEQ ID NO: 615571 - DNA, 1089 bp, Homo sapiens
ttaggtgtgtactccgacagtgcactgtccatctcacactgcgatttcaccctgtctctagcgatcgctctgctattcagtgcatgatgtctgaccgatggacggggtattcggatatacgagcttgggcaccaactatatcggttgcgtcaaaggtgtgctataccaatacatgagtacacggtggcagagtcatcgatcaaatgaaacgacgggaaaatcgaatcctacaccccatgcttaaggggtgattccattactaactgggagcatcggatggcgcgctgcgattctgagtcgtacctggccggtccaaggaggccatggttggccaatggagaccgcagcaaggaccagtctttgcgacctgcccgagaagattggcgtagaattcggaccgtgagagatatacgatggataggcgcacagtgtcatctcaggaataatgagtacagctgtgcacgccccgggtggtggagtcgaagggatggtaagtccatatgggtggcagacggttagaggtgaccaaaggagtgcgacgtatgcaaggatgcgtgtacgtgtcccaggagggacggattagtaccctcgcattaggttgctcacagaaaggatgaaggcagactctgtcaggaaagtgcttatacttgtggggagctaaggatgcaaccagtcgacgagtctacaaaacaagtgcaccctggccctaattaacacccgtaggtcgcagtcgtctcctgacatcccaagtgcattgcccaaggggcctattcaatgggggctcgaagtgttgagtgtcgctagtatccatcgagccactagggcggggggtatctgtgtaattggccctggacctagtataggggggcctcgcgtcggggaatacagagacgtaggttcatcttaagaacctggcgaggtgggcgaaatttcagatggcggtcctatgactgaaccaatcgatggttggcctttgtgagttggggaccaccaggcggggatctcccctgggggttggtgggaggtgcgcacccgttgggggggccccttgtggggggattttgccaccccaacaaggagtttggggcc

SEQ ID NO: 615572 - DNA, 138 bp, Homo sapiens
taaacttgtcttctcaaactgttcctcagtttatgttggccaatgtagatggcctcttactaatgtaaaatgatttgtagtggaagcatttgtctttttctaattgacataatgaaaatattctgaacagactggtga

SEQ ID NO: 615573 - DNA, 935 bp, Homo sapiens
  misc_feature (571)..(571): n is a, c, g, or t
cgagcagtatgtgatgtaggagcgacgaagctcctttgaacactcgcggcgtttttccactggcaagtacttccgtgcccagaaatcgtgttgtgtccgaagacaccctcttctggggcgtcccaccaatataggctcaaccgagtctggggaacaataccccctggggttcgcgaaaaaaacctaattgttttgacaacgcgatttcatcctgcggaaggcgccctctctctccaaaaagggtttccaagacaccctgattggggaaactctcgcacctgagaagttgaagctttcaccgtcacaatttagttatccccctgcgggactccccaaggggcaagggcaatgcgggcgaaaaaaccgtttaaaaagcccgcgttgcaccgtagggagaatgaaaccccccgtggattggcttagggacttcatggggataaaccctctttgccccccccccgttgatgtggccctcatgaagtactcgcggtggactgcgggaatcacaaaaggtactatcatacgcaggggttcctcacctgaaactaatgcggcgccgggccgtataatncccccacgggtaatatatgccaaagaagtaagacagttaaaattatcctatgccccggagttttaaccccgtagagccccgacccccttgggaaaacacacggtggggccccatcactccctgcgttcccccccctcccgtgtcccaacctcgggtaaacccccgctctttgcttagataccccgacttccccgccctgtgtggccgcgtcccgctatccacctttgctttgtggcaggctgtggtgcccccagagattgttacttacatcctggggtgggcccgcacagtgtgccctctggccctcagttaccaccccccccaccccccccggggggccaaaaatgtttccccccacaagaca

SEQ ID NO: 615574 - DNA, 343 bp, Homo sapiens
  misc_feature (301)..(301): n is a, c, g, or t
  misc_feature (327)..(327): n is a, c, g, or t
  misc_feature (339)..(339): n is a, c, g, or t
ataccctgttactacaaaaaaaaaaaaatttaaaaattaaccaggtgtggtggcacacacccttctctctcttgctccttctttcgccatgtgataggcctgctcccctttagccttctgccatgattggaagcttcttgagaccctcaccagaagcagatgctgggcaccatactccctgtacagcctgcaggaaccgtgaaccaaaataaatatcttttctttattaaattacccagccttcaggtattccttaaacaggcaacacaaacgggattttacacattggctattaaaaggntaacaggcttcagggtccaagggggnaatggacttttngggc

SEQ ID NO: 615575 - DNA, 186 bp, Homo sapiens
  misc_feature (9)..(9): n is a, c, g, or t
acccacgcntccgtaagactataggtattcctcactgatatacatttcaggaattacaatacataacatacaatccacaaactttctacccactcagaatctcttactccatcatgtacttagtatttcccattaacctacacactgattttcatgctactccttgtagataccaaattcttgttt

SEQ ID NO: 615576 - DNA, 204 bp, Homo sapiens
tgtgggtgatctagaggatcccggctcccatttggttgccaggtgaggaggaggatcatctgaggcaagagtcaagatcatgctgggcaatgtggtgaaattccgtctctggtaaaatacaaaaaattaggcgggtgtagtggtgcatgcctgtaatcccagctactcaagaggctgaggcagagaattgcttgaacccggaaa

SEQ ID NO: 615577 - DNA, 648 bp, Homo sapiens
  misc_feature (58)..(58): n is a, c, g, or t
  misc_feature (62)..(62): n is a, c, g, or t
  misc_feature (66)..(66): n is a, c, g, or t
  misc_feature (75)..(75): n is a, c, g, or t
  misc_feature (80)..(80): n is a, c, g, or t
  misc_feature (90)..(90): n is a, c, g, or t
  misc_feature (149)..(149): n is a, c, g, or t
gagtatgagagtagacgtgtgtgtgtagtaaatacagggtcgaaacagcggacggagnagtngtcnagtgccctnaccancgtgccaagnattttttggtgctcaaaccaatttcctgctgaccagaatgaaatggagccacattccancacggtgcgggggctgacctcctgcaagcccagaccatggaagacactcaataaaaagtaagtgattaaatgacaacctctacggaaaagagtatggaggtctctcaaagaactaaaaacagaactaccttttggccagatgcagtggctcacacctatggggggaacatttgggaaggctgaggtggaaggatcacttgaagccagagtttgagaccagcctgtgctacacagcaagaccccgtctctacaaaaacttaaaagattagctggctgtggtggtgctcacccatagttccagctactcgggaagttgagggagtaagatcacttgagcccaggaggcccatgctggagtgaactgggattgttccactacagtccagcctgggtgacagagaaacgaaaaggaaacattacctaattgggctagaggataatattttaatttcctgggttttgaaaattcagtttgaaagagaggatatttgccgggccc

SEQ ID NO: 615578 - DNA, 339 bp, Homo sapiens
acggtctctctctgtcacctaggctacagtgcagtggtgtgatcacagctcattgcagccctgacctcccaggctcagccatccttctacctcagcctcccgagtagctggaaacaggtgcacaccaccacgcccagctaatttttttattttttgtaacaaaaagagacaggatcttgctgtgttgcccaagctggtctcaaactcctgcactcaaatgatcttcccgtcttggtcttccaaagtgccggaattacaggcctgagccactgtaccaagccagaatgtgatatatttatactagcagatattattcagcaataaaagggaatgctgata

SEQ ID NO: 615579 - DNA, 493 bp, Homo sapiens
  misc_feature (3)..(3): n is a, c, g, or t
ggnctcctcacatgtccctacaaggacaggccccaactgataaccgtcgctttttatttatggtgaacatagttggatttgatcacaggtcaaaaacgccttatattttgaaaagactccgggcccctcttccctctcccgggttccctagccgttccccttctgccccagtctgagccagtgaggggtagcttttaaaaaccattatcctagagggaggaggcactgagtgctggtaactcgggaaagaggcctacacccaggggctaggaatttaattttccctttcctcaccagggtgtcggcagtgtgtgtgtgggtgtgaatgtgtatacttgcccatcagcattaattcacagtgtctgaatttcggtgtccagacgagcccaatcaaactagtggggaagggccccagtgaccaagtgtataagcatccctggaaaagggatgggggcaggggaggcaggaggggctctccagagcccttttccat

SEQ ID NO: 615580 - DNA, 135 bp, Homo sapiens
gtctatctgggatcagtacgcgcatatgcagtcgagagtaaattatggctgaatcatccgctaccttcagcgccaactggcgcctcaagtattcttgatctgcctcttcctacacatcggacgaggccatatagt

SEQ ID NO: 615581 - DNA, 341 bp, Homo sapiens
aagaccagaatcgaagtttcctgattccatattttaatgttttgaaatttatactccaggctgggtgcagtggcttgtgcctgtaatcccagcactttgggaggccgaggcggccggattgcctgaagtcagaagttcgagaccagcctgaccaacatggtgaaaccctgtctctacttaaaaatacaaaagagctgggcatggaggtggtgcgcgcctgtaaccctagctactcgggaggctgaggcctaagaatctcttgaacccaggaggcagaggttgtagtgagccgggatcacgccactgcactctagcctgggcgacagagagagagactgtct

SEQ ID NO: 615582 - DNA, 549 bp, Homo sapiens
acgctgtcgtaaaagcgaccgagaaaagaccccagtacatggtggtgatgccttgctgaatcgtgcaaaccgctttagcaaaagaccccagtcttggctcctccagagctcccaaggccggctggatcttcattcacagctctatgtgttctgtactggggtggcttctccactgccttcttggctaagaggttggtccagaaagctacttctttgtccttcagcttctgggccgcctgagtgttggcaccaatctgcagatacccttccttctggttgtactctggccagtggggcagcccttccccattggggttcccattgcgagcaaagttggcccagaatttcatcagcatcttgctaaagtctgatctcctcttctgaggcaccctcttttaaaaatggggccccaaagacggagaagagctcatccccgtggtctcctatcaccgtctagggtctcatgtctgatgagaagcttggacggtactgaaactcatacatgtaggtgggtgctcccgaatttctgttggaccggggcaccaatca

SEQ ID NO: 615583 - DNA, 438 bp, Homo sapiens
atcagtggggagcagacgtttcttggtaggtgggatctctatactagtgaacaggccagttccagactttggacttagaactgtactctagattatgtgaacacagaatagtgtcaatccctaatttacttacggttacttattggaagtggggctgatgaagtacgcacaggagggaaatctactgtgtgtaggcacaggcagccccagtgtataaggagatcatatgccaaaaggttgtctagttggttgtgtgctgacctggagtgtatgttcctttagagaccaggttatccatggtggttaggcccctagagcagctggaaaagatgatcaaaccaataggttagctgacatcgaataatgtaatagtttatgctgtaatagtttatgctgtaatagtttatgctgtaatagtttatgctgtaatagtttatg

SEQ ID NO: 615584 - DNA, 330 bp, Homo sapiens
  misc_feature (17)..(17): n is a, c, g, or t
  misc_feature (61)..(61): n is a, c, g, or t
  misc_feature (79)..(79): n is a, c, g, or t
  misc_feature (253)..(253): n is a, c, g, or t
  misc_feature (255)..(255): n is a, c, g, or t
tccccttgtacatcttnatgttctttggcagtctagagaaccagaagagcaaactctatgngatagaaactctaagaanttatttacctccagcatcccttctcttctttcattaaactgaatttgtggccaactcaaagactgacaatttatactatggtttgtatgtttttatattataatttatattatggcttatgtcaaaatgttttgttcactgctttgaaagtatcttttgtttactttttttttntnttttaattttttcctttctaattgttagaaactcatgtattttatctttcaaagaaaattttttaaaaggctaaa

SEQ ID NO: 615585 - DNA, 315 bp, Homo sapiens
caacatatctactaagttataataatcaaaaaaaggtggtctagcattaggacagacacaaatggaatacaactgagattatccagtttacaaaggtttagaaataaaccttagagaccagcctggccaacatggcaaaaccccatctctactaaaaatacaaaaattagccgggcatggtggtgcatgcctgtaatcccagctactcaggaggctgaggcaagagaatcgcttgaacccaggaggcggaggttgcagtgagctgagatcatgccattgcactccagcctgggtgacagaatgagactccatctc

SEQ ID NO: 615586 - DNA, 326 bp, Homo sapiens
  misc_feature (240)..(240): n is a, c, g, or t
  misc_feature (267)..(267): n is a, c, g, or t
  misc_feature (287)..(287): n is a, c, g, or t
tggagacagggtctcactgtgttcgcccatgctggagtgcaatggtgcaatcttggctcactgcaaccgctgcctcccaggctcaagtgatcctccggcctcagtcccccaagtagctgggactacaggcacgtgccatcatgcctggctaatttgtgtatttttagtagagacatggttttgccacgttgcccaggctggactcaaactcctgagcttaagcgattctgcccagcgcanctgcccaaagtgctgggattacaggtntgagctactgcacctggctnccaatcgattttcaacaaagatgccaagaccatttacac

SEQ ID NO: 615587 - DNA, 276 bp, Homo sapiens
actatatattgtagaaggtatttcgagcggctatacctactgtacagatagccacccggactctatcttaaccagtaaaagttttctgcacagcacggttcacagaccaacgtgtgtggatacaaatataaaggccacacctataacagaccgaacctactacaaagatcctttactttgcactaatatgcactggagaaccaaagacgggagacgaatgaaagcaaagatgctacaaagaaccaaaggaaagacctgaagagctctgccaaggag

SEQ ID NO: 615588 - DNA, 100 bp, Homo sapiens
cttgacttcagcgcctcggctccagcgccatggccctccaggaggtgctccgttgggggaaactggaggaggaccgcgcgaagcgagatgtctgggggag

SEQ ID NO: 615589 - DNA, 995 bp, Homo sapiens
ggagagagagagagagagagagagagagagagagagagagagagagaaacatcgggaagaaatagccgttgtagtgtgccatatatcttcctgatatcatcaaagatctgaaggcctacaagggccagtgcgcgctacagaagggctttacaagatgccttcttggctatagagcgccaaatgtgaccactgaagaagtcatttagagagctggcacagatatgcgggggcgacccactgatggactgaacatgaacaccagaaaaagtaggctgacatgacagactgagtgctggaccacatgagcgacggcgctgcacatgcgctggcactgcacagactgacctcccacctggacctactagcacaggagccctgtctcgcactaccgcctctctgctgcggcacgcaacacacagcattccaaccaggaggtagaaccacccacaccagcaaaacacacagaaaaatccctggacaagaagacagaaagcaagcaacgggacgccacgcgcaacacacacacgggacgcccccacaaagcgggcgcacctccataagagagggagccagcgaccgcaagcaaccccctagaaaaagaaagacacacacacccagtaaagggaagcaaacacacccgtccaccttctcgaacgcaagcaccggcaaagaaagagacacggcggcaccgcaccccaacaccaagctgccaaagacgacgagcagcaccatctaaccaaaacgagagcggaggcacgatcacctacatcacgacacttacacccagaaaccataaccgagcgaacaagacacaggcatagcgccgaaccgaataggtatggagtgagacgagcggcaactcaaacaaagagatagagcagaactgaactagggcaaggtagggatgagaaatacacctccccaaaccattactacgacgtggaatggcaggccgttagtatccgcaaccacgtcactctccctagggcctacac

SEQ ID NO: 615590 - DNA, 495 bp, Homo sapiens
  misc_feature (238)..(238): n is a, c, g, or t
  misc_feature (416)..(416): n is a, c, g, or t
caatatacacttaatgttgttattgtatgttgttactgaagtacttagatttttaaaatttcaaatcctaaatcacttcttgtaggagggttttcattaactgcagtatatacagttcactacatatgggttgtttgagttttttgtgtgctgtatttctttctgttttttaatacctggttttgtacatatctaactctgttctcttttggttgttcagaaactggatttttttttntcttaagcaggtgctaattgtgtgttttattaattttgaattcagaaagtaggtcccagctacataggtggttcatactagttacatccagaaacattatgtcaggctcctcgtgtcacgctttcaagtgtacaatatggatatagaacacacatggaggttagcgcactctcctggnattttttttttaatgagaagaaatacgtggtatttaaaagtggtaaagataaatcttttaaaaacgcaccgcactaaca

SEQ ID NO: 615591 - DNA, 155 bp, Homo sapiens
tctcgtatgccttctcaatgcagctagcgatctcatcccggatagtgtcgagcaggatgtcaatgaagaagcgtgtagctctcggtggggatgttatcccttggccaggaacactttgttgtagctgccctccatcaggtatttgctcagctgct

SEQ ID NO: 615592 - DNA, 975 bp, Homo sapiens
cctggtggagggtgcctgtagtcccagctaccggggaggctgaggcaggagaattgcttgaacccaggaggcggaagtcgccgtgagctgagatcgcaccaccgcaccccatcctgggtgacagagcgagactccatctcaaaaaaaaaaaaaaaaaaggaaaaggaaaaagaaaaagaaaaatttcctctattaataaatttaatagggtttgataagaggttggtaagccagtgctctctaaaagaaattcctttagcccagttgccggggctatatgctgtgtaatccccttcgctttgggcaggctatagggtgggagaaactgcctgtgacctcgtggagattggagactagcctggggcaacccagggcaagaatctcacccctctacaaaaatttttaaaccttgtagcccaggaggcccaggccgccagtgggtctcacaccctgtaatccccagacacttggggaaggcccgaggcgggccaaaatggctggaaggtccaggaagtttggagaccaccctgggaccaacattggttgaaacccaattccttatttaacacttttacaatttagccgggccttggctgcccatacaccctgtaatcccagttactcggggagcgctgaggcaggaaaactgctttgaaccccaggaggcagcacgtttccacgcgacgctggagaccactgtgaccccaggcgttggtgcggttggtgccaccttgttgggcccatatagctaacttaaggaagcgctgaagaggtatatgaacggagagttgctctgagggcgcctggggaaaggcttgaaaggcctggtatggtgaaacccccatataattagacgccaagtggcacccccaagcccccggtggacacggtgcagggagccccctaatttcgctaagacagacagaacacagagccactacacaagaaattcttcctcctacctgtgtagcacac

SEQ ID NO: 615593 - DNA, 366 bp, Homo sapiens
  misc_feature (55)..(55): n is a, c, g, or t
ttatagccagtgaaaaggcagaagaactgagacagctgcacctctgaaatcaggnttaccagacatgtctaaaactgagacttggccgggcgcagtggctcacgcctatgatcccagcactttggaaggccgaggcaggcaaatcacctgaggtcaggagtttggcaccagcttggccaatgtggtcaaagacagacagggttctgtctctactgaaaatacaataattggctgggcatggtggcaggtgcctgcagctactttggaggctggggcaggagaatcgcttgaacctggcaggcagaggttgccgtgagccaagatcgcgccactggactgcagactaggcgaaagagtgagacttca

SEQ ID NO: 615594 - DNA, 147 bp, Homo sapiens
ttgcatatgcaaggccaagtaggggcaccatactgttgcttatcctattcttcgtcacgtgattcatctatcatcaccatacaagatatcctgcatccatgtcttgtgccttacatatctccttgtccttgccatatgcaagggaat

SEQ ID NO: 615595 - DNA, 879 bp, Homo sapiens
ggtgctgacccctgccaggccacgaatatcaggctagagacccatggccatcttggtggctgtgggcaccaggcatgggactgagcccatgtctcctcagggggatgtggaggtggggtacaatcatccatgaccaactgccggagtagtggcctacgcaggtcgtggtcacctgccagcgactgtctcagacatgggcaagggaggcttggcatgacttagagaggaagggcagtcttgggcccgctatgcgaggtcctggcaaatcgcatggctgccctgtctccatccctgtccctcaggggtagcacgctatggcaggactgcgggaactggagggtccttgcttgtcatccctgttgtgaggttccttccaggggcctggcacatgaagcaggggtgctgtggccccatgggccttcagccctgagctgatggcgaatgggactgtaggtgcatgggccaagttcctgaggtcaggtcttggtaggtgcctgcaatctgtctgccttcgtggttgactgatcctggaaatctgttctccagaatcaggccaaaaaagttcacacgtcaaagtggggcaggggtgtcttcatgctggagactccaggcctgaggtggaaatacctcaatgctgtccaggcggatgctcatgaaagcctggtagagaatggtatcttccaaagcagtgtaatgtgggtaagggtttaaccttttcttttttttttaagctgggttggctcaacaagttgtgtttaaaaaaagaaaggaaaagaaatttggggggggggcgaaaattataacatttgggggggcgaagagaaaatgattgggcaaacgggaaaagggggtccaaaaggggcagggggacaagtggtt

SEQ ID NO: 615596 - DNA, 168 bp, Homo sapiens
gttatgctagtctggactttgatcgagtgcatctgtagcctgtatatcaatggtctgcgaaccgttgacttcgagggctcgattccgcttctggaagtcttcctcttgcacttgttaagcgagtgcgtgctgtcccgccttcattaagtggagcaagttttggctttg

SEQ ID NO: 615597 - DNA, 125 bp, Homo sapiens
acgtcctgctcacagaagggacagtgacagacaaggacagcaaagggggagagagtctgtgtgtagatctccttaaagaggctcatgtgtgccgggcgcagtggctcacgcctgtaatcccagca

SEQ ID NO: 615598 - DNA, 101 bp, Homo sapiens
tgtactgagctctgatcactagtactgcgcagtgtctggacttctggctttgactgtcgaccagtgttgtttccagaaagaatcctgagttggttcttgtg

SEQ ID NO: 615599 - DNA, 1640 bp, Homo sapiens
  misc_feature (98)..(98): n is a, c, g, or t
  misc_feature (102)..(102): n is a, c, g, or t
  misc_feature (104)..(104): n is a, c, g, or t
  misc_feature (119)..(119): n is a, c, g, or t
  misc_feature (124)..(124): n is a, c, g, or t
  misc_feature (134)..(134): n is a, c, g, or t
  misc_feature (142)..(142): n is a, c, g, or t
  misc_feature (179)..(180): n is a, c, g, or t
gtccatcttcgcggtagctgggaccgccgttcagtcgccaatatgcagctctttgtccgcgcccaggagctacacaccttcgaggtgaccggccaggnaacngngtcgcccagatcaanggctnatgtagcctnactggagnggcattgccccggaagatcaagtcgtgctcctggcanngcgcgcccctggaggatgaggccactctgggccagtccggggtagaggccctgactacccttggaaagtatgccatgtgcctgcaatgcattggatgtgtacaagtccaattggtttccactgtggcccccgatgcttggaaaaagttgaggcagtggtcagcactccctaaggtgttggcacaaaagcagtgagcaaagaacagacagaacgaagaccaggtggtctggtgctacatgtctgggctgtgaattgccactgtacaaactctgtgactggctatcttgctcaaacactgatattgttggacccaacacatgttatggtggcacaaggacactggaccctgtggtggcacccctaaagttggcccaaacacattcgtttaaatggactcctctcatattgttagaagtatctttggggccttttgtctacattacacgtaaagacatcaatggcctagacttttacgattgcacatgttctaagtcaaagaacagagcatcatacaacgaatcagagaacaagtcgacgggacggagcgccgacatcatgtagcgtggacccacagcgggcgatcgacccagcgacacgcaaacaggaagagatcggtgatacatctggaacacgagtgtgggggacaccacgctggtgtgggtcacaaatccacacgatgtgggaacgacccgttgatgacacaccccacaagacagtactatgactcgtgagtaaacccaacaagcagctgggatggatccgacacagtcccagtacgaacgcaggagacacacacacgcaccagaatcgaacgtgggacagatcacacggacagcaagccaaccacacatcctcccccggacgaagatcaaggccacccagagtggaattacaacacagccacgtggagcacaattaaacatgaacacacgactcccggggaccaaccacacgcgaaccgcacaaacgcacgacaactaccgacagagcgacagacaccgagacgagcagaagaccacacagccgacgcagcacgcacgaagaaggatgcgagcctcacacgaagagcaacgctacataaagctgacaatccagacagcaagagtgagcgggaccgacgagcgaggcacaccagacgggagagggaccgagacggaggggagaagaaagacaagacgggcacgaaccacacgacatcacgcacagagcgagcagaacgcaagcgcaggacgggcgagagagacacacgcaagagagacgagggagcagacgcgacgagaacgaccgagcgtgagagctcgaaccgggggcgagagcagagaggacgacgcacaacacacccgaggatagggagacggaggacgacgagagaagacgagaggggaggagagacagaggaagacagcgacgaaaggaaggcggcgagcgcggacgcagacgacggagagagaacgacaaga

SEQ ID NO: 615600 - DNA, 186 bp, Homo sapiens
ccggttagcggggagatggcagacacactgacactccgaagtggaccacaagaaacgcaaaatccgggaggagattgagcatttcggaatcaagatctatcaattcccagactgtgactctgatgagagatgaggacttcaaattgcaggaccaagccctaaaggaaagcatcccatttgcagtaa

SEQ ID NO: 615601 - DNA, 448 bp, Homo sapiens
  misc_feature (13)..(13): n is a, c, g, or t
  misc_feature (86)..(86): n is a, c, g, or t
  misc_feature (305)..(305): n is a, c, g, or t
  misc_feature (424)..(424): n is a, c, g, or t
atcagtgtattgntattattcatggttttagaaaattctcagccattatttcttcaaatgttgcttctgcccctttatctctttcngtcagctttgtgaccaaattaaatattggtagaggtataccttgtggtattttctatgtcttctaccttcttttctgtattttgcatgtttttttttcaccatgctttggtctttttgtttcttctgtcctctcttactggtctctttctcttcagtactgtttaatctgatgttaatctattcactaatttttaaatgttaattatatttttcagttnttatgtttctatttcctttttaaaatctactgtattaattttttggccggggcatggtggctcacgcctgtaatcccagcactttgggaaggctgaggcaaggcagatcacctgagggncaggaggttccaagaccaagcctg

SEQ ID NO: 615602 - DNA, 394 bp, Homo sapiens
  misc_feature (318)..(318): n is a, c, g, or t
atacatacatacatacatacatacatacatacatacgacaggtgcagtggctcatgcctgtaatcccagcactttgggaagccaaggcgggtggatcacaaggtcaggagattgagatcatcctggctaacacggtgaaaccccgtctctactaaaaatacaaaaaattagtcggatgtggcggcggctgcctgtagtcccagctactcggtaggctgaggcaggagaatggcgtaaacacaggaggcggaacttgcagtgagccgagatcgcgccactgcactccagcctgggcgacagagcgagactccgtctcanaaaaaaaaaggaagggaaaaaaggaaaaaatttttcagaatgtttgcaacatgattctcaataaatacagtgaggt

SEQ ID NO: 615603 - DNA, 772 bp, Homo sapiens
gactgactctcttttcagactcagcccacctgcacccaggtgaaataaacagctttattgctcacacaaagcctgtttcgtggtctcttcacactgacgtgcatgaaatttgttgccatgacttggatcgggggacctccctttggagatcaatcccccatcctcctgctctttgctccgtgagaaagatccacctatgacctcaggtcctcagactgaccagcccaagaaacatctcaccaatttcaaatccgtacaagaaggcacggaatgtcaggcctctgagcccaagccaagccatcgcatcccctgtgacttgcacgtatacgcccagatggcctgaagtaactgaagaatcacaacaagaagtgaacaaggccctgcccggccttaactgatgacattccaccattgtgatttgttcctgccccaccttaactgagtgattaaccctgtgaatttccttcccctggctcaagaagctctccccactgaggcaccttggtgaccccccgatctcatgcccaacaagagaatcaatcccccttttgactgtcattttcctatcaactttacccaaactccttatacaaaacgagcctccaacccgtaattctcccccattcgctcgacttctcattataactagacctcagctcaaccctgcaacacctggttcaacattacagcagcatttacttgcttcaacaaaacaaaacaacaaactcacacaacaacacaaaacacaaacaacacaaaccacaaacaaaaa

SEQ ID NO: 615604 - DNA, 404 bp, Homo sapiens
atccccgccactgaagcctggtataggattcttaatgagggattatcacttgggtgataaaccagtgtgagagagtctgagatggagtcttgctgtgtcacccaggctggagtgcagtggcatgatctcagctcactgcaacctccaccttccccccacacctggcttcaagtgattctcctgcctcagcctcccaagtagctgacattataggcacctgccaccacgcccagctaatttttgtatttttagtagagatggggtttcaccatgttgggcaggctcgtcttgaactcctgacctcgtgatccgcccaccttagcctcccaaaatgctgagattggaggtgtgagccaccgcgcctggccagtgtgtcctttcttaattgacagtgacattatatc

SEQ ID NO: 615605 - DNA, 503 bp, Homo sapiens
tttaccgccgaaaaatgggcatgtcaacctctgtacattcccggtgttgtacgtgtctgacgtatattgtggtagttgtaaactgctgtaccagtaccgtgagcatgggtcctcagcaactctcgagcatttttatccacatagcaaatcatccaacgtgtgttgtactgactatactactccaacagtctcccgtctgtatttcatggcgccacccaatacagtcctttgtgtggatgctggcaagtgtaatccctaccccaatcaccatatagataagaaaacccactccagttgcgctgaaccacagacgggccgcgtgatgttcacacacccacattaccacagctccctggagtgccagtacggtggactacaggggtcttggtcgatctttagacgcctcacactctctcagcttggtcttcagagccacgatttctcggtcaatgccaaggaccttggcagaggcctagtgtctcaagcttctcttccaagagagt

SEQ ID NO: 615606 - DNA, 122 bp, Homo sapiens
cttgatccagattgtctgccctgggtctgaggctcccgatcacagtaggccatcaccttattgctgtcgcatttacaagtaagaataactgagtttcagagacacttgaccaaagctcaact

SEQ ID NO: 615607 - DNA, 198 bp, Homo sapiens
gtgttcagaggttccctcctccctagtagctgggattacaggtgtcactactacacccggctaaattttttgtatttttaatagagacagtgtttccccatgttggccaggtaatatgctaggcactgatgacatactcatgacgcagagctggtcccaatgctagaatgatctttgttcctgatttccaccttgcca

SEQ ID NO: 615608 - DNA, 345 bp, Homo sapiens
  misc_feature (279)..(279): n is a, c, g, or t
  misc_feature (281)..(281): n is a, c, g, or t
gatcgaccacagagtttaacctttctgttcgtagagcagttaggaaacactctgtttgtaaagtctgtaagtggatatttggatagctttgaggatttcgttggaaacgggattgtcttcatataaactctagacagaagcattcccagaagcttcattgggatgtttcaattgaagtcacagtgttgaacagtccctttcatagagcatgtttgaaacaatctttttgtagtatctggaagtggtcatttggagcgttctcaggactacggtcctgcnanatgttgggggtaccgaagctcgaaattccggtaaatcaatgggccatatacctgtttcccttgt

SEQ ID NO: 615609 - DNA, 364 bp, Homo sapiens
gatcgaccacagagtttaacctttctgttcgtagagcagttaggaaacactctgtttgtaaagtctgtaagtggatatttggatagctttgaggatttcgttggaaacgggattgtcttcatataaactctagacagaagcattcccagaagcttcattgggatgtttcaattgaagtcacagtgttgaacagtccctttcatagagcatgtttgaaacaatctttttgtagtatctggaagtggtcatttggagcgttctcaggactacggtgaaaaaggaaatatcttccaataaaagctagatagaagcaatgtcagagactttttcatgatgtatctactcagctaacagagttggtcga

SEQ ID NO: 615610 - DNA, 578 bp, Homo sapiens
  misc_feature (96)..(96): n is a, c, g, or t
  misc_feature (133)..(133): n is a, c, g, or t
  misc_feature (152)..(153): n is a, c, g, or t
  misc_feature (171)..(172): n is a, c, g, or t
  misc_feature (190)..(191): n is a, c, g, or t
  misc_feature (220)..(220): n is a, c, g, or t
  misc_feature (374)..(374): n is a, c, g, or t
  misc_feature (411)..(411): n is a, c, g, or t
  misc_feature (435)..(435): n is a, c, g, or t
  misc_feature (473)..(473): n is a, c, g, or t
  misc_feature (491)..(491): n is a, c, g, or t
ccattaagaagggtcactgcctaattgctttgtaaaatccagcaatggtattttttacccgatatagtgtaatttaccagttttcctacaaagtgnctttatattgttgcctaacctatgttatgtaagcaancggtttggaaaggcggganngagtctagatttggcganngtgtgcgtttgtgtgtgnnaatgtatgaaaagtttccccattgggtgnattcttaagatgtgtttattgtaaagttttctacgttttgcccacagtaaatgtacaacttcgtcaattgtaggatttaattgattgaattccaaattttatactgtctcttcccttctggcagagacatttatgccactgtaaggtgcatgtnacagaaaatacctctgaggttgacttgttaaataacngatgaatggttattttcacactgnatctcaaagcagtcatttgttttgcgggtttagggggnaagttttggttttttgcngggtgttttttgttggttttaaattaggcacactaagagtgggccaaatttggggggaattggtggatagggaagacctggaaagtg

SEQ ID NO: 615611 - DNA, 132 bp, Homo sapiens
  misc_feature (7)..(7): n is a, c, g, or t
  misc_feature (94)..(94): n is a, c, g, or t
ggcaagncgagacattctggcatcgtgcagtgccgtctgtgagggagctgtgcttctagctgccgggtggcatcctgtgacccttccagtgctnttctgggcctggaaggtgcacttcaggggcccggcttg

SEQ ID NO: 615612 - DNA, 768 bp, Homo sapiens
  misc_feature (9)..(9): n is a, c, g, or t
  misc_feature (454)..(454): n is a, c, g, or t
ataagcccnttttcatcagcatcttgtaagataaatataaatataattattatgtcgccgtcgtccttgtgttttcactcccgccctcctccttcacatgagaggtgttttctcttatgtggtgtgtgtataaataaaccgcatctccctcatcacacatctgctgtactacgctcgcactcttctatatattatgttgtcctcacacacaaatcaaatgtcatatcccgcttctcgcacacagcatcttatatgacaatgagatgacgtcgtgcaacgaccccttctctcttcgtccctcggctctctctcatcgatgttcagcacacaacactcggtgctcgcgcctgcgatgtgtgataatatgagacaatactctcgctccgcgctgctgtgggtgatcagcacagccctgctggtgtcgcatctcatcagctgtgttctcatcgcacanagcagtgtgtgttctctcacccagctcagtgtgtggtcccctcactcacacatctgagggcctctgtgggcgagagagtgagacaaaacaccccgctgttatacacacactgcgcgggatgtaagacattattgagccccccgctgactacactacttgtggtaaaagaattgtctgcacctaccccggagtaagattagtacgcccccaagtatgtataacggctgtggggacaagaagtaaatatatccacctatgtcccctggggagtgcgagaatcgcccgaaaaacagacccggacaatagacaagaaa

SEQ ID NO: 615613 - DNA, 564 bp, Homo sapiens
tagtgagctgtactttttgcaatgcctcctcactactccgtgaacgattggctgcttgtgtgcctgtcacatcgattcattcccccaagaaacaccaaacctgcccagtgggcatgcccatttgttcctttgggccatttctagcaaaattcatattgctactgagggtcatgttctgactgggaacccccttgcgcagggcctgatgggcaggtctgttaaagctaattggattcagtggcttccccatcgtttgtccagtcagatccggattcatcacacacacattctgctctctgtgaagcatatgtaaagatattacaagttgaggttcattagtagtctgagaacggatgagtttgctcttcgtttgtgcagcaacaagagtgccatcagacaaggaaaaacgatagatttgactgaatgccaatccttgtctcagtacttcatgatgatgcctcttagcataggacacagattctccttcatgctgcgcatggaacttctgaatacaccttcttaccaggtcctcccagcctggtttcatggggcagaagcaggaag

SEQ ID NO: 615614 - DNA, 826 bp, Homo sapiens
cacggcaatgctgccatggagatctgcttgaaatgtgctgatgagcagggcggaccttgccaagtatatctgtgaaaaacctctgttggacactgatgagatgcctgcttgacttggcttcacttagctgctgattgcgtcgacaacgtaaggatgtctgccaccaattagtgctgcgcgccatagggatgtctgtcctgggcatgtcttgtatgccaatatgcaccagaaggcatcctgatcactctgtcgtgctgctgcttgagcacttgccaaagacactatgacaccactctagagaagtgctgtgccgctgcagatcctcatgattgctatgccaaagtgtcgaatgaatttaagcctcttgcggacagagcctcagacctcgaatcaactcaacaatcgtgagctgtctgatgcagcctctggagagtaccacattcccgcatgcgctataagtctcgtacaccaagataagtaccccaagtgtcacactcccctctccggaccaggtctcgctgaacaccctacgacacagtgggcgcgcagctgtcggtcaaccattaccttgacgcaccaaagaatgccctgtcgtcagaactgcactttctatcccgggtggcctgcaccacagaactgcatgctgtcagccttcgacgacaacccgcccacaagtgcataaagctcaacccacatgtggctccaggaccccttggctgcgaacacggcgacacatggatctctccaatctcctggacattccgcggaacacatccgttcgccacacgaattcactggccgaacaattcgaccctttccatcacac

SEQ ID NO: 615615 - DNA, 344 bp, Homo sapiens
aaggctgctgaacgcatatcggctgggtgtggtggctcacgcctgtaaccccagcaccttgagagcccgagtgtgggcggatcacttgaggccaggagttcaagaccagtctagccaacatggtgaaaccctgtctctactcaaaatccaaaaattaccagaatgtgttggtgcacgtcggtaatcccagctactcaggagtctgaggtggaaggatcatgccactgcactacagcctgggtgacaaagcgagactctgtctcaaaaaaaaagcaacctgtgcattaatatagttcgcagtagctaaattccagagtaatttcctctaagttctctttgaggac

SEQ ID NO: 615616 - DNA, 463 bp, Homo sapiens
cacgaggcggggtcccgctggccagcaccagcggtttgccggtgtcggcgagcgcggcccccagcgcgtcgatcgcgcgggcctcgtcggcgatcgcgtccccgacgtcgctgaagtcgtgtgagaaggccaggtaggcgacgccgtcggtgtcgacggccgccttctgtaggacgtcgaggtcggcgatgtcgccgcgcagcggttcggcgccgagtccgctgacggttgcggccgaagcctcggagcgggccaggccgatgacgtgatgaccggcggcgagcaattctttgacgacggccgagccgattcctccgctggcgccggtgacgagtacgcgcacgagctgctccttcgagtgatgagacaatggtcccatcaccctacaccagtgacgggacaaaggtcgcatcactaaagtggggccatggctcgctgggaacccgacgcgcgcgcacgcctg

SEQ ID NO: 615617 - DNA, 126 bp, Homo sapiens
aacaatctgaaaatgcaagtcttgtacgagtttgaagctaggaatccacgggaaactgactgtggtccaggtagagaagctggaggttctggaccacagcaagcggtggtgtctggagcgtgacag

SEQ ID NO: 615618 - DNA, 704 bp, Homo sapiens
gacgattggggggggagggggggggggcaggtaggtggggctttccctaatttatcttcatgtccagtgagcagtgttgcgtttttcctgtgtagcattgggaaatgatttactgggaattacaaaacctatttttcctttaaatttcagcttgggctctggctgctttttagaataatggcaagataaaaatcacacctgagggctgaaaacggagagggaatggggagactggatatttaagcagctggaatgggtttttcttttctttatttttaaagaaatggcactggcctatgatacgggtctctccagtgaaatggattactcctccattactctatggatacaatatggtgcatgctagtggtggtatttctatacagtagctggaaatggattaacttatacggtaggtgttatgtattcctatgacaaaaaaaattaagtcttcaaattttttaaaggtttttttttttaaatttaattttccctttggggggtaaagttggtctaccaaatagtgctggtaccaaatggatcggttgggatgtggctatagtgacatgcagtatatattgggtttcacaagggggggagcaaaagaaaccccagtgttagcttaatctaaaggtcggggtcgcatggtgaattatacctatcaccgtgtggggaaccacaatatgttctctgaatgagccttg

SEQ ID NO: 615619 - DNA, 1558 bp, Homo sapiens
agcggaaggttccgcgccgggcgtggacggtgtggggcggtcccggccccgcagatcctcgttcctagctgcctgccagcgtcctcggcccggccctgaggatggacccaggagatcccgctggtgaccctgccgctggcgagcgccaccgcatgggcacccacaggcttctacagcctcttctccacctaagcagagtgggatgttttcaaagtgcaacaccccagctagcagggcccctggaacagcctcggcgccccctggaacactaatggccctccctggaacagacacggcacccccaccgagaacagcctcggtgccccctggaacagcctcagcaccccctggaacactaatggccctccctggaacagacacggcacccccaccgagaacagcctcggtgccccctggaacagcctcagcaccccctggaacactaatggccctccctggaacagatacggccccccgccagaacagacatggtgcccgctggaacactaatggtcctccctggaacagcctcggtgccccctggaacactaatggccctccctggaacagacacggcgcccccccacagaatagcctcgatgccccctggaacagcctcggtgccccctggaacagcctcggtgccccctggaacagcctggtgctcctggaacagacacagcccccccagaacagacacagcaccccctggaacagcctggcgcttcctggaatggccacatccccccatcctttctgtgctgctttaggcatctgcccttacgtggttcgtgtccagctctgtcaacaaggccagctccacaagaggccccagctcagccctccccagtgggctcccctactcaggctctgggtcagcttcttcccaggaggtgtcctggcccctgtgctggccccgcctcgctgcctggacacctgtccgtgccaccctggtcactgagcaggacatccgcgtctgtggcccctgggaccctgcccccgacagccaggcctgggtttgtccttttaggtagagtgcctggtccaggtcattggaggagagtccacatggccacctctggcgtgttctagagaggccctcccgcgctgggtcaggaggcagcatcgggacaggagaagggggctgagctcctgttcctctctccctcccccgaggccaagaaacattcccatccgaatgtccactgcgctcacagattcctttcctcctaaaacttcagccttggccaggctcacggccaggattatggtggctcacgcctgtaatcccagtactgtgggaggccgaggcaggaggatcacgaggtcagaagatcgagaccatcctggccaacatggtgaaactctgtctctactaaaaatacaaaaattagctggacatggtggcgggcgcctatattcccagctactggggaggctgaggcaggagaatggcttggaggcagtagaactgcttgaaccctggaggcggaggttacagttatccgaggttgtgtcattgcactccagcctggggaacagagcgagactccatctc

SEQ ID NO: 615620 - DNA, 324 bp, Homo sapiens
  misc_feature (309)..(309): n is a, c, g, or t
ttgggggctccatgcaggtgtccactcgttttctcatggaaagaataagaccacccagagtccatatggaaggaataacttacctacctttccagaagtgggtaggtagaagtgataaatgactaagtccactggcctcccactcggccttcttagcttcacgtgcccaaagctcccttactaaccaatgacagacttataagcatcctcctcttatttgccgcaaaagaaaaagaagaggtagtagctctaatctacgattataacaagaccgtcgtctggcatatctaatctgggtgagcatcagangtgatgccaccaatt

SEQ ID NO: 615621 - DNA, 515 bp, Homo sapiens
  misc_feature (11)..(11): n is a, c, g, or t
  misc_feature (432)..(432): n is a, c, g, or t
  misc_feature (448)..(448): n is a, c, g, or t
  misc_feature (495)..(495): n is a, c, g, or t
tttgctattgnaataacagtgatatcatacacatacatatatgtcccccacccccagacagggtctcactctgtcagccaggctggagtgtggtggctcagtcatggctcattacagccttgacctcccagggtcaagtgatcctcccacctcaccctcccaggtagctgggactgtaggcacatgccaccatgccctgctcatttttgtagagatggggtctcactgtgttgcccaggctgatctcgaactcctgagctcaagcgattccacctgcctcagctgcccaaagttctggggattacaggcatgagtcgctgcacccgaccacctttgctttttcagttaacttttgattaagggcaaaatgtatctgcagggaaaggtgcgtatcatacacacatgggtccagtggaatttgttaacaaactngtcctaaggatcgggncattattcagtggccccccagatccccacattaggggtaaccaccancttggatttttaatggtata

SEQ ID NO: 615622 - DNA, 990 bp, Homo sapiens
agcggaaggttccgcgccgggcgtggacggtgtggggcggtcccggccccgcagatcctcgttcctagctgcctgccagcgtcctcggcccggccctgaggatggacccaggagatcccgctggtgaccctgccgctggcgagcgccaccgcatgggccgggaccccctcctgctcctgcaggccctgcagaccctgtggtccacgcgggagcggaagcagctccgggaggaagcctggcgggggtttgctgccttggacgaccccctggccgggcttctggacatgctggagagctgccggggccagcggggagagggcccctccctggcggcctggatctcccaccagctgcagtgctggctacaggcacagccatgcccgagcctggcccagcacagcctgaggctgaagcagctgcaggcccgagcggtcaaagtcctcactgagagcccccccagccttgcggcaccactggccagcatcttccagctgcaggatgcagacaggagctgcctgctggcacacgtccaccgcctccaccacgagggcaggttcagagaagcagccacgctgggcgcgacgttgaagctgcagtcggagcttggcgttgaaaagatgagcatcccactgctcctccaggacaaggtggccctcgtggagcgctatgtggccggcttcccggacctccagaggaggctgctggtcctcatggattcctggtgccagcccggctttgacatcaaggacgttgccagctgccatgtgactgcagctggagcagctgcctctggagaggagcggctggggctggcaggagcacagccctcttctcccgagtgaaaagagttaactgctcttagaagaacgaaaataattctccgtggtggctcttctcatgcaggcatggcaaccgtactgctttcttgttcatccattcctttgttctttcatctaataaagtttttggaagcaaaaaaacctcgtgccg

SEQ ID NO: 615623 - DNA, 1104 bp, Homo sapiens
  misc_feature (1010)..(1010): n is a, c, g, or t
  misc_feature (1071)..(1071): n is a, c, g, or t
agcggaaggttccgcgccgggcgtggacggtgtggggcggtcccggccccgcagatcctcgttcctagctgcctgccagcgtcctcggcccggccctgaggatggacccaggagatcccgctggtgaccctgccgctggcgagcgccaccgcatgggccgggaccccctcctgctcctgcaggccctgcagaccctgtggtccacgcgggagcggaagcagctccgggaggaagcctggcgggggtttgctgccttggacgaccccctggccgggcttctggacatgctggagagctgccggggccagcggggagagggcccctccctggcggcctggatctcccaccagctgcagtgctggctacaggcacagccatgcccgagcctggcccagcacagcctgaggctgaagcagctgcaggcccgagcggtcaaagtcctcactgagagcccccccagccttgcggcaccactggccagcatcttccagctgcaggatgcagacaggagctgcctgctggcacacgtccaccgcctccaccacgagggcaggttcagagaagcagccacgctgggcgcgacgttgaagctgcagtcggagcttggcgttgaaaagatgagcatcccactgctcctccaggacaaggtggccctcgtggagcgctatgtggccggcttcccggacctccagaggaggctgctggtcctcatggattcctggtgccagcccggctttgacatcaaggacgttgccagacagtaccctgaggtgacctccttgagcctggagaagctgagtccgaaggcgctgagcaggcaggtcttgcgtctgcaggagcggtacggcgtaccccagcgctgtgtcccaacgcggccattcagcagcgcctggcggccctgcggcacctgtgccacaagcgggtttgttggagaagagcctgtcacaggagaactggaccgaccatgtgcagacggcagcgtccgtgccacccgaaccaacccagcggantgcctgtggggccgggtgggggctgagagtcacagagaggtgcaagcgcctgggcgaggcnggaagaggaaggcaggccccccgccccgtgcac

SEQ ID NO: 615624 - DNA, 683 bp, Homo sapiens
agcggaacgtccgggccgcatctcggcggcggcgagggctgagcgcgggagctgcctccgagccggagccccagccctaggccctgcgcgagctgccccgccctacccccgtccagcgtcctgtcgcctcctcgcccgacttcggcctgtccctctctcacgcgctcagtcctcgactcttcgcgcccaccgacagactatcggcactcggtctcccgcgcctggcgggctccgcgccgagcctctgggcccagtggccaagcggcgtgcggcacgagccggtgacgtatccacgatgaccttggaagcggcatccatgctttgcgacattcgctgagacagacgcacgacaccgccatctctggatccggcacgacacggggatcgacagcatgctgggcagcatcctcggacgtcccagagacagcacccgaaagcgcaacaatcgacgacagggaccatggacagagacactccggcatatacgcccagacaagacgccgatagacagcgcgggacaaccagcagcccccgaagccgcgcagggagccgtgagcgaaccacgcggactgggagcacaggccgaatcagaacgactgaccgccgacagcacacgttactggccggggcccgggggagcgagcaccacgaggccgaccacggcctcaccgaaccgagagcag

SEQ ID NO: 615625 - DNA, 1121 bp, Homo sapiens
agcggaaggttccgcgccgggcgtggacggtgtggggcggtcccggccccgcagatcctcgttcctagctgcctgccagcgtcctcggcccggccctgaggatggacccaggagatcccgctggtgaccctgccgctggcgagcgccaccgcatgggccgggaccccctcctgctcctgcaggccctgcagaccctgtggtccacgcgggagcggaagcagctccgggaggaagcctggcgggggtttgctgccttggacgaccccctggccgggcttctggacatgctggagagctgccggggccagcggggagagggcccctccctggcggcctggatctcccaccagctgcagtgctggctacaggcacagccatgcccgagcctggcccagcacagcctgaggctgaagcagctgcaggcccgagcggtcaaagtcctcactgagagcccccccagccttgcggcaccactggccagcatcttccagctgcaggatgcagacaggagctgcctgctggcacacgtccaccgcctccaccacgagggcaggttcagagaagcagccacgctgggcgcgacgttgaagctgcagtcggagcttggcgttgaaaagatgagcatcccactgctcctccaggacaaggtggccctcgtggagcgctatgtggccggcttcccggacctccagaggaggctgctggtcctcatggattcctggtgccagcccggctttgacatcaaggacgttgccaggtgagtcccgtggggcgctggcagctggcaccagatggcatcctgggagccctggttagggaagggagtgtaggggggcaccaggcgcgtgggaaagctctccccaggaagttttggtgtttgggtcacaactgccatgtgactgcagctggagcagctgcctctggagaggagcggctggggctggcaggagcacagccctcttctcccgagtgaaaagagttaactgctcttagaagaacgaaaataattctccgtggtggctcttctcatgcaggcatggcaaccgtactgctttcttgttcatccattcctttgttctttcatctaataaagtttttggaagcaaaaaaacctcgtgccg

SEQ ID NO: 615626 - DNA, 1262 bp, Homo sapiens
  misc_feature (56)..(56): n is a, c, g, or t
  misc_feature (144)..(144): n is a, c, g, or t
gctagcgtgccccgctgctgcggcggacagccaggagggaagtggaagtggccgtnggcgggtatgggactagctggcgtgtgccctgagacgctcagcggctatatactcgtcggtggggccggcggtcagtctgcggcacgncagaagacggtgcagtgaaggagagtgggcgtctggcggggtcccagtttcagcagagccgctgcagccatggccccactctccttcactgaaccgtcttgctgccgctgccggtagaagctgagcgacggagcgccaccgacgtagtatatagcccgctgatcggcagcaagacggtgcggagtgaggaggagagtgggtgtcgtggcttgggtccgtgagtgtcagcaagagcacgctgtcgagcccagggttcgccagatcaaaggctgggagagatgtcaatccccagcgaggggaccgtgttggagggcgggagctaggggtgtcaaggatgtaaccttggtagaatcgtcgtacatgggggccagaacgggtgtgcgtcgtgatagggacgttcgcttgcgggggctcttgagctccattggcactgttggcagccatacgaccaaggccagagcatgagtgagagccaatagcattgatgcctcttgaggtccaatggggagtcgcgaattgagtgtcttggtcgagagttcgttcattgatggctttaggggagtgagtagatgggagggcccgagaatagtagagaggcgggatgggcaacgttgggctcctggaattgatcggcactcgaaggattatgtcgacaaggagcatgagagtctatgacgtcaaattgatttttgctgcgtgtccatctcttgtggacatccgtggtcataacgaggtttgcgagtggtggtacaggaatgtgaggcagaattgctcgcgaatggtgcaacctgtgagtggtgcgaggccctcaacatgaagctgacacacccaattatcatctaacaggtctgagggcctgggcacgaataattcctcaagccgatcctatttagctgccacggccttgttttggaggcgtgcacttggaaatggtgtcaaaatcacggacgaacagacttgtggtatgcggccaagagacacgaaaaacagagccggacaatatgagaagaccacgcatataggagtacaggagggcgcctaccacagacacactccacgagaagcaaacagggtatcgaaaaagcgcgacacctacgcagcagaacaatagataatcg

SEQ ID NO: 615627 - DNA, 379 bp, Homo sapiens
  misc_feature (12)..(12): n is a, c, g, or t
  misc_feature (362)..(362): n is a, c, g, or t
gagtataactantgtataaataaatgtatagcttaattgactgaagtgtaatgaaaatgaaagtgtaattggactgtgtttagatctgtgttttccaaaacagagggaaaaccggtaacattaggctgtcagtggtctcaagagcaccattaacaaagcttgattttttaaattaattgctgttctatacagtggataagagccaattctccctgtcatggtgttcctggaactgaaactatatcccagcctcctctgtcatggtaaaaattatcatatatacatttgctcacctatgtgcctaattttaaaagcaaatattttctggctaaacttttggaggggggatgggttttctaggnccctgggaaactggagg

SEQ ID NO: 615628 - DNA, 425 bp, Homo sapiens
  misc_feature (56)..(56): n is a, c, g, or t
  misc_feature (144)..(144): n is a, c, g, or t
  misc_feature (321)..(321): n is a, c, g, or t
  misc_feature (339)..(339): n is a, c, g, or t
  misc_feature (358)..(358): n is a, c, g, or t
  misc_feature (398)..(398): n is a, c, g, or t
  misc_feature (408)..(408): n is a, c, g, or t
gctagcgtgccccgctgctgcggcggacagccaggagggaagtggaagtggccgtnggcgggtatgggactagctggcgtgtgccctgagacgctcagcggctatatactcgtcggtggggccggcggtcagtctgcggcacgncagaagacggtgcagtgaaggagagtgggcgtctggcggggtcccagtttcagcagagccgctgcagccatggccccaatcaaggtgggagatgccatccagcagtggaggtgtttgaaggggagccagggaacaaggtgaacctggcagagcttgttcaagggcaagaagggtgtnctgttttgagttcctggntgcctttcacccctggatntttccaagacacacctgccagggtttgttggagcaggctnaaggttcttnaaggccaagggattcca

SEQ ID NO: 615629 - DNA, 912 bp, Homo sapiens
gggaatgcttatgggaacagattatgaaactcaatggggccgttctggaaggagagacagatgatgggcgatactcaacaatcttcgaactctgaagcagtgatgtcttggacacatatcgggcacacgacagtgcatgggagtggtcgcagcgagcagcagatcatgcgacctgcttagaatgtaaacttgcgaaatctgagcacgagataacagggttagaacaaactgtgataaggttaggagagtcataggtatcacgttacaaagaatcagactggctgaccaatgcagaataccctagaagatgacatcttaaggcagagaagagggggaaactccatggagagctccgctcgtgtcattggataaagagcagaggagctcgaggtgagcaacggccagttagtgaagcgtctggaacagatgaaagcaagtcggagtgcactctggtcccatgcagtataattccgagctctgatcaggcaccctggttgggtgcagctggacgagccttgttttcgtgtggctttatctctgtcctgtgtgggagcggctgtgtcttcccctggcttccgtgagacgaagaccgtggcgagcttggcgcttaggggctcccgtgccatggctcaccccaggagccccagcgggccaccaggtgcctctgtctgcagagccctggccgggctggcgccgacgctcagaactgcaggtacttcataagcacaccagggcctcgagggagctctgtgtctgaccgcacagagctctgaatgccgctggagtgatgatcaaggtaaagattcacgtgggacctgggggtattttggccagtgtctggggaagataagggaggttcgggggcccttgggggaccactgggcagcgaaatctaaccgtttaaaaatgacg

SEQ ID NO: 615630 - DNA, 875 bp, Homo sapiens
  misc_feature (34)..(34): n is a, c, g, or t
  misc_feature (38)..(38): n is a, c, g, or t
gacttataagagctccttgtgcggcgccattttnagcntctcggtctgtggcagcagcgttggcccggccccgggagcggagagcgaggggaggcggagacggaggaaggtctgaggagcagcttcagtccccgaccgagccgccaccgcaggtcgaggacggtcggactcccgcggcgggaggagcctgttcccctgagggtatttgaagtataccatacaactgttttgaaaatccagcgtggacaatggctactcaagctgatttgatggagttggacatggccatggaaccagacagaaaagcggctgttagtcactggcagcaacagtcttacctggactctggaatccattctggtgccactaccacagctccttctctgagtggtaaaggcaatcctgaggaagaggatgtggatacctcccaagtcctgtatgagtgggaacagggattttctcagtccttcactcaagaacaagtagctgatattgatggacagtatgcaatgactcgagctcagagggtacgagctgctatgttccctgcagacattagatgagggcatgcagatcccatctacacagtgcgatgctgctcatcccactaatgtccagcgtatggctgaaccatcacagatgctgaaacattgcagttgtaaacttgattcactatcaagatgatgcagaaattgccacaagtgcaatccctgaactggccaaaactgctaaatgacgaggacacggtggtaggtcaatacagggcgcagacaatggctccatcaccattacaaaaaagggaagctcccacaccaggcaacaatgcacgaaccccacagcaagggcactgccacgaagtcccctgcggcatacac

SEQ ID NO: 615631 - DNA, 183 bp, Homo sapiens
ccctgactagctctgacagtcccgactagccctgacagcactgactagccctgacaacccctgactagccctgacagcccctgactagccctgacagccccgactagccctgacagcccccgactacgcccgacagccccgactagccctgacagcccgatcaatgaccgtaaataatgcttg

SEQ ID NO: 615632 - DNA, 1013 bp, Homo sapiens
  misc_feature (815)..(815): n is a, c, g, or t
tggacgctgtgtgtgtacttgctgacgtgccgccgtgatgcgcaggaacaccggtccacctggcaagtctgactactctctctactatcatgcaactattggaatgattatctcgaaaaaggtacatagtgggagtagaccggggggttcaacgcagatgaccgaccatacaggatgtcactgcacttgaagatgtgtctgtattgatgagacttcaaaacaggcatgctatacgctctgccatgcaggaagccgagcctgtgaaagagcacaaccgattcttctggcaggaagaggtgatgaactccatattgcggggtggaatctgaggcatcagtgtactgcaaagaacgtaactcactgaagatcgattgaatctgattgctggccagaaaaggttgcagaccgcttccacgctgagttccagccaatgcacccatgctctaggtgctctgtggctatccataaggacgggtgttgggacctagcacagtagatcgtttgatataagctatagcgtgatcgaacaagtgaacaatctccgaggggcccgatagaaatccttagagatgcatgtgcaggtgatcgaagatggcaaaaaacttggcgaagcgctggaaggcaacgctgtggaagatgctcatggatctcccccgttctactgtgcgcctgtcattcaggaggtgtcgagagtgtgtgatctacatcgtgagtgctagatatggggaagaactactgagttgttgtttctggtggggtccgtatgatagtgaggttaggatggcgaatgagttaccaaggtgggtttgaaggcncatttatatgaaggggtagaagaaaaggtgtttgggggaggattagtgcaatgggaaaggaggggtagaaaaagacagtcgtgggtacgtgggcgtgtccacttttgggttgtcgttgtgtaaaaattaagggaggtgtaaaggaagtttaaagggggtgaaaacgcggtatagtagttctatatttatgttttgaag

SEQ ID NO: 615633 - DNA, 356 bp, Homo sapiens
  misc_feature (239)..(239): n is a, c, g, or t
aggattagaatagaaaagtaatactgcaatgctttgaaagatacaaatatttacttattgcttgaaacttagagttagattgactgcccttcctttctttccttccatgtttacctcttaacatatacacagtatgtagaagagaatagtataaacccacttttctcaaccgagtttacaacagtcagatcttgctttcatacatattccccgacagttcctagtatatctctttaacncgttaaattagttcaactatgtatatcttaacagacttaacacaaacaggtcaaacatgcagtaccacatatcacagcaaaatgacataattcctttaatactttcaacacatcagg

SEQ ID NO: 615634 - DNA, 218 bp, Homo sapiens
tgacgtgggttgggcatatgctctgtcatcacacagcagaagcatgggggcatggtcagagccccccccaacactgacacagtcagactcagcacacgccatggtgctgaatagccaaagccggcactacacaccacacagttggcgaccaaacctgaggctgtgaagatgcatcatctgcctattagtggctgtaaagagagtgatgaagattattt

SEQ ID NO: 615635 - DNA, 384 bp, Homo sapiens
gggagaatctgcatctgtaaagaatcttggaggtcacagtggctcatgcctatgatcccagccctgtgcgaggtggaggcggctggatcacctgaggtcaggaatttgagaccagtctggccaacatggtgaaagcccgtctctactaaaaatacaaaaattagccaggcgtggtggcgggcacctgtaatcccagctactcgggaggctgaggctggagaatcgtttgaacccaggaggcgaagtttgcactgagccaaagccatgccactgcacttcagcctgggcgacagagtgagacactgtctcacaaacacaaaacaaacaaacaaaagacatggttaagacttcaggctctgaagtcagaggcctaaattaacagcc

SEQ ID NO: 615636 - DNA, 310 bp, Homo sapiens
  misc_feature (110)..(111): n is a, c, g, or t
cccaaaaagttgtttgttttgtttttggaagtttgctaaaaaaccaaaaaagggaaaaaattttttgttttttttgagatttgaagcgggaaaacctgatagggggggcnncttccgttttttcccccaaaaaaaattgtgaggcaaaattttttttttcctgggccaaaaaaaaaaaaaaaaaaaaaaattttttcaaaatttcctttgtcaaaaaaaaatttgtttttcaaaaatttccccccccgttcatggttaaaaattttttggggcaataaaaaaacccctccggaaaataaaaaataagata

SEQ ID NO: 615637 - DNA, 120 bp, Homo sapiens
gtcagctgggagagctagactaagttggtcatgatgcagaagcatacatcaaatgcagtcggcattgtcaatgctcttgcaatcatccaggttctgggatcatcagttccaaggttttct

SEQ ID NO: 615638 - DNA, 786 bp, Homo sapiens
  misc_feature (584)..(584): n is a, c, g, or t
gatggagaaacatttcaagaatgggatggcggtggctcgtttcctggagaccaatccccgggtagaaaaggttgtttatcctgggctaccctctcaccctcagcatgagctggccaaacgccagtgctcgggctgcccagggatggtcagtttctacatcaagggtgctctgcagcatgctaaggccttcctcaaaaatctaaagctgtttactctggcagagagcctgggaggatatgagagtctggctgagcttccagcaatcatgacccatgcctctgtgcctgagaaggacagagctaccctcgggatcaatgacacactgatacgactttctgtgggcctagaggatgaacaggaccttcttgaagacctggatcgagctttgaaggcagcgcacccttaaaagttcgagtcaaagctgtcattccagtgctgccatcaggagcagcatccaaggggccaaatcttcggaataactggacagatcattacggagcatacgcagaactgcactgaatattttaaggccctaatgagtttacagctgtaaccttccatggatcttcccttaagaactgtcntctgtttatcttctaactaacaggttgttctgttagtatcatttcggtaattttgctatatttgtgtccaaggaagtaagagttgttctgttttgggatcatgttgtcttttttctttcttcagtagcttatgatatattttaatcatgtttacaatgttacaatttagtattgatgttttatgaagttaaattattaaatg

SEQ ID NO: 615639 - DNA, 263 bp, Homo sapiens
tgtcttaaagcttaaagcacttttaaatgttactgttttttaataaacatgaatctggcgggtacggtggctcatgcctgtaatcctagcactttgggaggctgaggtgggcaggtaacgaggtcccaggagatggagaccgtcctagctaacacggtgaaaccccatctctactaaaaatgcaaaaagaaattagccgggtatggcggtgtgtgcccgtagtcccagctactcgggaggctgaggcaggagagtggcgtgaa

SEQ ID NO: 615640 - DNA, 424 bp, Homo sapiens
ccaacaccacgagagcaacgttgtctctgaagtacccatgcctgtgtgggtaggagcagcttttggggtaacctctgccttgccgctgctgttcctagtgacctcagccagcagggtgtgtggtgtgtccttccaactcacatactcgatccttcctcgactctttcgctaatggcaagctttggggcgcagactgtgagggtgtgtacgcgcggcacaaaggtctgcactcagtggtacatgcgggttgcccagcagggttcacacacgggtttaccattagaccttggtgtgtgtctgtttgtctgtctgcctgccagtgtgctactactttcccagatgtgtacaacttccatgctctgcccagagcacctcatgtacagattgcagcccattcagtcaccttcaataaaggaagcaatgc

SEQ ID NO: 615641 - DNA, 206 bp, Homo sapiens
tcctcctcctccctgcttccttcttcctcctcccttgcctcctctcccacagtatcacaccacactggatctcgatgagcagccttcctctgacaatgctcagttttggatcctcctttaacaagtacaacttttcctttcaaacaagtacaaccacccatgcagtctggtccggcgcagtgaccaggttggcgcttctccaaagc

SEQ ID NO: 615642 - DNA, 1130 bp, Homo sapiens
  misc_feature (341)..(341): n is a, c, g, or t
  misc_feature (356)..(356): n is a, c, g, or t
  misc_feature (391)..(391): n is a, c, g, or t
  misc_feature (619)..(619): n is a, c, g, or t
  misc_feature (693)..(693): n is a, c, g, or t
aactaattacacatagtgagtgacacatggtctgatcctgccttaacgggtgacattccgatccacgactacgcaagatgaatgatggccattgccctgacctataacttgatagaccattaccgtcgttgaaattcacttctacctgtgctcaatccctgtgcatcaaaaaagctccatacacgtgaaggcagcctttggtgaacccaccaggcccgagcgcacctcgagagagagcgaaccccgttctgtgactgtaagtaatcgcatcaagacatacctgagataatccttgattaaccaaatactctccagccgctcgaatcgtccacttatctgcnttgagcgtcctcctntcatgtgaggacttcgagatcccatccctagtcgnacctctggtggtggactccacaacagtctatgtgattttgtctgcgactatctaatagcctcctggtgttgcgattgggtgttactttcgatcagcggatagcgtcgtagcttggaacaggatggaggtaacaacgagggtccccgcctagccaaaccctaattcctcaagagatataatttaaggcaaggttatcggggattagccttgaaaggacctcaggtggtntctcaatcataaattcgcttaagagtacatagtgcgttgactgcgtcagaaagctacgcgtggtgcgctacaangagacaggctcctaacgctttgttccttttgagcccatcgccccaagagggctagcttagtgacgttggcacagggccgtagaaagtccaaaattgaaggcctcctagcgcaaaagacttcatttggcagtggtcactagagcagtttgtccccacgagaaaagtccttggacttgaagtgctacgactccggaaaaagaatcgaccagcctttagagaccgaatgtgggacccacatgtgacctataacagggttgggggatccatgacacaggagacattcgccaaaccagggaaactccgtctttgtccattataccaactcaaggacacccccccggtctagacactctcacataatatctcacacgggcgcgatctcgtattcacaaccagcgcactagttgttctgttcacacacaacggagagcgcgctt

SEQ ID NO: 615643 - DNA, 186 bp, Homo sapiens
ctgctccgcccctctctgagacagaatagggaagggacttgcacctggcagacaggacagataatgaacatactagcgagcctaacacatgtgggcatattcttttccataccttcttgcctgttgtaacaagctaaccccagccacagcagcagagagaggtcgcatcctaacttagctgaccag

SEQ ID NO: 615644 - DNA, 617 bp, Homo sapiens
tgcgggtgatctagaggatcccttctcttctttctttctttcctttctctctcctccttcctttctctattcctttcttcctctctttctttcttccttcctttctctcttccttcctctctcccttcctttctctctcccttcctttctctcttccttccttccctctctctctttcttcctttctttcattcgtttttgaaacaggatctagctctgttgtccaggctggagtggacatagttcactgcagcctccaactcttgggctcaagcaatcttcctgcctcagcctcctttgcagctgaggaccatcgttgcaacgatggtcctcagctattcaggaggctgaggcaggaggctatcagatagttggaaatgtggctgggcgcggtgactcacgcctgtaatcccagcactttgggaggccaaggagggtagatcatttgagatcaggagtttgagaccagcctgacaaacatggtgaaacctcgtctctactaaaaacacaaaaaaattagctgggcatggtggtgccttctcctgaggcaggagaatcgcttgaacccaggaggtggaggccgcagtaagctgagatcgcgccactgcactccagcc

SEQ ID NO: 615645 - DNA, 1175 bp, Homo sapiens
  misc_feature (964)..(964): n is a, c, g, or t
  misc_feature (992)..(992): n is a, c, g, or t
  misc_feature (1118)..(1118): n is a, c, g, or t
  misc_feature (1120)..(1121): n is a, c, g, or t
tctttactcgctcggcttggttgtttgttctccctctggcttgccttcccttgtcattgttgtggtgttttttgtagatgttatcttccgtgccctccttggtttcctcgcctgatctctggctcggattctctgttcgggtgtccgtatctccgtgtaggtttctggctcgtcctcgcatgtcctggatggcctttccccattgcctgatgttcttggggagcgtaccagcctccgctggtatgtggcatgtttagctctaatttttgactcatatcgtggggtatcagattggtggtcccttcaagcttgttcctgtgagcagaacgcatttggtaactaatcattcagaaccagttctacccgtcttacttggtaatgtttacatttgtacgctggatagctactcaagtactttcgggtgcttcaagccatacctccaatcagttgtatctgcgtgctcttcaaatcacaccagtaggctttgactgtttcgtttccgccccgcaattgtactgtgtgaatacggcatagtgccaaacatcttacgtacacccaagagaactgagtgcagtattaaaggggtggtagtagctgctgatttatgatgagaagtcatcggtcagaaaatcagcttggattggtgcacaagctgttttattgggtaacagccctgggatgttttacgtagcttgaggcaagtctggatggtggcaagaaagtccttggggaagctgctggtctgggtgctgctggcctccaagctaggcatgtgggaagggctatgtgagaccacacatggcggtagccccaagcagcagcaccctgcaagccagcactggccagcatgctcagaccagctctgcagagccgcagccgctgtgggcagggggtgtggcaggagctcccagcactggagacccagcggactcaacccagttaccgtcaccatggggcctgtttntgagcaaggtctcgaaagcgcaggccgncctggctgagcagcaccgccctttcccagctgcactcgccctgtggacagccccgacacaccactttcctgagctgtcgctcactcagattgtccgtttgctatgccgaatgcagccaaaattccntnntacaatttgtgatgcctaccgattaatctgatcctgttttaagtttcaacgcgg

SEQ ID NO: 615646 - DNA, 348 bp, Homo sapiens
actaccgtgcgccatcatcaatatcccgggccagaggggtgcatgggttaccaggcaacgaccctacatgacacatcatgatcacccaaaactgggtggtatcggaatccacaggggacaggtgagaacagcgaagacttaaggaggggcaggtgaccacccaaagttacagtagcaaattagggatggacagaatggagccgtgatgctctctccacagtgccacactccttcctctcacaacgatgccctctttcctgcaatagcttaagtacacccagattcatcgatatgttcataggtgttcctgagacgcaccaacggacgcgagaacttctaccaaaactg

SEQ ID NO: 615647 - DNA, 807 bp, Homo sapiens
  misc_feature (422)..(422): n is a, c, g, or t
  misc_feature (424)..(428): n is a, c, g, or t
  misc_feature (430)..(430): n is a, c, g, or t
  misc_feature (432)..(432): n is a, c, g, or t
  misc_feature (435)..(436): n is a, c, g, or t
  misc_feature (440)..(441): n is a, c, g, or t
  misc_feature (450)..(450): n is a, c, g, or t
  misc_feature (460)..(460): n is a, c, g, or t
  misc_feature (463)..(466): n is a, c, g, or t
  misc_feature (473)..(473): n is a, c, g, or t
  misc_feature (475)..(475): n is a, c, g, or t
  misc_feature (485)..(485): n is a, c, g, or t
  misc_feature (488)..(488): n is a, c, g, or t
  misc_feature (492)..(492): n is a, c, g, or t
  misc_feature (525)..(525): n is a, c, g, or t
  misc_feature (535)..(535): n is a, c, g, or t
  misc_feature (537)..(537): n is a, c, g, or t
  misc_feature (547)..(547): n is a, c, g, or t
  misc_feature (551)..(551): n is a, c, g, or t
  misc_feature (555)..(555): n is a, c, g, or t
  misc_feature (557)..(558): n is a, c, g, or t
  misc_feature (587)..(587): n is a, c, g, or t
  misc_feature (589)..(589): n is a, c, g, or t
  misc_feature (677)..(677): n is a, c, g, or t
  misc_feature (724)..(724): n is a, c, g, or t
  misc_feature (774)..(774): n is a, c, g, or t
gtccacggccggggcggcagagacccggggggctgtggagggggcagcccggaccacgccctcccggcgggagatcaccggtgtgcaggcacagccaggcgaggccacgtccggcccgccggggatccagcccggccaggagcccccggtcacaatgatcttcatgggttaccagaacgtggaggatgaggccgagaccaagaaggtgctgggccttcaagataccatcacggcggagctggtggtcatcgaagacgcggctgagcccaaggagcctgcaccacccaacggcagtgctgccgagcctcccacggaggccgcctccagggaagagaatcaggcggggcccgaggccaccaccagcgacccccaggacctcgacatgaagaagcaccgttgtaaatgctgctccatcatgtgancnnnnncncnacnngccnnctttcatcncacaccacanatnnnnaccatcncngcccctcccngcncctncccaccctccacccacagcctcacgggtccacnacttggcgtntntttacatgtncctnccgngnnttctttcgctggaaagagggacaggggcncncacccgtcaccacgccccaacactccccccgaaccagagccgtgcacttgtgcctggtaggagagagacaggacagacgcgcttttcncgagacaaggacccccatgtcacggcagcttcacagacgcggctcgngccaccggggtcctggcgggtgggacccgcggcctccacgcggcgcaggncagcctgccaccctctgggcctcgtacatgtgc

SEQ ID NO: 615648 - DNA, 440 bp, Homo sapiens
tgctcctgtccggcaatggccacctgattttctctgcttcaatgcttccaactctatggatgattgtcatctgttgttgtagttgtcgatgttgttgttgttttgagatggagtttcactcttgttgcccaggctggagtgcaattgtgggatttcagctcccccccaacctttgccttccaggttaaaagccattctcctgtctcagcctcccgagtagctgggattacagacatgtgccaccacgcacggctaattctgtatttttagtagagacggggtttctccacatgggtcaggctggtctcaaactcccaacctcaggtgatccacccgcctccgtctcaaagtgctgagattacaggcatgagccactgtgcccggccgattgtcatctttatattatctcattaaaaattatcattaaagttgaaatgtga

SEQ ID NO: 615649 - DNA, 1848 bp, Homo sapiens
  misc_feature (1847)..(1848): n is a, c, g, or t
gagcagcgatctaagcgaagtgtgtacggagctggggaccaatgaggactcgtggactgacatgtcctgtgcggtgcgtgtataggtggagtatcagccgcatgtatgcgcgacacgcactgcggatgcactcccgagaggactagctcgtgccatgatctctactaacgtgagccggttacagagtacacgtagtgtttccaaggaatcactctcgtcaactcttaggcatcctttgcaatgtaaggcagctcaccaatgagtgttcaactagcgtgacacccagcatggagtctagagggaggagaggcagatgagatatgtcgtagagaagagcatcgactgcggcgcgcactcagtgcgctctcaacatcgtggcagatatcaaacgggtggtgaacgtcccgaactgcacgcgagactgtgtggtccgaagatagcgtgcccatggacaggtttgtcccgcatactcgctcgtacgtgccccactgtggggcctagcggcgctcgagaccaagtaacacacgcccttcaccaaactgggcgtccctttccccctagggaagtttgaaacgcgcattcgctaggaaaacgatcccgttgcgaagctaattcagcatgccccccacttacaggagcgcgggcacgtagtggcggccccgaattgccctagtcctccactttgcgagagggtgtctaggaggaggggtctcggggtagctccgacctcgctgtctcgatccatggaacccattgtgaggcccttccggggtaaccatacagatttccaaccggtagagccggtcctgcgaacgaagagcgaaaaagggtccctcgttcgaatctggaggatcgaggcaaatccctgaagaaaagccatcggggcttcaatgtcctgggtggacgttgtttcacggtcgggactaggggtgtggcccgtggttcccaaggcagggccgttaccaacccatcttatggagggtaacccccctgttggaatggcgcattgttgggcatggggcgccgggagaccccccccagggcgctcaagtctcaccccggggtgtggcgacccacctggcggacgaaccgcaatggtttgttccgacacacgtgtgggcttatcccccggtggggcgcatggtgggcgccggttccacattcgaacgggccttcccgtgcgtgttgggcgccagcggtcacccacgtggttgtggccctggaccccttcttggtgcccccttgttccgtggggggcaccttgtggagcgcgcctttggagggggttgcactggggttgcttggggtcctagccaatgccatcatttctggttctaccgaagagattctgcccgggataggccccgatgggaaccgtttccctgggagttgcattagcccgaaccgccagggcttcctgggggcggccttgaaaaagccaggcggggttcgccagctcagcaccggtaccaagcggccagacacggttccgggcacagggaacccgctcgggagaggccggcgcgcccccagatagaggtcccgtgatccaccgagtggagggggagcgacggcggaagacacaccccgagggggtgtaagcaaggagcacgcgtcaccccgctatgaagaacgacaggccgcggaagtaagccccaacacggcgtggctgacagaggaaggggggcaccccacacacgaaacgatgatagattggatagagagacaaacaacgagaggacgtgacagagtgataaacgatcgatgggaggcgcaccgacgggagtctactgaccaacgcagcgagcgcagcgcacttaatgagacacagacgacgagcagaacgnn

SEQ ID NO: 615650 - DNA, 435 bp, Homo sapiens
gcgaatattgtgcgtagtcaccggggtcagcagtggatacgtgccttgagcttcggcaaagtctgtggcttcgatagccaggtagtgatgcccatgtagtcaggaaatccctgaagtcatgcattccacgtgatgggagaagtcgactcactgtccttactggatgcagagattgtcctggtggcagttacatgtatactttggcaaatggccattaccgcagacgccaatgcagcaacagttacaatggatgaagccatgtctgagaaggagtgatactgcaacttctatgggagcctccccagagttcgtgatatggaggcgctcactgacgattgcgggacaagatagcgcggtaagccggcccgactgtacatagtatagctttaccaaaatacaacagctgaggctgaacttaaagaggtaccctgatgg

SEQ ID NO: 615651 - DNA, 891 bp, Homo sapiens
cgcgcgactcggcctgttttgggtggcagaccccccgtttatggcgacaacgatggtggcgccgctcgccccgtgtgtggctgtcaaccagccgccggggtatagatatccgcgggagtgtcagccgtttatatggagcgggacaacttcgggcaccagtcgaaattgtggggaggcccaagagcgccatttgcaagcctcggcaaggaaatttgcacgacaacattggtagtagattatattccgccgctgcagaagattggcagtaacgtgggagacccacaattacaaggactgcccccctttggggcctccctttttcggagaaaccatctccacaaaatacggcattggagagccaaaaacccgttgggtatttagagctggcaagttttagcatacaatctgtcttcaaaccatctggggcattgttctgctggaacgtgaataacagttttggttaccacccgacactattctggaccacaacacgctattttccctcccacaagatggcccgcgtgctatcagcgcgatgttgtcgctggagaagacatcactcgtctgacaaactcgcttgtcttggggtatcattctcttcaaggggcccccccttattggtggcaccaacagacactcaatacagaacgcctgttgtgctgcaacgaattcatcattttcacgcgagggtctgcacgtgtcattcacctcgtcttttctttatggcccacgactaggggccgggacgctcctggtcggagttgccggccgacgctgccgtcctttcgctattggctcattgtcccgtttgccccgacggggagtgttgtcaccgagggcgttgacattatgctgttaggggaaagatagcttgttcccccccacaaaaca

SEQ ID NO: 615652 - DNA, 133 bp, Homo sapiens
gctgagcatcttgcatcaagacgattgatcctccaaaaacaagaagggggttctgccctagcacgccaccaacgtcatgaggtcctggctcttccagcacatcggggtaagagcaggggcccgcttttgtgtt

SEQ ID NO: 615653 - DNA, 1390 bp, Homo sapiens
  misc_feature (650)..(650): n is a, c, g, or t
gagccggcttggaggtgtgagaggtttactcagctctaggtgagattcttcaagcactcactatgtcaacgggaaacgggatgtgacccattactcttcatattggacggaagatggcgagggatcaaatactgcgagtctacgatacaagctaatagaggcaccactttgcggtcatcccgatatggcaagtaggcggtgttatcgcaagcaactctagttggcatatgtgcgtatgatcatgaaaggctgcatagagcaagggcgaaaatgactcacataatgtcgctattgccatcgtggatctcacgattgcagttgtgggcaagctcgcaaaaggtcgtataaagttgggttagtggagccaattggaacttggttggggtatatggggcgcataatctcgcatagagattatcggaggatatctctgtggggagaaaattactccatagagcgctctaacgcagaaggaaaggaagaagtagcgatgttctttagtgcgatcatatagctatggaaggggacgcgtgtggcttattcagtctataggcatgtgatcttgtaagtctaagtttcacaaagggtttatgctgtggtttgattgggtttgggtagaggcttaaaactttagaatatgggttgagttnaggtgctttctaagagtagaggtgagagcaatggaggccactgtatgtaggacacattagtttggcggctttcgcgttttttcaatttgccacagtgggcgttgtggactgttttatagagctttgggggtatgaatcccggggaaaggtttagccttaaagcttgaaacatataggcgtattttaccctaaaattgtaaagcgggtccaactttctaaaagggagcacggttacaagagggttattaaatcttttgagaaaaccatttggttctaacgccgtgaaaaagttggcaagcttatggtattaggggtggttagcggcaaacatttggtcgcgcaatcattttcgttcttcaagagaatttttgttaagaagggaatggtaaatgtgttggaggttttactttaaatggaagcagtgaaactatggggtcccaaaatgccttgtgacatgggttaaggcttccgcacgttgggttgtcggccttgtgcgaacgacaatgtggttccagcgaaatagttgtatcgggagttcggttctggcactttgaggaaaggtgccttcatttttggcgcccaaggtgtctgaatttcacacaccttgttttggtccattggcgctgtgtgtatctgggggagacccttgtggcgtaggacatcctggcgttagcgaaagcttgcgttggtacccaaccaaatggttggccttgggcaattctctcaagcttgtgttacag

SEQ ID NO: 615654 - DNA, 830 bp, Homo sapiens
agagaaaaaaaaaaattcaagggtgttaccaaggcagcctcagaaagagccgggtggcccagggggtccttcgttgtctggtgtggctggcaggaggccaaggagtgcgagtagacgtggtctcactggcctaggggttggtgggctcacatcctgccctgcagggagaggggggcccgtcgtccaaccctctctgaaaaactgcagtagactgttgaccattccagggccccaacctaaatggttcttgtcgctatccttgcccgcctgacgatgtctgtgccgcggcacccttgtgcataagttgaaagatggcatgaagctggagcaataaccccacttcctggatttccctgaaatatggagcccagaagcagcaggtgacagggagcttcccttaaccctgggggtgggtgggcacacagaccacctcctggtcctgtcccctgcaggtagtattcacagtgtggatgtaacctgggaggagggaggaaggagctgagatgaaggagattcaggtaaacagtagccacaggggccaggacccccttcctgaggatcccggtccttcctcgcagcaggtgcttagtcctctcctagggagaagcacggaacgattcctacaggcctcagtcccatgtctaagggatacctaggtaacgaaatggtcctttgagtggtactcagatactatactcctcttcctcctccccctgcgtactctgggctgtcaatttagctctcgggccaaagaaatactcatcaaggagctggtcccaagaagcctgatacggacggtcatgtgcaacattagcccaagtcttatctgg

SEQ ID NO: 615655 - DNA, 274 bp, Homo sapiens
tagaggatctcacggacggcattcacccaggagctacgccggtgctccgaggcgtcgtggccacccccaggtagccagaggggccctggtgcaaacatttaatcctgggctgtgcgggccgaggccgttgcttttccttccgggctctacagtggcatcaatatggagaggtcattccgggcactgcgcgcggattcgaatcccgatgtggattgttagcctgcagacatcccacgcataagagcctaggccagaccgcccgctccgtcgaagg

SEQ ID NO: 615656 - DNA, 313 bp, Homo sapiens
ataattgcatggaaacacactacacatagaatacgttcactgtatgggtaacactcctattaacaattatccctaaagaaatcaagtgcaatgctcaacctagtgaccctgaataagatgttatcttctcccatagcagatgctaattcctgatcacaacatactggtacacaaaatgctatcatttactaattctctataatctgtgaccaataaaaggatatgctttccaaggtctatttaaagtatcagacactccaggtatacctcaaacacagatttcaagaaaggagatcgctgtcgtaactagggg

SEQ ID NO: 615657 - DNA, 123 bp, Homo sapiens
tcgttgccttctgcttccagcgtatggtgcgacacattgctcagctactttataacagatcagtgctccctgagtgccactataggcgctatggaagatgcgcgatacgcaaatctggttggc

SEQ ID NO: 615658 - DNA, 421 bp, Homo sapiens
aactaggtgactgaagtgactcaatcctgccgatgtgcctaggtaattgcaagcccgcgctgccacgtctgatctggttcgcggtttttcctggtcgttaattgaaaaaccctggcttggacgaccctttctccagctcctaaccgcgagtgatccgccagcctcggcctcccgaggtgccgggattgcagatggagtctcgttcactcagtgctcagtggtgtccaggctggagtgcagcggcgtgatctcggctcgctacaaccacctcccagccgcctgccttggcctcccaaagagccgagattgcagcctctgcccggccgccaccccgtctgggaagtgaggagcgtctctgcttggccacccatcgtctgggatgtggggagcccctctgcctggctgcccagtctggagggtg

SEQ ID NO: 615659 - DNA, 1153 bp, Homo sapiens
  misc_feature (461)..(461): n is a, c, g, or t
ggcccgagaaggagccgcccaagccagagcaggtcgagtgccggggcgctctaccatgttccggggacattgcccatgcaacatgcgaggccaactgtacctccctggggtccagcattgcaggacctccccaccaatgtgaaggaccatggtgcagctaggccctgagcgcctaggtgggaggacctccaggccacgtattccagtcatccagctccttccaggacctgtccagtcaggcattctggcccagatgccgtgatgcgtgtcgccagtgtcccgtcgaggccctggaccacatggtggaattattgtggcccagaacatcgcctgtacagcgtagagctcgtgggaccctttgcccctggatatctagtgagaagagctcgccggtaggagaatgaagtagggggagaaggagaggactcaggcggagcgcgcgcgatcgtcctagtaatctngcaagctggtagctcgtggaggatctctgcaatcctcgggggcgtcgatgttctaatactttatgtgtcgaaagctcagctctcaatcccaggactcttcgtgtgcttgtccatcttgggaagcgtaatggctcttcattaaccgggacatcaacccaggattgacctcattcttctcaggcctctcgtgaagtcttgcgagagaagcctgattctgagtacctacatcctaattctgcatcagtatagagcagtagagtggtccagaataaagaagtatcttgaccagggaaaaagggtaacatgccgcctggcaggaaacttatttttttcccattgttcacagtatcgatggaaaatattcaagcccagggctgcgggatgggctcaacgagcctgctaagtccccaggcacacttttggggaaggggcaggaatggcacgggacgccggcgaaagcaaccaggaagaggatccaaaggggtcggtttcagcaaggacacccaacgacccagagggggcgacaaccaatgagcggttgaaaaaacacccccgggtccttctttaaggttaacatcaaacgtcaccacgacacacgaacaactacactggagacgccccgacgagcacaatggggtaagcgccacggggagggtgcacatggagagaatccacccaccgttaagggaacg

SEQ ID NO: 615660 - DNA, 320 bp, Homo sapiens
ggtcgacgataatttatgcatttcacaataagtctaaaaacctaattcattttaaaagattgaaagttagaatggctgggtgtggtggctcacgcccataatcccagcatttgggaggccaaggtggcagaatcacctgaagtctggagttccagaccagcctggccaaaatggtgaaaccctgtctctactaaaaatacaaaacttagcccggtgtggtggcaggtgcctgtaatcccagctacttgggagtctggagcaggagaattgcttggacctgggaggcagaggttgcagtgagctgagactgtgggccactg

SEQ ID NO: 615661 - DNA, 322 bp, Homo sapiens
  misc_feature (73)..(73): n is a, c, g, or t
  misc_feature (220)..(220): n is a, c, g, or t
  misc_feature (284)..(284): n is a, c, g, or t
  misc_feature (294)..(294): n is a, c, g, or t
gcaaatataagttgtcttacattaagctggtggacattaaagagatttgcaataacgtaaagcaaaataatantttacatagttaaatgaacgtgtctataaaataaacctgttagccaagagatggtagaaattagtgcatttttaggctaggatgtatttatattccaaaggaagaataataattatactatgtaaaatcaagtttaataataaaggntttttgttgttgttgtgttttttgtttttttttttgagacagcctgggcaacagagcaaggctnccatctcggnaaaaaagggaattcccctttggcagata

SEQ ID NO: 615662 - DNA, 1509 bp, Homo sapiens
  misc_feature (258)..(258): n is a, c, g, or t
  misc_feature (474)..(474): n is a, c, g, or t
  misc_feature (577)..(577): n is a, c, g, or t
  misc_feature (583)..(583): n is a, c, g, or t
  misc_feature (1200)..(1200): n is a, c, g, or t
cccagtatccgagtccatctagcacacagcacaacatgtctgctcgtccttgcatgtaaccatcttgttcctcgtgcagggcctgtccccttctttgcattctccctctgcatgagtgcatggcagggccatgtgttagagattcacgccaccatattaccatcatcagcccgacttgtcacaccaggcgaagcacgcatggaacacagtctctcaacccttagttacctggatcacaagtatgacgtctcacttgangagggcgtaggggtccgaggggaatgagtcgaagtcacttccagtaaacgcaattgtccacgcggatagtaaatctcgcatatggtgagcagtctgtcggaagtgggctgctacaagtcaaagtggacaaagaagcgtgccaagaagtttctccccatggcctgtactgtgttagagggtccacacaagggaaatcactatcaaactgcgcggagnagaatacatgcgcgagacacaccagagttctaatcactgcgccactagaggggccgtgtggtacaataagtgtttgagccctaaactcagttggtaactctgnaagccnagcgttcgtcccaatacattgtccacacgaaaaactgcctacgcaagccaatgtaagcgcgcctatggcaacttcccccaaattgagaggggcaccgcggatgtggtttcccgccctcgaaataggtggggttcttaggaaggcccaaaacattcaaaccgacgccaacactttattctttacccttaccttacagtataaggggtaggttccgggtgtccaccgaataaataacacgccgttaatatgtcccttatttctgccatttattgcacttaagtcgccccacaaccgttggttatgcactgtttcggcaatggccatcattgcaccaatgtggtttaactcccaaaaagactccgttcccacgggcggggcttcaggtaccatgggcgcgcaggggtacgcctcccttttgaccaatggtggtgtacaagccctgtgtggggcaaaacgcccatgcggtcgggggaatgggccagcgccattgagaggggcggcgcagggggacagagcaacaacttgtaggcgggaagaaaaggagggaacgacccaccgagagaccatatccccgaagggtccaaaggccgctgaaaacgtcatggtcgcacacttanaggaggagcgaggcccattggttattgttaggaaaccccctgtggcgtgtccacaagggcgtatgggttttgccaaaccttccaatcaatttagcagggccttaccaatagctccccccaccccatagtgtccaagggtattcaacttcactattgagagagaaaagtatcgccccacattgtttccctccggtgtttgaagacacaccattctcattgtgcccaccgacacgagaagtgtggggattttccgcgcctgtgtgacattactcctattgtgacatcatccaactttgtactctccgcatt

SEQ ID NO: 615663 - DNA, 491 bp, Homo sapiens
ccgcgttgattagtgtgtactgggaaaacctggcggcgatacacagccacgacacacagtcgtgaccttggacatgtctctgaatgtccttgagtgccccagccagcagcctggacttgaacccaatctaacatctctggcacagacctgacaatagctgtgcagtgacgctccccatccaccctgccttgagaggatgtgcagagaaaactttacacgactattctccaaatacaggtgtgccaagcttgtagtgtcatacccaaaaagactccaggctgtaatcactgccaaagatgcttcagcaaagtactgagtaaagggtctgaatacttatgcatatgtgatatttccagttttttttcttcatcattatggggtattgtgtgtggcttgatgacgaaaaaatataatttaatcaattttagaatacacctgtaacataaccaaatgtggaaaaagtcaatgggtctgaacaccttccgaatatc

SEQ ID NO: 615664 - DNA, 110 bp, Homo sapiens
gggggccccttttttctttttaaaaggggggggggaccctcccccccaaaattttttgccccatttttcccgggggttttttgggaaaaaaaaaaaaattccccccagga

SEQ ID NO: 615665 - DNA, 134 bp, Homo sapiens
ctcgtgtacccatgttgataaaaacacggcagtgaacaattgtcagaaaatgaatgagcttcatcaactattgagaaaattgactcagttcctgtgctgaaagtacatgagtgaccactgtactgagaatgtgt

SEQ ID NO: 615666 - DNA, 164 bp, Homo sapiens
gtggaggatactatttgcctttaacttctgctttcctgaaatttaccactgcctttaaatactctagcttgtagagtcatcatggagattggagtctcaagacatgcagctgcccatattctcactcaccaatgaccctgacaaatagttaattcctaccacgg

SEQ ID NO: 615667 - DNA, 1315 bp, Homo sapiens
  misc_feature (384)..(384): n is a, c, g, or t
tgcctcgggcaggatgttctgtagcaccctagtccttacgcgactgatggctaatctgtacaaggtgtgatcatggcatcacttggttgactccaaatcttgcatcgcgtccatttcgctagcttgaccgttgctgacttcactgttgcataacgactaccctcacaggagatagtcgcacatcaggtatctacacaaattctcgatctgttatcactccattctcccaatacactctgcgtgtgtacaaaatccagaccgaagactatcgagtcacatagtaaatccagctgtgtggattatatgctaatgggctagtgtaggatcctaactactagcgtgtataaccttgatgccacccaatgagctaagagtataatggcnctgtacagttcatcatagtgaggtacgtccactcattgagacaacagttttggaattaaacatgccaattagcttcaacatggtggttaatttgagcaatgtgtacctagaaggatcttttgggaaggtccttctattaaactgttgaactctacttgatttgaaaaggtatagaaagaattaagtagctgcttgggctttcgttacctaaacaaataagtgtgatagctcaaatgtttgttccatgatctggcatgaaccaggcaatcccctagagtaggttgttggcttagcgtgcatactatgaaatgcttcttggcctaccatctcgatgtatatataagctcacaatccctttggatttccggccattttaagtctcttttagcgctccaggaaagatgccacataggacgaaagcgagataatggttaagtcgtattgagaagacgtgttgggacagccactgcgtgtgtgacttgtactttgcactgtcgtagaattaattattttgtcctggataatatattgtacctaggagcagcttgtataggtaggtcagcttactcttttttgcgcttgtgcacatatatcggttaagggttctcataggggtccaagaataagatacttgtccgagtggacattgtggatctaacgagaagacttcaggtggttaaagtacaaattggagctgggttcgactggctacgatcgattcgcataaatcggtgtgatggacgccacttacccggacatacagaataagtttttaacaagaacgcgaccaatgcggtggcgagacggccggctaagcaaagttccctgcagctcgtaacaatggaagttggtgaaatttgtgccaggcatagttagtcgacacttaacttgatcaacgtcaacgccagtagtttttccacaccgggcggaa

SEQ ID NO: 615668 - DNA, 1572 bp, Homo sapiens
  misc_feature (247)..(247): n is a, c, g, or t
tccctgacccccagttgcctgcaggctggggaaaattcttgctgaaacactgtgactaatccacttgggattcccttgctggtaactctgggcccatagatttgggagaccagtgtggctaatctttctgggggagagctggcacccccagtgtttggggctggtggctgggtggagcaccttcctgggtggtttttttcttctcttccatggtcggctctctgtgtgtttagagatgcgcccaccnctctggtggcacatctctttacgtgtcaccacaagtgtgtacaccttataacagagactcacatatggactctctgatggtgtatactctgagtcttatacaaagactctgtgagagagagagagtcatcacagacagcgtgtgtgagagcgagactatatcactgccgcgctgagacacaacactcacgcggacactatatatctcacaaagagacactctctgtgtgtcacactcccaagtgtgtccgagacgctgtgtcaccacagcgtgagtgagggtatctcctctgtgtgtgtgcttctctcataatgtgagtatttctccccctctgtgatgttatacacagttatatcatcaacactactacacaccaccgtagaggagtagtagtagttgcgcacactaaaacactatattataatacccgccccatacttcatcattgatgaggcacaactaatgtgttgaggtaggactcctcagtggagccccctgtggaaaactctcatctcttctcgggaaaccatattcttcctccgggagtagagaaaacaaactctcaatatcggcaagtctccccaaaaagaaacctactctgctgtgcggccacaaatacaatcgctcccttatataaaaaaacacccgccccgagtcttccgcgttgctctccgacggagtgttggatgggttgtctcacaagatctttgtggcggcccaactttctgcacaaagcggatttatctgcggaacgcggaaatctcctcgttgatatctccgcaaaaaccaaacaagcgtgggagcaagtggatacaaacctgcctcgtgttgtccgttaaacacagcacgaggggagcgttgacgcccctgcgacaagaggagtgcccccccctccacagacaatccgttgggcaacaccagccgcccctcataaactcctcttgcctactcaagttaagcacacttttaatattccaaaacagaagaagtaactcaccacgtgcgcactaggctacaataagcgggtgaggagaaacaacatctcctttaaacacccatctttttctcaaaacaacagggtgtgactctcattaaccacggtgtggaccataaacacgaataatgtgaggccccgctttgtgctacaattagccaatatttggacgcccccatatacttgtcagtagaacaaccttttggggtgagtagcgtctcacccaaagggccacttttacccacaccatctgtcccccaaataaatgtgggaacaactgatgtaaaacccctttgtgtatttgatcactcaccatgataaaaaaccgtgg

SEQ ID NO: 615669 - DNA, 732 bp, Homo sapiens
gcttgaccagcaccattggcggtaggcaagaacaaggcgccgtttacgagtagggcggcatagaacacgggagccaagaagagagtggttgatctcgatttttctacagaaagattggtatgatgtgaacagcgtgctgcttatgttcaaatataagaccatattggacatgggactgctcgtcaccagggacccagggaaccaaaattggatctgatggtctcaagggtcgtgtgttagaagtgagtcttgttgatttgcagaatggatgtaaattgcgatttagaacaattcaagtgtgatttagtgaagatgtgttcagggtatgataagatgttgattaacttctcgatggcatggtgtcttactcgcgtgtacaaaatgtgtgcgctatggttctaaaatgtggtagaatgatgatgtgaagctcgacagttcgaatgctcgaacgacatacacgaatgtgttgagctctggctgtacgatgcttgtgtctcgtggtgggggtttctgagctaaatagagacacggccacaacaactcgagactatcggagagacgctcttagtgcctcaggaagcgcatacaggctctcgccacacactcacggaagtaaggatgatgggcagcactcactgacgctcggagaggtgcttagacaaaaatgactttgaaaataaggttggtgcaataatgttggagttctcagaacaacaattgtaaaatgatctt

SEQ ID NO: 615670 - DNA, 127 bp, Homo sapiens
ccaaatataaccatacacttagagacttatctcttatactatatcctctatcattcttattgccacgactacctcctcggactcctggccgctattttacagcaaccccgtgatcgtggggttgtaa

SEQ ID NO: 615671 - DNA, 220 bp, Homo sapiens
ttcacagtgcttctactcccagcaaccaccccctcttctgaactgcctttagaaaatgaaaagtagaaccttttctgaaaagagagggcagcgccttagaaaaacacacaatacattggcactgtgctcagtgtgaaacgttgccacatggacctagtgccacaagacaccataaggcctatgctggctctttaggaactggtctaccctgctgggcccc

SEQ ID NO: 615672 - DNA, 897 bp, Homo sapiens
agcgggtccgggtcgcgcaggcgggggcggtgcagctgggcggaggcggccgtgggccgccatggagcagaatgtcactgatggactgagggcggcacgccccatggttccaccgactagcctgggtctaccagaatcttcctgacgcctgggcccggcctgacgttgctggccgcgcgggcatggtgtgaaccgcaatgtgcatggccgatgtcgccgggaacggaagttcactgtgtgacggcgagcgagttctaccagcttacataccgaggtggcccagcgatggtgccccgacaatccgcaagactgtgccagtgtctctggtacgtagggagttccatgcgggcatgtattgagcactggtgcccatgtcgttggagggtgcatgacgcgctgcggggaacacgagcagaccaaggtcctgcgaccatcagcgttctcccattccgggataccaggtatcgcgtccgtgctccaaggactgaactgtgaaggatctgggagcaaacgaggcttgacgcagtcgtcggctgactgcaccgagcggcggcgacaatgctgtaccgtactaacgtggaggctacacccaagatcgtcccaggttcaacgaaggaacgacgtcgactacttgcttggcctcgaggcggatggtaccatggtggccagcacaactccgtcaatccgtgcggatcatttggctgtcattcagccctagaactccattcgaccgctgctggtccacgcgtgcgggaaagaaaggccctatgaacgtgtcttggctcgttgggtcaccgaggaccagccttaatctcggggaaacctgaagccgaaatccagagatatcagcatcctgcatcgaggctgtggctcacccagtgcctccaggatgtggag

SEQ ID NO: 615673 - DNA, 677 bp, Homo sapiens
  misc_feature (162)..(162): n is a, c, g, or t
gtgctgttttcttttaaaaaaaaaaaaaaaaaattcattttcttggggtaagagctagagagaaggccccaaggcttctatgggtttcttctaattctaatggctaaaaggtatggagtattgtcacttacccggggcttctggtaccactggtggtcaatnaacaatggcggtagtactggtttacctaaattaacctcatgggtctgttgtgcaccggcatcattggaggtaaacatctccatcataatggctttctccaatctttggtcaacaaccgctcaaaatttttggggcgccatatttgtgtaatgtgccagttgttgaccacttaacgcattttgtgtctcacaccaaggcctttggaataaccttaataccgtgtgacacaaccacacggggtgtttaaagatactcctcgtgatccgtgaactccttgggcaagtcagacacctccttttagagactcctgcgggtgggcctccaaattcttatataagaacgtgggagggattgaacttattttcacagatggtccaaggacttggtttgcaagatattttagggatggacgtgtattggtacaatactaccggcggatagccatataggtatttgtaggtcattgaagacttcaaggggggaaactaagacctattttgtggacaaaaagatgc

SEQ ID NO: 615674 - DNA, 112 bp, Homo sapiens
catagtatagtccttaccactgtcttctcttactgttttcttatataaaagccgttacctctctcatcttttctattcccaggtgacaatataggagattacgatccattcc

SEQ ID NO: 615675 - DNA, 578 bp, Homo sapiens
cagtctggatagtataacaaacattggcagaagcgttctgtgagtttagtacgcactaacgatgtaagcacctgccgttatcatgaccattctcagtctacttttttaagctaccgtatcttaaattattgaaaatttattaatcgctgaatatataataacctttgcttgtatgtaaccgaaaatggtttaagagccaacatttagagtatgacaatggagctgaacagtttttaatgcgcaagaggttctgtccttgtgtataactggtaaccttaatttactgtgtaaagatggttacattatatcctaagcttggttggtgggagacaatagagaatgcttgttaggtatgtcaaaaaaatcttatctttgtagattttggtcaagtgtattatacgagctatatttttcatttgccagaaagacagctttgtataaccgctttgggaagtttctgctctgtaaatgtctttagagctgacagtctgtaaggtttgtttttctcttcatgctagagtgtcagtgggtggttttgtgcactggtccaaaattcacaggtcttaaatgtttggggg

SEQ ID NO: 615676 - DNA, 246 bp, Homo sapiens
tactctacaggatcgtgcatgtacgggtcactctatttgtacttgaggagcaggcctgtcccgacatcaggcgcagaagctgcacttctccgacgcccctttgcagatgcagccctgggcacacttggccacagcccacagtgcagcaggagcagcagctcttcttgcaggaggtgcatttgcactctttgcacttgccggacctggcgcaggtgcgggagacaccaggggcacaggagcagttgg

SEQ ID NO: 615677 - DNA, 673 bp, Homo sapiens
tgttggtttagtgtgccacaatattatgggtttaatttcagataattaagagtgaggtctttgtaaaaattgaagggtttttcttttttttctctctctcttttaaaaaatttattaaatatttatttctttttttagagatggggtctcgctgtgttgaccaggctggtctcaaactcctggcctctagcaatcctcctgtctcagcctctcaaagtgctgggatttcaggcatgagctaccacgcccagccaggtttttcttttttaaaccttcatctaaaatgtccaatttctggagttgtttgtatctttatggtcaaataaattaacttgcaaataataggtaggattaaaataggactgaacagtagcactcatctaacttattataatatccacaatcaatttttatgggttttttttagtatgataacaggttattttataatgagtgctgggagacttctgcagtttaaaaaataagctcccgtaaagtacgggaggtcaaaaaaagccttttattcatacataactttcttttttcacatagatttcagttatttgtaactgatattggttaccatttctgatcttcatttttatcatccaaggtacggacatccgtattggaaggtcttctgccattctgtttttccaagaatgagttcggc

SEQ ID NO: 615678 - DNA, 264 bp, Homo sapiens
ctggcgaggcagtctcagtgaagaggaggacagcgaggaaactgtggcagacaggcagagaagcaagcaggaggagagctgggactcttaaaggtctggacttttcccagaagcatcgtgcttggggggtgcacaggcagaaatgccccgggaaaggtcgcctgggtgagctgcagatggacagaggccagggtactgtgggtggcaggactgaggacacaattagtgagaaacaggcaggaggaagagactgcctcgccaaat

SEQ ID NO: 615679 - DNA, 105 bp, Homo sapiens
ctcccgagtagtgactcaggcatgaggatggtgaagtgaaaagaaaatcctgactccagaggggactattaatttaattccaggtgtaaaattacaaaaaaaaaa

SEQ ID NO: 615680 - DNA, 379 bp, Homo sapiens
tgatcctcgtcctgtattaacctagcgctgcatgaagaggatgagtgaaaatatgtcaggaaaagaggtagatgtcttgtccagacctatttacctcatcagacaaaggtttttgtattataatctgtttccttgaaaattgatttgactcctgctcttaaacacagagtagttgttccgtaatttccagaggaactggccgtcatctataacaaggttgcattttacttttgcatccagtttttatagtttgccacaaccaagccacccttcacagataaaatatgatgctggcatggcaatcagaccaaagcactgtccccaattgttgtcttaactatgactagacatgttatacagccatttatcttgtacaact

SEQ ID NO: 615681 - DNA, 129 bp, Homo sapiens
  misc_feature (46)..(46): n is a, c, g, or t
  misc_feature (53)..(53): n is a, c, g, or t
  misc_feature (101)..(101): n is a, c, g, or t
atctctcccaacttcagcttcatgggccagctgctgcagtttgagncccaggngctggctccgactgttcgggcagaggctggggagccccgcatggctgngctcgaccgagcacctccaccaccaccg

SEQ ID NO: 615682 - DNA, 837 bp, Homo sapiens
tattcttgaacctgcaaaatataggatggggtactaactgccgacatattagtgggccggttcattgaagcaatagattcccaaagaagggtaaaatgttcttgctgggagaaagggggtctgatgcgtgaacagcttgcagatcacattaactcagatagggacaggccctctatgtcttagctggtccaagtaggggaataccgagccagagtgttagttcaaagcttcttctctatccaggcaaaggagctaggaatgtaagtgttctgaaagaacggtcaatgtagtgcgagtctacaccatgcctgggaggagtagatgactcgctttgagttatgacagtgtgcttgttgatcttcgacataatgtatagctcgcacggagttgcgactcgcgtaggccatcggccacagatagaaaacatgcatgatatgaggactatccttaatgtcctatggacaacctaacattgtgtatcttataggtgagatgattgattggagagccacagttttctaacaaagtatcttatgaccgctatctccttgtagatgtgagataaaaattgctaacttctgtataacgtaaacgcaggttcaagttgtacatatgtaaagataatattgcctgattacgccggttgaaataaaagtatgttaaatggaagggagtgtgtatttatttttcacgttagaagacatgaagaaattttaagaagataaacatcgatattgtgaaccatgcagcgtgaaaagataaagtttgatgttcaatatataggcagaaaaaaatgttgtgtcaaaatgatgaatgtaacatcaggaggaaacgtgg

SEQ ID NO: 615683 - DNA, 136 bp, Homo sapiens
tcccgattaagcatgtgtgagctccgttctgaaggcttgggcaaaagtgtctctatcacagtagctctaaggggctcctcagacagccccagcaggtaatccatggagagaagctgggactgcctggtgttggcca

SEQ ID NO: 615684 - DNA, 489 bp, Homo sapiens
  misc_feature (158)..(158): n is a, c, g, or t
cacgactcgtagatcgagatatgtctcggactgtggtcagctcaagaacattgaaggagctgctggagatgacattgcgctgcagtcctgccgtcaaagtgtagccaaggcgccagccaccgtagatggccacgttgctgggggacagcagctcaggnaagtcacagtgatcaaaggaagccagcaggaggcacttggcagcctgcttgtacttcctggcggccagctctgccaagcctgcggcacacttgagcttgttgaggatggcctgggtctggctgtcacgctctcctcgctcggcaatctctggggtggactcagccttgctgaacgtagctgagcacatgagaccaattctgcaagtagacgctgaccttgatgacattgaggcacatgtcgatgacgtgttgggcgctggtgcagtagtcccgggcccgggaatagcacttgagggcgttgctgacgtccccacagtcctggtagtggtcg

SEQ ID NO: 615685 - DNA, 951 bp, Homo sapiens
tcgttagtggtcttaggcattgtctgctggtgccgtattagtgatactggtataagtgctgggtttcgtatgtttttgttattgtcgctgtcctttaagcgcggcctggtcggcaggtgaagtttgccaccttatcatcattgcgtgatgctcttttgggcgtcgacgcatcaaggttgttcccatcctttcgtgtgaatgggagatattaaagtggtgtgtcgcagaccataccagtggttgaagtgagtaaaaataggtataatccagttgaggcagaatatgtatcgggggatatagaccactgagtttccgcaggggccctgcctcgcctaagacagcctagagaggacggcaatgaagaagataaagtaaatcgaggagattgagacccaaggtcagcagccacctgcaacgtcggtaccgccgcaacttcaattaccgacgcagacgccgcagaagatccctaaaccacaagatggcataagagacatttaagcagtccgatccaccagctgagaattcgtccgctcccgaggctgagcagggcggggctgactacatgcctggtcttaccatctgctagcctatcatcccggtttgtagtcatccaacaagtagaaatatgaaattccagcaataagagaaggggaacaaaagattggaggctgaagacctaagagtgcttgcttatcttgcccgttgaccagatgaatagaagctgattcttgcattaatcgtagtgcatgcatggggttctcggtgagttattgtctgtacctaaagaagtcttctttgttggtaataaacaaacgtgttttggtattcaaagcctggtttctctcaatacgccggttaaaggtttttaaattgtttcatatctggatcaagttgaggattattaagaacttcatttttaattggtaattaagattccaccttgactttttt

SEQ ID NO: 615686 - DNA, 112 bp, Homo sapiens
gtgaagtagaaaatagaaatgccagtaaacaacataatgtttaatttacaacttacattaggggtttggggggaatgctgaatggatgatgatggagcatgatgacattgag

SEQ ID NO: 615687 - DNA, 317 bp, Homo sapiens
tctcatacctcaccagcagaccaaagatgacctcgtgtcagactagtgggctgatgcagcggtagagcagcatgcatcgaggcctgagggtgcagggcgcccatactcttggcctggaggaatagctcctaactagagtaaagtttccacgagggtcccaggcagagcatgcagagctgggaaccggaggctccaacagtccttgccttgtccataggaacctacctatcagagcacctttctaacagactggacttgcccagctccgtagttagttggccaatctaggttacctggtagctatactggcccaggtt

SEQ ID NO: 615688 - DNA, 506 bp, Homo sapiens
  misc_feature (18)..(18): n is a, c, g, or t
  misc_feature (66)..(66): n is a, c, g, or t
  misc_feature (503)..(503): n is a, c, g, or t
  misc_feature (505)..(505): n is a, c, g, or t
aaacaaggtttctcaaancagcactgttgacatgatctggatcatcttttctaaaggtctgggcantgtagggtgtatgggagcacccggcctctacccactaaaggccagaagcatccgtcagtcataacaatcaaaagtacctcccagacattgtcaaatgttaagtgcgccttccccaggctggggtgaaatcactcccatttgaaaaccacttcccaggtgaggcacagtggctcacactcgtaattacagcactttgggagggcaaggcaggtgtttcacctgaggtcaggagttcaagaccagcctggtcaacatggtgaaaccccatccctactaaaaacacaaaaattagccaggcatggtggtgcatgactgtcatctcagctactcaagaggttgaggcaggagaattgcttgaacctgggaggcagaggttgcagtgagctgagatcgcgccactacactccagcctgggtgacagagtgagactccatttnant

SEQ ID NO: 615689 - DNA, 751 bp, Homo sapiens
ggtgcaatttcccgggctctccgcgcggtccggtggaatggtcagtgccgtaatggcgtacttggcgtccggaccctacctgataccatcagctaagaaagtgtgttgcggctttataagcgggcgctacgccagctcgaatcgtggtgcgtccagatagaccatattaccgaatcctatgccttgctctgtaactgatgagtcccgtgcttagaaatgcataacactacacgagggtgaatacacggactaagtcggcagagaaggcgcagcccagctgtctgaaggaggccgatgaacaggttctggttaccgatcagcattcacagccgtacatcttacctctgaactctaccgtggcgtggacaaccctcactaaatgtagggagaatcatctgacttagcgttacaaccagggctacccccattgaaattgggcttgctttcacgaatgggaacctcgggcaattcccgtaatcgtggaagcataggggcataactgataatacctttgactttcaccactttttgcccaaccaggaagagagcgatcactatcgctggtcacacgcaaaaaccattggcgcgttgcaacgccggggggacaccgtccctgggggcgaaaccggaggtaggagactatgcgaggcacgagggcttcgccttcgaaatgcggtggttaccgttgctagccctttgtggttggttgcccttcctgaccccttgggaatagccgtctagggtctgaaca

SEQ ID NO: 615690 - DNA, 497 bp, Homo sapiens
gggtattcaattctagctgcgattctttagcagcagtgtttgactctagtgatgcttcctctgtattagagaagtcttgtaaataggccttgcatataatgatctaaacttgagggggggaaacaagggttgtttgattttcctggttccgcttcgggatttcacagattttcggagaaagaagtgtcttgtttgtccatcttgcatatgggggaaagtccgagcacaagcaattcaagtgtaagcctcggacttttaaagtacgcttgataatttattgcaagagtaaatattatctgtgttgacaattgtgattttaaaaacccctttccgatgccttctctgttttgatccagacacctgtataaaaactctggattgttttatatagagctgcataatcagtgtttgtaaatgtaaaaaaaaaaataccaaggtgctttgtttttaaagaacattgtgatgtaaagttgtatcaaataaaactcattgcaaca

SEQ ID NO: 615691 - DNA, 628 bp, Homo sapiens
gaccagtagtgggcatggagaaagatgtgctcctgtgggcccagacagggcgactgacatgtgctcaaatgccccaagtgcgacaagaactgtgtacttctgccgagagggtgagctccctgggtgaaggactggcacaatggttctgcctcaatgtgctgagctgctgcagcaagactgctggactgccctgttgtggtgccatcgccgagcatgactgggaagccgttctgccacaatgcctgtgctacgccaccctgttcggacccaaaggctgtgaacatctggggtgcgcgtggctcctacatctacgagaagcccctggctggagggtggccgcaggtcaccggtgccccatctgagggtcccctgctgggccctgagcaagaggagcgggaatgtgcgagctggaccacctcgaaggtgggcccatgcatgaagcctccatgttgtcacacagctattccacgcggggatgcccaagacactgtgccacagcgggctgacaagcaaatgaacggttgtacctatcagctagaggaagggtgacgatcatcatgaggcaaaggatatggcacgcggaacctgacatgcgctgcaaagcgcaagaggaagaaacatgagacaa

SEQ ID NO: 615692 - DNA, 349 bp, Homo sapiens
acgagtgcgtgtcgctgttgaagtcagaggagacacctggttgctccaggtgtagcccagatgccttgagggggcctccgacgctgcttcaccaccttctgatgtcatcatatgtggcaggttatctagacggcgggtcaggtccacccactgacacgttggcagtgggggaccacgggaaggccatgccaagtggagctatcccagttccagcgtcagggcatgacactttgccccaacagcgccttggccaggcgcccagtagaggcagggatgatgttctggagagccccgcggcatcacgcccgttaccggagggccatccacaaggtcttcctgggggttgggc

SEQ ID NO: 615693 - DNA, 390 bp, Homo sapiens
tccccaacccacttagtgttacaaaaagaggcagaagctgatcagagaggaggttgggggaatttggccgtatgctcagaggcattggtagctaagtgactttttcccagacaggctggtctcctgtaagagagagagagaactgacagattatgcgagagaatgcgtccgccaccatcaaggtcagaagcctgcccctactctcattatgtgttgctagccaacacactccttcagtttgtttccagctgatcatctttctgtcttctgcattcccagttcgtaatctgcactctcttctctctccacgggccccagagcagatgggtcacttcttttggtttcaaatacaatttagtggccatcttccctcccatctttttcattaaa

SEQ ID NO: 615694 - DNA, 989 bp, Homo sapiens
  misc_feature (377)..(377): n is a, c, g, or t
gctcgtgtgtgtgtggacacaccttgtgagctccgtcgcacgccgcgatcttctcatgtcggcgcgacccccaacttgtgtgggcgcccgcgtgtgcgccccgccgtggggtgtgtttcccccctctgtgaagatggtgcgcccggcccactgtgtgttcccccccgcccccccccccgcggggggttccttactcccgcctggtgcccccccctcgtgaggggaccattttccgctcccgcggtgccattagacgagttccattgtgaacggcagtccgcacagtttttagaagcgtcgtcggaagtggcttgccgaatcctcctagtcccctctgcgtggcttactcaaaccacggggttttctccctcctcccnctgctggcatcaccccggcggccttcattggggggtcacacatcaaacggtacatttttctcccagtggtcccgcgcaaccggtctcacgcccccttcgtttggggtgctcccaccccccggggggagactccctcggctgcttatgttgctccgcctgttcatccgtggcagaattccatccgccatgcctgttactccgcccccctcgctccgcattcactcgtcctgcgatgcatatattctatacacccgtggctctcaccactcatttgtgtggcgccccccgtcacgcacatttcttcccacattatgtgtttcatccatgcctccacattctgccccattcatctacctcccgcgggatcctctctccacaccccactatttctttcaccccccactgcatatcaaccccttgttcttaatcccccccaagttcatcagttagagatagattaactaacaccccgtcaaatctctctctcattttttttgcctgtcagattacttggctagcctggctattttttctatcagaagcctcatccgcatcacacaagcggataaatagaaactcctcacctctccacccccccacccccacataaca

SEQ ID NO: 615695 - DNA, 111 bp, Homo sapiens
ccaggaaaccacttttaccattattacggattccctggccggtgttttatgaaaagaaaccggtttgagcgtttatagcgaatggatcgcttgagcccatgagttggacgc

SEQ ID NO: 615696 - DNA, 784 bp, Homo sapiens
  misc_feature (483)..(483): n is a, c, g, or t
  misc_feature (735)..(735): n is a, c, g, or t
ccagcccatgacccctatcaggagccctgctcagtcctcctaatgacctccggactatccatgtgattacatcttccagttccataacgctcctcatactgaggactactaatcaacatattgaatcatataccaatgatggcgcgactgctaccacagatacagagcactgtaccaatggtccacactacaacaacacaccttagtccacacaataggccttcagtatacgcggatacttctctattctatatacactgcagaaaggtttcttctcttctatctgctacgtgcaatttctttcattgcacgactcctatttagacacgagctacgcatggcaccgtgagggcgcactcttaaaaacccccacacaaactctaaaggcgtaagcgggccaaaccatagggctctcacgccaaatcaagtgccaattcaaatctcaccgcctaaaaattagcgcacttgaaaatagattcacgnaacgttctccttaaaacgataatacacgctcaatataacttcgaccattctatgcgtagataatctaacatctaactctgaatatttacatccacttaagttatactataccgaaaaatttccactaccgtaaaatcccaaaacttaaaatatcatacgcacgaactggcatttgaatttaccataattctaatataacttggtgcgtcattctatgttatatatacacacgcctcccacttaaacataganctcatacaagaagcctatcatatcgtaagcattctcaaccctttttacc

SEQ ID NO: 615697 - DNA, 186 bp, Homo sapiens
atccctaatatgctgtggacctgctgacatgacaataaaggattagaatattacataaactaagtagataaagcagtggcagggtatgagaggactgactccaattttgcacgttcaactgtggataacatgctatcaaactgtaccgtatgctctacgagacatctttcatgacaaggaacagtc

SEQ ID NO: 615698 - DNA, 240 bp, Homo sapiens
gtttgtctgataatgtttagataatttgcaatataaactgtagaacttgttaggcatgaaatcaagcagaagagaaagaaaaatgctggaacgtgcttgatgtattagataaaaggcatgtgtaaagaagggtcgtcgaccctgactgcgagaataagaatcgcttgaggtgagcatatacagagggctaacacgtgcctgtgcatagcaaataaggattggtaaaatacataagaggaa

SEQ ID NO: 615699 - DNA, 898 bp, Homo sapiens
  misc_feature (705)..(705): n is a, c, g, or t
atctctgtatttgctttttatgtgccagtgtgcaaagagctgtcatcatttcgcttttttatttacttagtttgggagaatgaaatgatgtgagtactgaatgtctaataatgagtttggacttggccttttaaaattagttactgtaattatattaactggtaatgtgtggtatggatcatggtctaaatttagtagatgggctgggcatagtggctcattcctctaattccttgcacttgtgggaggccgaggcaggagggtggcttgagtttgagaccagcctgagcaaatagtgagaccctgttctggcaaaaagttaaaaagttgtgtgagccatggtggtgtgcacctgtgttcccagctactcgggagtgctgaggcaggagagtcactgtggcccagggggtcacgggctgccctgagccatgatcgtgccactggctcgaccctggtgtgacagaccaagaacctgtcactaaactaaacaaaaaaaacacacaaaaaaaaatttttgcgggcgctctcgccccaaaaaatctcccacaacactcttgggcgcgcggcccacgctagttaacgcaaccggcacagctgttcccacagacacccggcacccgacagggctggggcttccccaaaaaaaccgcggggcacccggcgtgcttacccaccaaacgggtctgggacacacgggccacacanggggcacggggccaatatcccgcccctctcagtgcaacacacacgcacaacgcagaacacacagaacacgcacacacacagccacgccacctgaagaccgacagcgcaacaacacgcacgacacagctccaacaaccagagcaagccagcacacaacccaagcaacacgccacacacgccacccaccctccga

SEQ ID NO: 615700 - DNA, 140 bp, Homo sapiens
catgtagccacagcacagatcatttcatattgcttccgtgagagatgtggcagagtcagctaaatacatattgacgccggatgagaagatagcgatgatatatggtagcgcgagagtgaaatatagcatcgtggtgtcta

SEQ ID NO: 615701 - DNA, 588 bp, Homo sapiens
  misc_feature (287)..(287): n is a, c, g, or t
agcgggaagaaaagccaccctgggagcaaagcaagttagggttgtaagagacatttctgagattaaagcagccagatctatgatggggtgggtacgggtggttaaagagaaacagaacgtgagaatgactcatgagactattaaactgacttaactgaaattttaaaaaagggggaaataccaactacgatgcacccccccccccaccacaccaggtttaatgctactcaaggtctatggctgggaaaggccacttgttttccttcagttaagtgctgagaacgtgnttgggtctgccagaagacaccccattagaggattccattcctttagaccttcagtttaacggccgtggatcgtggaaagctggtggctttcaaacaaattccgagccccttgcattcctccagagattcacagcttgacattagaacgtgtagtgtgctctgcggcaggcagccagtgttgttgcattcagccagcagccttccccattcagcacccttacagtgtggaatgggtggggcattcccccaacaacaccccttccaaaattcaggaaaacatattcttcacaggaaaattgac

SEQ ID NO: 615702 - DNA, 212 bp, Homo sapiens
gggaggtaaaggaaatgacaaagaaaccagaaatgtcagcagaggagaagccaacctttctaaaaaggagattgcttgcaaaaaaactcaaaaaaaagattgcttgcaaagaaactcaaaaaagaagttttttataagtaataattaagaaccatttaacaaaatggaaggtccaattgtttttaaaataaattatttagtccctcccctga

SEQ ID NO: 615703 - DNA, 164 bp, Homo sapiens
tgagtcgactctaaggatcctcgctacgtcatactatggcgaactgtaccagcagtacgtgcaaaccagatctagtaaaaagattgctgttcaaacgattgaaagcttactttgctgaggtgttaaacagttaaaacacaaaaattaaaagccctcatatgagg

SEQ ID NO: 615704 - DNA, 333 bp, Homo sapiens
  misc_feature (41)..(41): n is a, c, g, or t
cagatcctggcccaaagcagcaaagtccttctttctggcanctgcgctccaggtggctgtcccacgccggtctccgcgcctgcccggtgcgcgggtggcgtccgctccaccttcccttcgtctcctccggctccgcgttcagggagcgactgtccttaagatcgtgcccccctgcccggagccgcccttcagttcatcgcccgtcttcccagaagcgctgctgcggccccggcggactgatgaggagcctggagatccgcgatggcaccgatggccccgcggtgtgcgctccggggtctgagagcgctccgcccgcgggcagctgcggccgct

SEQ ID NO: 615705 - DNA, 386 bp, Homo sapiens
tttttttcgctgataaaatctcttttaggttattccaataaaaaatccattcacacagaaatatccatctcttgcaaaaaccattttcaaataaattctgtgtaaaccaaatttttccaaaattcttccaaagattctttagatcacagggtgcttccaaaaaaaaaaaaaaagaaattctcactaatagaaattttttttttaattccaacgcaaaaagtttgtgcttgattaaggctcagttatcacttgaacagaatgtacttctatatgtacgtgctaattatgaaactcacagcgcattcacagtgtacggtacacagccccacacaggcacacagctcccacatgtttcgtaagtgacacgacacagtgcgagtttttct

SEQ ID NO: 615706 - DNA, 358 bp, Homo sapiens
cggagtggcctggcgagcagatgcatggtggcactgatggagagggtctcccagctcgctcaatggtgttcgggcgtggtgcggcacctggcggcacctgtgcactcagccgtcgatacacgggtcgattgggacaagaaagacgatgtggttttcagggaggcccagagatttggagaagcggatgaagttctcctttagttccgaagtcagctccttggttctcccgtagagggtgatcttgaagtactccctgttttgagaaactttcttgaagaacaccatagcatgctggttgtagttggtgctcaccactcggacgaggtaactcgttaatccagggtaactcttaatgttg

SEQ ID NO: 615707 - DNA, 944 bp, Homo sapiens
acttgaggtagaccaaagacgaagagtcgaacaaaaaagaacaccgacagcaaacaataattcgcgcacatcgttcctggcgtcctcggtttcaatgcacagcggtttcccgccctggtttgcctcactcggacatccccttgtggggcccccgcccgttggtggccgttgcggaacccctggtgccagggtccggtatcctccctggggcccctctcccccccggccatgtgtccccgcggcttccaaaacacacccttcttgggtcttatttcgccgccatatcgctcctgccagtgtcgccccatttttcgcccgcctgtccgcctgggacaaagacttcccgggtttcagcctctcttcctgcgtgatggccacaacaccggttggtcccgccccgtttctttccccggccactcatagaccccccctcgtacaaggagacgggtcgtaccccccgcgccccctcatagcccccctcgcccctctgggagtaactctcgtcccccccccgccttctggatctatcacgccccggggggtgttcgcccccgccggagcacccccctcttcttgggaaggctctcccctgggactctcccttctccctagacgtgggggaccggccaaccccttctcacaaaccagattgggggcccccccggcaaccgcgccccgcgagtgggtggcccccggagtggggctggccacgtatcttctttggaagcggcctctctcccagcacggagttagagcgcctcttggtgccccccggaaagtgtttcttagcggcgccccctccctacgtgaattcgggtctttgcccctgagacacgttgtgcctccctccggccccggtggcgcggcgcgttccttcatcgttgcccgcaccaggcccggttgcgccccagtcgggaacatataaactttttgaccccataaca

SEQ ID NO: 615708 - DNA, 1266 bp, Homo sapiens
gcaagatcagcctggccaacatggtgaaaccccatctctaccaaaaaaaaaaaaaaaaaaaaaggtgcaattagctgtgcttggggatttggcccttgtattcccagttgcttgggaggctgaggggggaaaattggctggggcctgacgagctgggaggtatagggtggagaaactggagatattggccaccaattggcactggtaagcctggagttgactagaagcgagaccctggttctcaggaaaagaaatgttattgggggaagggtttatttcaaaggactctaacgttttaaaattcagggcggtggcacgcttcagccgccttgtaattcccaggacatttttggagagaaggcttagaggcagaggcagaattcaccattgaggggctcagggaggtcacaagagaccaggccttgggccggagcatttgtagaacccccattctcgtactataaaaatatacagaaaaattataacccgggggaattgagtgggggggtgaaacacttgtgtgggttcccaaggtttaattgggagaaggcatagagggcacgagaagaattcttcttgagaacccttggagagggttttgcggagagaggctgtgagaattcagcacccgaagtgtgggacactattaacaagccctgttgggtgtttgtcaccagataagacagagaaagtgtcgccagagcagtgaagaagagaagagaaaatcaagagagaggaaatttctataactatgtgagagaaaagtgatagggaaacagccatatataaatatgagaatattgaggggactatggggggagaatataaaagaaagtttcgctgtatatgcatatattataggcctttgttgtgtgtaaacaacggcgagggtttgttatgcaaacgagtgaacttattaaacgaggtgggtgtgataacaccaaagaattattgagaagagggggagaggaaaacattatagacaaggtgtttgggggggcaaacactttgtagtgaagagaaagcaataagacgtagttattaatcaacgagtggaaaataatttgtgacaaaaaagagtgttagctataagagagatatatatgtgagaactgcaaaaagagtaacaatgagaaaacagaggaggaaatagtaaaaagaacacacagggagtatagaagattgattaaagacatcaaaaccacactgagggagagaaaatagtttgaagattaacaggaaggaaaaagagggagaaatatatag

SEQ ID NO: 615709 - DNA, 103 bp, Homo sapiens
ggatcaggcacagcatgccaggaggaccctgctggacgagctagtgaccctgtgacttgctgctgccaccaggagtgaggggtccatgttccaaagtgtacag

SEQ ID NO: 615710 - DNA, 217 bp, Homo sapiens
cgtaccatctatgctctgtgtacctgcaccttaggaggctatagttagcagaatcattcagaatagcaacaaactatgataaatatacagcatatatacatatctagatagcaaaatacgatcagtagaattgtggcatattacgaatgaaatatcatatgcgaagagcatacgatgtattagaaaccataatggaagtcactagatggttacaggt

SEQ ID NO: 615711 - DNA, 1006 bp, Homo sapiens
  misc_feature (998)..(998): n is a, c, g, or t
  misc_feature (1001)..(1003): n is a, c, g, or t
tgggaggacaatggtgagaagagggaacctaagaattcctggactctgactgggcgtgagaaatggccggaagtagcttcgagtccgtcattcaagcagtagaggctctggagaaaaactggagcgcatctgcttaaagggccgcccagggtcaggatggaggggcaaagtccgagcagggggtttcctcccatattggatcacgatgaaaactgcacagaaagtccgtgctcagtttcttccatggttacagaacacaggccccagaccaggaaggcattctgctaaagaaggggacccgaaacctcagctaccagcgccgatggttcatcctccgaggaaacctcctcttctacctagaacactagaccgaccatgcacccctgggcctcatcctgttagagaactgccaggtggaaccacaccttaaggctgcagaaccctatgcctttaccatcctgacccctggggtggagggcacaggtgggcgggcctacaagctggctgcagaaacccaggaagagctggagacttggctgtgggcactggctggcgcgagctggaggcggctggctgggctgctgtcccccctccccccccaccaaaacccaatactgggagctgtgccaggcaactggccaagaacccatctcatccccagaggacagtggctttctagccactgtgagtaccccctccagcttccaggagttgcatgagcactttgggaaggagatccgggtgctgcacgtggtacatagagagctccaggcagccagtgacaatggagacagcagatcccaggcaaagatggagcaggagctcaaccagtgtctgatgagtgactgagagatggacccaaagctaagaggtacctacttgccaagacagcagactgcttcaacagagacccaggtcctggctctgtccctccctccctcgtccttaccccatccccccctcatcaaataacaaggcagaaaacaggcccaggtacnacnnnaaa

SEQ ID NO: 615712 - DNA, 319 bp, Homo sapiens
tccagatatttgaacgataaaaaactcctctagtcacatgtgaaagaactgacatcctgagcagtctctcagaaccacagatgcaatcaaattagaactcaggataaagaaactcatgcaaaaccacacagctacatggaaattgaacaacctgctcctgaaagattcctgggcaaataatgaaattaaggcagatatcaagaagttctatgaaaccaatgagaacaaagagacaatgtaccagaatctctgggacacagagattctgctaaagcagtggtaagagggaaatttatgcccactaaatgctattgaaact

SEQ ID NO: 615713 - DNA, 957 bp, Homo sapiens
  misc_feature (949)..(949): n is a, c, g, or t
  misc_feature (952)..(954): n is a, c, g, or t
tgggaggacaatggtgagaagagggaacctaagaattcctggactctgactgggcgtgagaaatggccggaagtagcttcgagtccgtcattcaagcagtagaggctctggagaaaaactggagcgcatctgcttaaagggccgcccagggtcaggatggaggggcaaagtccgagcagggggtttcctcccatattggatcacgatgaaaactgcacagaaagtccgtgctcagtttcttccatggttacagaacacaggccccagaccaggaaggcattctgctaaagaaggggacccgaaacctcagctaccagcgccgatggttcatcctccgaggaaacctcctcttctacctagaacactagaccgaccatgcacccctgggcctcatcctgttagagaactgccaggtggaaccacaccttaaggctgcagaaccctatgcctttaccatcctgacccctggggtggagggcacaggtgggcgggcctacaagctggctgcagaaacccaggaagagctggagacttggctgtgggcactggctggcgcgagctggaggcggctggctgggctgctgtcccccctccccccccaccaaaacccaatactgggagctgtgccaggcaactggccaagaacccatctcatccccagaggacagtggctttctagccactgtgagtaccccctccagcttccaggagttgcatgagcactttgggaaggagatccgggtgctgcacgtggtacaaagatggagcaggagctcaaccagtgtctgatgagtgactgagagatggacccaaagctaagaggtacctacttgccaagacagcagactgcttcaacagagacccaggtcctggctctgtccctccctccctcgtccttaccccatccccccctcatcaaataacaaggcagaaaacaggcccaggtacnacnnnaaa

SEQ ID NO: 615714 - DNA, 905 bp, Homo sapiens
caaggactgttgactacaatctaaggctgactgaccattggctacaaaagaggaagtagaaagtagttgaagacaggaagtgggaacatataattaatggagtacctagtgaggatctaggccggcttggcatattaatccgcagataagtaccctggtaagttctcatgaaacaagtagactcggataactttgatacacagacctaatttccaaaatggccacgtcttggttcctgtctttaatatctaaatacttactgaggtcctccatcttctatattatgaattttcatttattaagcaaatgtcatattaccttgcaaattcagaagagaagaacaccatatactgtgtccagagtataatgaacctgcagagttgtgcttcttactgctaattctgggagctttcacagtactgtcatcatttgtaaatggcaattctgcttttctgtttctgctccttctggagcagtgctactctgtaatatttcctgaggcttatccacctcagtcatatcttcacgaaatgtctgtgacctggcagggatctttgtcttaaaaatctattcaaattcgatgtcacaattagggagacagatagttactcatcttgggctcttgtgcaaatagcccttgtatgtatgtaccttcagagtattccacagtatgttctaacgcacaggaagttcctagaacgggggcccaacattcaggacttgaggatgttccttcggataccctcagaaagtcacacataaccgggcttggtggaccaggctgtagctccagctactggcaggtggggcggagaaccctctacaccagggttgcttcacttcacacaaactgcatctccatcgtcaaacatgttccaacaaatccagggccatggcacgagaca

SEQ ID NO: 615715 - DNA, 261 bp, Homo sapiens
  misc_feature (253)..(253): n is a, c, g, or t
  misc_feature (256)..(258): n is a, c, g, or t
tgggagtggttgatggtgagccaaaggcaagcattgttagtggagatggcagatcccatgcaaagatggagcaggagctcaaccagtgtctgatgagtgactgagagatggacccaaagctaagaggtacctacttgccaagacagcagactgcttcaacagagacccaggtcctggctctgtccctccctccctcgtccttaccccatccccccctcatcaaataacaaggcagaaaacaggcccaggtacnacnnnaaa

SEQ ID NO: 615716 - DNA, 147 bp, Homo sapiens
  misc_feature (104)..(104): n is a, c, g, or t
tggtcactttatataaaaatcatgatgtacaaaattgaagtgtgacatgacatatgaatctgtgactgaagtcccctcgagtgctctgggtgcacatgcgccgnccacacaactctggcatgaaacataaactaatgcaaccagtgc

SEQ ID NO: 615717 - DNA, 178 bp, Homo sapiens
ccctgcactctttgagaggatgtagctgccgtcactccagcagctgagtgccatactgtctgcaggtagtcatgcaggcaaagatgagactaacggtctcatgtgggagaaccctcttgcgggaggccgggtagcttgagctaacgggtccggctgcccttgcttgctttggtggcgt

SEQ ID NO: 615718 - DNA, 167 bp, Homo sapiens
  misc_feature (13)..(13): n is a, c, g, or t
atagagtaggccncaggcatcatacaagtttttgcacacaactagtgacatgggattcgcctctctgctgactttgcttttcttagtttttttatttttaaatcccagttgtgctttgatttaagtcttattcacttgctttgttagtaagtttagatttcaaactg

SEQ ID NO: 615719 - DNA, 657 bp, Homo sapiens
actctcgtggtatctatgggagatgcagcagcgaagcacagccaccagggagtggccatttggggttgggacagggagggtgtctttgggtggcatagaggttttgtattgagggccagtgatgatgttttgatatttatttcctgctacttaaatttgaatctgagtgaattgtacctatttctgatgatgtcggtcttgcaaagcgacagattcataaagtaatgatgaaatctttctttcttcccgtgtgtatttctaacgaaatagagccaactgattttgtatgtaaataccatagatcaactttaaccatcggtaacataaacgacctgcaccaccaagtagcagccgacctcttacccaagccgctcattcaccaccgttcctatttcctacctggtcactgcgaaaccttgtcttccactatgtgatccagccctggttcttggctgtggtcacgcagactgccagctgatacgggttattccgatgctgtgttaggcctcaatcttcatcttgtctctttcgtactccgttcatggcctttactgatttctagtgtatactcctgtagtctcatgattcgtgagatgattccaaggccatgaggtaataaaaagtatgttgtacatactgcattaactcgtcttgcaa

SEQ ID NO: 615720 - DNA, 666 bp, Homo sapiens
  misc_feature (325)..(325): n is a, c, g, or t
  misc_feature (428)..(428): n is a, c, g, or t
  misc_feature (570)..(570): n is a, c, g, or t
ttgtagtagttctattgctcaatcccacctatagtgagaatatgcggtgtttggtttttgttcttgcgatagtttactgagaatgatgatttccaatttcatccatgtccctacaaaggacatgaactcatcatttttatggctgcatagtattccacggtgtatatgtgccacattttcttaatccagtctatcattgttggacatttgggttggttccaagtctttgctatggtgaatagtgctgcaataaacatacgtgtgcatgtgtctttatagcagcatgatttacaatagaacaactacaaccgcggttgtagttgtnctattgccattttagaaagctctgatgtgaattcaaattttacctctgttacttaaagccaacaattttaaggcagtagttttactggccatttaagctcttngtacagtgtcaatttgtaaaaaagaaaaaacgaaaaaaaatctcaaataaaacatgagataacattttaagacttccaaatcagagaagtgcttcaaattattgggtgtggcttatttttaacatgtaaagcatatactgtngttagtattgcgtcattatcgcatgttgagtcgggccaatttctatatgccgggaaggcaggccaatcgcaggatcttattaagtgtactttgcat

SEQ ID NO: 615721 - DNA, 1225 bp, Homo sapiens
gtgttccagtgagcctgaatcagaaatgtcatcctcagtgcactgccagacttacctgtcctactcaccgatttgaagcattcaatatcactaagcatcttccataaaccaatgcaatggccatgcattccagtgagtggcacagacaatttcctgtctttcaatccctgcaactgcaggaggagctctgcccagtgtagcaagcacaggagcatcaaggcaggcattgttgcacccaggcagtgcaaggcctgcaagacaaggcttttccagcatttggcaatccccctgtggctgtactcatgcgctgccttccggagcagtggggccgcactcattatcaccaagttgggctgcatctcaatccgcaacagcaagcatctggctcttgctagcttggcgcaccacatgtgcagtcaaattggcacatcggtgtgcacaccactcgtcaattcccaatggccatcattctcgcacttgcatttcacagccacgtggctggcattccaaccacagccattttggctgcctcaccttgttggccagtgtcttgagcgcttggagccaatgcatacccaagcaggacactggtaaccaaatcacccaaattcgcactgggccacatctacttctacaccactcatttaccaaagaaacactttggaacatcccttaagcttcgtgcgtcggttcaattcgcttgtggggccaacccactcccatcttcacttttcggcgacatcttttcacaccgagtacaggggtatcaaattggccttccaaatctctggtgcaaacccgacattatgtgcgggcacttctgagcacccttcgaacagcccttcgtttgggagcaaaacgccaacacatgactctggagctttagtgtcccaaagaccgacaccccaatggggcgccatgaaatggaccagccaaacccttttccacagattcctttcaacacttggggctttctacttacaccaactcagggtttgtcagaccagtgctccttctttcgccaagtcaacaacaaatcgacagtgggtcacaagcgagaatatttacgcccttacacgttgtgggacacgattaaatgctcgtgacaatctcatgtctggggttcagcaccattggtggcttatcattatgatgaggcatcgctcatcacctagtgacacaatcggaggtcccaagaccacatgctagtctctaccatccaacc

SEQ ID NO: 615722 - DNA, 293 bp, Homo sapiens
agatccctcgagatgccggttgtcacggtggctcaccctgtgtaatcacattttgggaggccgaggtgggtagatcacgaggtcaggagttcaatgatcaacctggacaagcttgaacccgggaggcagagattgcagtgagccgagatcatgccactacactccagcctgggcgacagagtaagactccgtctcgggggcggggcaagcaaatgaaacaagatggacaaaaaaaaaaaaccgggtatgatcaggattagtggggctcgaccggtgatccacttggcctgggt

SEQ ID NO: 615723 - DNA, 620 bp, Homo sapiens
  misc_feature (4)..(4): n is a, c, g, or t
  misc_feature (53)..(53): n is a, c, g, or t
  misc_feature (133)..(134): n is a, c, g, or t
  misc_feature (201)..(201): n is a, c, g, or t
  misc_feature (226)..(226): n is a, c, g, or t
  misc_feature (235)..(235): n is a, c, g, or t
  misc_feature (237)..(237): n is a, c, g, or t
  misc_feature (243)..(243): n is a, c, g, or t
  misc_feature (267)..(268): n is a, c, g, or t
  misc_feature (279)..(279): n is a, c, g, or t
  misc_feature (382)..(382): n is a, c, g, or t
  misc_feature (524)..(524): n is a, c, g, or t
tttnggaaaactgctttcctctgagaaccttattctgaatgtcatcaactttnccaaaccttctaagtccagagctaacttagtactgtttaagttactattgactgaatttccttcatttctgtttagccanntgttaccaaggtaagctgggaatgaagtatccaacttctttcagagcattttaggacattatggcanctttagaaggctgtcttgtttctanccaagggananccagcncaggttttggatactagagaaagnnatttgcttgtnctattgccattttagaaagctctgatgtgaattcaaattttacctctgttacttaaagccaacaattttaaggcagtagttttactggccatttaagctcttngtacagtgtcaatttgtaaaaaagaaaaaacgaaaaaaaatctcaaataaaacatgagataacattttaagacttccaaatcagagaagtgcttcaaattattgggtgtggcttatttttaacatgtaaagcatatactgtngttagtattgcgtcattatcgcatgttgagtcgggccaatttctatatgccgggaaggcaggccaatcgcaggatcttattaagtgtactttgcat

SEQ ID NO: 615724 - DNA, 219 bp, Homo sapiens
cgactctagacggactccccggctcgccgacgcacactaccacggccacggactccccactgtggggtggggacggaccacgggttgactcctttccactctacactgtggttctacgacacaccctcactggacttccacggcaacgacacgcttacgcgctgtacctcctgggacacggggacactacttgcacgggtacccgacgctcgacacttc

SEQ ID NO: 615725 - DNA, 378 bp, Homo sapiens
  misc_feature (50)..(50): n is a, c, g, or t
  misc_feature (344)..(344): n is a, c, g, or t
gagctgcttaggaggctgaggcaggagaatcgcttgaaaccggaagtggnaggttgcagtgagccaagatcgtgccactgcacaccagcctgggtgaaagcaaaattctctctcaaaataataaatgaataaaataaataagtaaatgggcttttttttaaggtaagactttagaagtactttgctaataaatattcttacggagaagtttcatatagtgtcttccgctattttagaagtatgaagcttggaaaatatatcttgaaatttttgttatcagatcgatgaggtcctgagacagggaagacaaagctgaagccatgtccggccatattgatccagtntcttgatagccacttttatggcagctaagactcc

SEQ ID NO: 615726 - DNA, 141 bp, Homo sapiens
aatcgacatttttaatcctttagcaataaacgataatttaactatgctatactaaccccatggttggtcaatttcgtgccagccgccgcggtcacactctttacgccggcttctattgacttgggttaatcgttgtcgacg

SEQ ID NO: 615727 - DNA, 209 bp, Homo sapiens
taaattccccccccctgggccttgttttcccctaattccagggcagattccagggcccaaagctgggcagacatcccaggataacccaggcctgggggggggccccccggcctgctgggggggtttgacctggggggattggagggaaatgacctgccccccccccccccccaaagggtggggttaaaggactgttttttttcccctta

SEQ ID NO: 615728 - DNA, 329 bp, Homo sapiens
  misc_feature (49)..(49): n is a, c, g, or t
  misc_feature (69)..(69): n is a, c, g, or t
  misc_feature (97)..(97): n is a, c, g, or t
  misc_feature (222)..(222): n is a, c, g, or t
aaacggcagtatgctgatggttagcgtcacggtacggcggtgaaaacgngtcgatgagaagattctctnggctggtcgctgccgctctgttattggnagggtgtgcaggcgaaaaaggcattgtcgagaaagagggatatcagcttgatacccgacgccaggcgcaggcggcgtatccgcgcattaaagtgctggtgatccactacaccgcagatgattttnatagctcgctggcgacactgaccgataagcaggtcagctcgcattatctggtccctgcggtaccaccgcgatacaacggtaaaccgcgcatctggcaactggtgccg

SEQ ID NO: 615729 - DNA, 288 bp, Homo sapiens
  misc_feature (88)..(88): n is a, c, g, or t
  misc_feature (91)..(91): n is a, c, g, or t
  misc_feature (266)..(267): n is a, c, g, or t
cacctataggaccctaagacacacacacgcacacaaggctctaggtagacgagaagggacacacacacacacgcacacaaggcttcanggnagacgagaagggacacacacacacacgcacacaaggcttcaggggacacgaagaagggacacacagcaatgtgtgttcccatgtggcaccctggcacagaagctgggcgcacaccttggcaacaccctcccaacatctcccaccccgggaggctcatccccacccccagaagtgnntctgtctttgggggttaccga

SEQ ID NO: 615730 - DNA, 488 bp, Homo sapiens
  misc_feature (8)..(8): n is a, c, g, or t
  misc_feature (20)..(20): n is a, c, g, or t
  misc_feature (25)..(25): n is a, c, g, or t
  misc_feature (488)..(488): n is a, c, g, or t
catcgacncccattgcaatngatcntaatgagttggatgttctgtttagcgccaggggtgagcaagctgacgaaactgctggcggcgcgcgctagcagtgccacctgtgacgtgggtgctcgcgtgtaccccagcggtcaacagaaggatgacagcgactttcgcccacgctccctgcatagagaagtaggctaagccgaacatgacgccccagtgagccccgctgatgatatctatgatgacctcaggaacgcgcattgcgtacgccatgatcatagcagcggtgcacgaccagttcatcatcatgtcccatgctcatacggtgtccagtgatggcgccaggatagatggagcagttgcattcatgcacaaactcatggtgctgaggccagatgatcagctgaactgcaagcatcactccgtcgcagaggtcccacacgtagagagctgagcagagcgagtgtgacaccacccatgtcgattgcgtn

SEQ ID NO: 615731 - DNA, 359 bp, Homo sapiens
taccctggagcttcagtgccccaccggggctgcggagagtcccaggccctggcctgggaccgggagcggctgtcctgatgtgccaagtgttgctatgctctagtggtgtccctgctcccctgctgtgtgttgcctggctgcgctcaccctgtgatgctctctcatcctgctaaattgtgctttgtgtgggaacgaatgtaacattggcgtaaccccgttctctggccctggaacctggtggtggtttgcccatatgcctttcccctgttgaaacccctggcctggaccttttgggcacccccccctggcccgaatttaaaattttcccttttcccccacctttgggcccctttgggcgg

SEQ ID NO: 615732 - DNA, 869 bp, Homo sapiens
  misc_feature (97)..(97): n is a, c, g, or t
  misc_feature (111)..(112): n is a, c, g, or t
  misc_feature (129)..(129): n is a, c, g, or t
  misc_feature (133)..(134): n is a, c, g, or t
  misc_feature (137)..(137): n is a, c, g, or t
  misc_feature (147)..(147): n is a, c, g, or t
  misc_feature (393)..(393): n is a, c, g, or t
  misc_feature (407)..(407): n is a, c, g, or t
  misc_feature (468)..(469): n is a, c, g, or t
cctttttttttaaaaagttgccaaaaatgggcttttttattttggagggccttacttgtggtgcttgggcaacatgtctgcaaaagtcccacagctnccaggctgaaaggnnccattgttccgtgctcncccnngcngttaggacanttcagctcgctatgtgcttgtccaggcaggagggacaggagtgccaagtttctattagtgtaacatgattgatttaaaaacaaaacaaaacaaaacaaaaacaaaaaaaactgcttatgcactgtgaaaaaggctcagggacgaaccaggtcagatcccacttgtgcgcctaatctcaggtggtccacccgagaccccttgagcaccaaccctagtcccccgcgcggcccttattcgctccgacangatgaaagaaacantcatgaaccaggaaaactcgcaaactgcaggcacagtcgcattgtgggaaggactgtcgcnnagagaagaaggtggttcatagcaatcagtccacagcacatgacaagaaacttcagttctccttagagaagtgacggggtgaacaatatctctggtattcgaaagaaggcgaagtatgtttacaaagccaatggaaccagttgatccgacgtttaatcataccgctaacacgttcaaggcgatctcttggcatgctgaatcactttcaccattacaggccatgctgagacaaagcagctgacagaaatgctacccagcatcttaaaccagcttggtgcggatagtctgactagtttaaggagactggccgagctctgcccaaaccatctgtggatcgaaaagcaccacttgctactggacaggatgatgctgcatgaagttccagatcttgtggagaaatt

SEQ ID NO: 615733 - DNA, 202 bp, Homo sapiens
gagggagagtatgtggtagcaaatatatgctggatgctaaacaagggggtgtcgctctggagagagaaggctcagcggatggggacagtgtcaccttccatgtgcagggctggtacctgggagaggaatttgggctccgctttcacctgctccagcagggaacgaactgcatgctatttagcctacctgtaattgactgatg

SEQ ID NO: 615734 - DNA, 1551 bp, Homo sapiens
gctccaacccgccgctaccgcgccgctgtgggagatgaccccagtcaggagcccaagaggtcagctatcgtgtggtgctgcgaatgagccagctggctgccagcctcaggccagccctttccctgggcggtgaggaccccggtggctgtggcagggaagggaccctgaggttccatctgcgcttaatggatgacagttcgtagaggaaccctcgaagttgcgagctagaacaggtaggcttggccaaatccatggatagctgtatgctgcgtgcactagggctcagtgtgcgccagcggcgtgtgacaagtgccgtgaaccacactacgaaggtccggccgacacctgtgtatttctgtacttgtcaagcagacggtgtggagcccttacccgataatccctgcagtgactagctgtagccactaactaatcaggctttccccagtcgttgcttgccccctgaacggatcgcactagccgttcaaccaacaaaggcccttaagcacctggggttgaaacgtcgccttgggacctggctgggacaccggaaattgaggcattgacgatactttcaggtcactggaagaactcccggcctttaacgagggatcaaaggctgggaccgtaccgacgaacatgccttgctgccccaaccaatgcatacaatcaaacattgcttgcgaacatgcgcttgagacgtcaccgtggccccacaggagggacccccttgtgccacaaacaacacgggtataggtaaacttctggggaacttctgggcggcgatcaagactggcaactttgtgcagctcaggagttcccgagaggggatactacgaggcagcgggacttaaactattcacgagggcaggacaagttggcgagattcccctgagacagcgacccagagcaaaacacgacaaaggccgacgtccatggtacacccacatctgctgtgcgacccgtggttacaaggttaaggaaagttttcgcaagcggtgtgacacctcggctactttaattatgtcgagccgcaccatggatcaagagcgaaccacgtgtacacgtggataaggcacaccgcaatagaacttgtgcaacagggagatataacggacacacggcaagcagagggattgcacgaaggcgaagcattacaacccctcagaactataaaaagggcgtatggacacatggtgcgtacatacagacacgatacacgcgggagcaaccacatgcggagacaggcaccacgcgagccactagatgcgtgaatcaaaagaggaggagatgacacaccagcagacacagacggaacaaccacggtgagggtgcccacagaaggacacagaggacaagacgagagacacacggaggacattgacagccgaagcacaacgaccagcgtcgacgaccacgacaacccgactgacaacaccacagcagagaccacccgtcaaagcagtagatcatgaagagataaaccgtccagaggactaacaagtcacacacaacacggagaggaggcaacagacaccaccgagaatgcatgca

SEQ ID NO: 615735 - DNA, 1612 bp, Homo sapiens
  misc_feature (482)..(482): n is a, c, g, or t
  misc_feature (824)..(824): n is a, c, g, or t
tacggcaggtcacgcgctggcgccagcggcgacaggagccgagcgaccgggcaaaaatacacgggaggccgtcgtcgcgtaaaagagtccgcggatcctctctcggtaaagcgacactcatcgctccaccggcagccgtccccctccgctcgtgcggcgtccgcccgggcgtggagcgcgcctgaggccgcatcgctgacgtggcatatagtgaccggcggaggcgtggcgggacggaaggtggacgatgggcaatggacagcagtgctcttcgcctgccggggagctcgcgttgatagtgacccacagatttggctgtgcctacgttcttgcgaggcgtgtcgccttcattgagcatctcagcctggccccgtttgcctggcgagcgctgagggcggcgctcagggtatctctctgcttctatacccatcgtacggcgccccacgatgcgcgactcgtacggtgtttccacgtggctgganccctacttgggtggtaacgcacttgtgccccgggacgtctttgcctgcgcgtacgcatggggaccttgtcatgcttgttggcttcacacacatgggcatcgcacttggacactcacggcgcgtacccgcacggcacacttgcgccggagacctgtgccagccagcgggcagcgtccatgcccgatgcgaacggcgcaaacagggtccaccccacattgggggagcctggcccggcatgtcgcgcgggcccaaaacgggtggcccgtagcattgcctgtgggaagcgtatgcaattgcacctctgatatcccccttgtggactggccatcccatgcgcagctngtgtgcgcctaagacatttcacgtaacggggtatactaaggttcaagacaggtcggcagtcctaggtgaagaacacccgaatacgggttggctgtgccgtgcccggggcgccataaacgggggcatccccggttgacaggcgcccctgggggagacatagaataccatggcgcacggccacggaaagaggaacgggaagcggtacccagcggcccccaggcgttggccgcccttcacgggggaccgtccgtaacatcccgcggcggggaccacattaccggctcctacacacgcaacggcaaggcggcctagacacccggcggatcggccaggaccgaaggcgcctcacggcagaagggcaactaagcaaagccgcggtgggctaggcacatgagcatgggcaggtcccacgcggcggacccatgacgccacacgagtcgaaacgcccccacggaaaccccgccactccagggaagccttcttggcaacgtggcccacccaaaacgggccgggcagtaccaacaaaacggggttgtcccacccccggagattaccccacagcaacatccgggggtcgtataacaaaccccaaggggcccactcgagcagagggccaacacccaccacaccgcaggcacaccacaccaccagcgccacagcacgcaccccatggcactcctagctgcagcgtacaccccagctctgggccgagcaccacccccaacaaccacgacacgtgcaagacactagctcgagccgaacatctcacacaccctacgaacgcacag

SEQ ID NO: 615736 - DNA, 710 bp, Homo sapiens
  misc_feature (30)..(30): n is a, c, g, or t
  misc_feature (65)..(65): n is a, c, g, or t
  misc_feature (75)..(75): n is a, c, g, or t
  misc_feature (77)..(77): n is a, c, g, or t
  misc_feature (111)..(111): n is a, c, g, or t
  misc_feature (119)..(120): n is a, c, g, or t
  misc_feature (123)..(123): n is a, c, g, or t
  misc_feature (139)..(139): n is a, c, g, or t
  misc_feature (157)..(157): n is a, c, g, or t
  misc_feature (166)..(166): n is a, c, g, or t
  misc_feature (202)..(202): n is a, c, g, or t
  misc_feature (235)..(235): n is a, c, g, or t
  misc_feature (259)..(259): n is a, c, g, or t
  misc_feature (282)..(282): n is a, c, g, or t
  misc_feature (378)..(378): n is a, c, g, or t
  misc_feature (402)..(402): n is a, c, g, or t
  misc_feature (548)..(548): n is a, c, g, or t
  misc_feature (555)..(555): n is a, c, g, or t
  misc_feature (574)..(574): n is a, c, g, or t
  misc_feature (682)..(682): n is a, c, g, or t
gggggggctggttcgggggacggggtttantatgtcagtgaagaccctgcctctctctgttacangatgcctaangnggaatagtggtgcttcccgccccgctccctcttnttttgggnncancagtcttttctcaganccctcccttgccaaggcngcccttccnaaaacatgagagcttttgtttggggaaatttttttngctcccttttgctggagaggaaatgaattttanctaggtccccccgagaagcaacanagagtgttaaagaagccactganaaggtagtccaagatctggctttaggttttgttgccctggctttcttgtctttggacaagtgtccattcaccagttatcccgcctggccggaagcngatatctttctgtgtttttctggntccaactaacatttttccaatgtctgttgcatgccaggtactgagcaaaaaccttcttcctataaatttcatttaatgccattaaggccaagaaggtggcataaccaacttcctttttcagctgaggaaacaggagcacagtgaanaactaantggctgggatttgtcctangtcccctgaactccaagcacagtgctatctccactagaccaagctgccttgtctctgggctcaagagaagcctgcataggagctgaaggtcaagaggttgcaggcttntctcatatgcccatacttgggcctccct

SEQ ID NO: 615737 - DNA, 1373 bp, Homo sapiens
  misc_feature (116)..(116): n is a, c, g, or t
  misc_feature (181)..(181): n is a, c, g, or t
  misc_feature (1071)..(1071): n is a, c, g, or t
  misc_feature (1114)..(1114): n is a, c, g, or t
tcccaaggttcacggggttaataagggagtcgggagggaaaaacacccaggagttccccaggccatctccacattgtgtctcccgcggcatgtgtgtgacgatctccagccgtggncttttcttcgtggtctccttttcgtggacaagaggcgtggccaagcgaggcagcagccttcaagngggagtgtgggataggagcgtggggcgccttcgtggcacgcccttaatctcgagaaggatatgaactcgtggttgtgggtgaaaactctctcggctctcgagactctccttgtgtgtgtgtgggccagaacacaaaactcgagagttctccgagggagagtgaaagcccacctctcgcggcggagggggaaactcgcgggaactcttcgggtgcgaagccccccgagggaagtgggtgtgatatatagcgcgagtgccgagccgaagtctttttccgcgtctctcttttgtgaagagagaggcgctcttctctcgaagctgtgtgctcccaagttcgcaggggcctctcgcgggggaaactcggtgtggaggtttatgagaggggtctcccacgtggggggtggtttttccccctctctccacagcgcgcgcgcggcccccccagagggtgtgttcccccaccgggggtgtgtctctcccccacacaagaggccccacacgcagagtgttgtctaattgtgtcagagacacacacaccacgcggtgtgtgtgtctctccctgtgaccaaaaaagggggtggggctctccccatgtgaggagaggagaccaagaaagtgtctatctctccccaggaggagagcccggggagataaaaccctccttttctaaacccccaccaacgggggggcacattctctctataattgtcgtcttcgaggaggaagtatttggccgggagaaaaagaaacaacagcaggcaggggcgtgttaacctattttggaaccaacatttgtggtcgggccaacccattggttggtggctcccaaataatttagacggctgtgtggggttttcacccccgtgttagtaaagcccccccaccagaangagctttttttattcttctcctttggtgggtggtccacacccncacaaacagatggtgtggttgggttggacattcacacaggacaccctttcctgttagggcgccacgcaggggggtttacctacttccccccccccttatttaatttataaatgtctgtagggaacgactagtactctccaccagcgaaaaatactttactcaccacattttcctacggacgagatatattaaaaaagcggcccccccaagtggggtgtgtttttaaacacccccgctgtgtgggcgattttttaaatag

SEQ ID NO: 615738 - DNA, 610 bp, Homo sapiens
gccgcgccgtcgtcgcgccgccgcgtcgtcgccgcctccgccgcggaggaagacagcgccggccgtgcaccggcagcgacccccgccgcagtagtcccaccgtcattaggcctcgggccagcgggcaggagctgcctcgggcaggaggaaaggatagtcaggaatgaatgatcggagaggatgtggaagacgggttcggaggatggaagaaatgagaagatgcactgaaaagtacgcgtgtgataggatagtgtacgtagaaactggtgccgaggttgagtgaagtggatcaacatgaggagtgcaagttagctggtgctgaagaagataaaagtggttgcgtatagtggagctattagaagaagcgattgaaatggagattatgggagggcaattcatgagcgaaaacaagtactgtttccttgcagtttgtggacaatgatttcatgcgagtaggtgattagtgataggtgaatatggatggaagttgtgggagaattatgattgttcctggtaggggaaaacttagagttggaacgtttcataaaatagaggatattggaatgagaacataataatgttgagcgatattgggaagaagagtatcaaa

SEQ ID NO: 615739 - DNA, 190 bp, Homo sapiens
cgaagtgatatgaacacacacttctcaatagaaaaataagatatttatgcttccatttctttaggagcgttgagtgaccaagggtttggaaaagaggagatgagtgtctgctggagcttagccatctgtgtgcaccagtcgcttggtccacataatgcagctgtccagcgagtgcagctgtgagcgtaga

SEQ ID NO: 615740 - DNA, 247 bp, Homo sapiens
aaagggggggaaaaggggggcccccccccccccccccccccccccttgggggttttggggtttttttttttggggtccccaaaaacggggggcccccttttttctgggggggggggccctttggttaggggggttccgggggggcccctttttttttttaaaattacccccccgaattgtttttttgttttttttttgggggttttttttcccccccctttttttttttttttggggccccccccca

SEQ ID NO: 615741 - DNA, 148 bp, Homo sapiens
cttcagtgggagacacttctggatggtaatgcaatgtccatggaggcgagcaggactggtttctgttgctaccatgcaagctgttatttcagccaagagccccggaaattccacctgatgctcaaccacgcagagggctcctggggaa

SEQ ID NO: 615742 - DNA, 156 bp, Homo sapiens
cggcctacgcgtacaggatgcagtaggagaagtcgggcagcttcaggtcgggatccccctcctgcctatcaaggcctgtaccgcatgcctgggaggcaacgatgatcagtttcttcccccacctgtcaaaggcttccaccattgtacagcgaggct

SEQ ID NO: 615743 - DNA, 413 bp, Homo sapiens
  misc_feature (329)..(329): n is a, c, g, or t
ccatcctttacctgtagccctggagagaggaaaaggtatttacttatgggatgtagaaggcagaaaatattttgacttcctgagttcttacagtgctgtcaaccaagggcattgtcaccccaagattgtgaatgctctgaagagtcaagtggacaaattgaccttaacatctagagctttctataataacgtacttggtgaatatgaggagtatattactaaacttttcaactaccacaaagttcttcctatgaatacaggagtggaggctggagagactgcctgtaaactagctcgtaagtggggctataccgtgaagggcattcagnaatacaaagcaaagattgtttttgcagttggggacttctggggtaggacgttgtctgctatctccagttccacagacccaacca

SEQ ID NO: 615744 - DNA, 1047 bp, Homo sapiens
aattacattctcatcttctcttatcggtatgtgtccctcatgatgtactcctccctcttggtttgtttattccaagtgtgctggtgttctcccatgtggtcattctgttctatcagacccccctcatttcactgtgtgtatgacacgcctggtatggtccgccctcccctctgtggttgatatatgtctcccacaaacgtgtggggatcgcgccgcatccgcttctcgtgctatcgtctctttgctaattgaacctaactcaatccaatcctacgctgccgatttcaaggccctgtacggatgcctgccatcccttaattaccattgatggtgtccactgttgttcgcactttacgttcttcatcagatcaagtctttttgctcatcattccttccgtattccactctcactcctcttttttcccggcgtggcgcttttccttattgaaggcctatatcgagcacttggtggcgtgataggggttatcttactaccctgcccatatcgcatgtccatgatacgtcactcaataccacagggacaatgcacagttttgtagtgtgtatctcaatgctcgtcgtgatcagatgcgtatgcccgggcccctcttattggtgatggctcctcctttccagccgctggcaggcttattgatgaccctgttccccctgtctcagccctgtcctcacacatactgccgttatccccattctactcccctgactatgcaacgttgcccctagtggcttgtcccctaaccccgtgcagcaacaaaagctcaagtctggcgggcaccgagacgtaatctgatagaatagcttagaagtcagcgtcttccattcgcgacgtaaaagacccccattcttccttatgcgggtaatgatgtggatagctggtctcagcgcctggaccccaccaactgaggagaggaggcttagaacaggtgagccccatccattactcaatggggcccttcactcggcctggagaaggccattttacacacacacaaaacatacacacacacacacacacacatatcacaa

SEQ ID NO: 615745 - DNA, 330 bp, Homo sapiens
gttatgaggatcatcaacgagcctacggcagctgctattgcttatggcttggataagagggagggggagaagaacatcctggtgtttgaccttggttgccgaaccctcgattgttgcttttcttaacatttacaatgtggtcttcggaggtgtgtgccactctattgagagactctatctctggtgtgagagagactctttaaccagcgtgtctatatgcacactcttatctcactctacacaaagaaggacgcgcacagatgtcacaggagacactagagctgctgcagagactctccgcgcgatagagaagagcacacgcgcctctct

SEQ ID NO: 615746 - DNA, 507 bp, Homo sapiens
ggtaccccgaacctgcatgctggttttcccggtacagccatggcgagtccactacgatcgacccggaccgtggcttgccgattgcgccgtcgaaaacattatcatggctttaccgccgctgaggttcgacccggtcggccctttacaccgtgtactccggccaccagatttccctggaagtgctggagcgctgcgaaaccttctgccgcaagatccgcgcaagcgtcttggggacaagtgcgacctgctgttaggcacccacccggcaaatagtgccgtcgtcggcgatccgcctgtgccaagcgcctggagaaatacgacccgctgtggttcgttatccccggaacaccgggcccaggaagaggccatggccccaggtcggcggccaagaaccagcatccccatcgccaccggagaagcgggcttgaccaccaagtacgagttcttcaagctcctgcaggccgggcggtgcgtcgatccttgcaatgaacgttgcccgttgtggcg

SEQ ID NO: 615747 - DNA, 892 bp, Homo sapiens
  misc_feature (616)..(616): n is a, c, g, or t
  misc_feature (693)..(693): n is a, c, g, or t
cgcccctttttttttgggggttctataacccgagggcacacccaccgcgggggggagctcctcttaaggctcctctaatagggcgcctcttttccccccccggggtggggttcccccccgcgcgcttcgttggtgttagtaccaacctcgcggctttttgtcgcacccccctttttgcccccgcctcttgttgtagggcccgcggagttttctcttttgcgtcgggccccacaccccgagtgcgcggtgtgtagatcccccccccgctatgtagtggcggccccgaggaagaccccccctgtgtgtcttcctcgcgggggagattttcctcccccctcttggtgaatcacgtctccccgcgcagcaccaaattgtttgtctcctctgcttgcggcgcacccgggtggggccccacctaggggtgagtgagcccttctctttgtggctggccccccccccctgaaagttgggcccccccccctagtggggacagtgttgttctccgcggggcgcgcttttcccctccttggcgcgacgctttggtttgtctctcgcccaagactcttgtggcgcacgcgcgggacacaccgcgccgctgtggggagacaccttctcnctcctctggggtgtggcgcacccagagaattgtcttgttgtgaaccgctgtgcgacacacgaagaggatgtctcctngctgtgggacccccctctgcttctccgcgttgtaacccgcgggggggcccccgccgcgcttcatgcgagccccacgccgaaagaccgcggccccctcctcgggggggcgttttatttttcgccccgggccccttttccccccccttccccttttccggggttttttttcccccccccccaaaaaagtcctttttcccga

SEQ ID NO: 615748 - DNA, 688 bp, Homo sapiens
attggggtgatgggtggccgctgctaggtttggaggtgcgtgggtagtgggtcgcttcggtgtggtgggaacgtgggtctgtgggggtttgtaggagtgtcgtttgtgttgtgggcgcttggtgtggtggtggtactgtgttgtgtcggtgggaaaaggtggggcaggtggcctctccggcgtgtcacttagggtggtgtggtggagtccccctggcgaccgaggggtggcgggcacggccggatgtgggagggggtggcggtgtggttctccgcaagtcctgctgtggtataacgattagactcggaattgtgtgtgtgagtctaagtttcgtaaggcgaagacgatggagcagggagggtatagagttgatctacttacaggtcgttttttaagtccacttgtggtcgcgaccatcttctactgatgtataatcacgcttactggtattgctctctatcactcttatgctatgactgtgtctgacttcttgtgatagtcgtctggccgtcgtgggacaatatgggcaagctaccagtattgtagttggggcctggtagtcttggccctcgtgagaatgttgatgtgggcaggaggggtaccctgtcaagaacgttttatatattctccccaaccccccccttttattagggaaaaaaaatgttgaaaaaagaaaaccaaatataaa

SEQ ID NO: 615749 - DNA, 401 bp, Homo sapiens
  misc_feature (129)..(129): n is a, c, g, or t
  misc_feature (167)..(170): n is a, c, g, or t
  misc_feature (191)..(191): n is a, c, g, or t
gcaggtcagtttcctcaagggtaaacagttgtagactggactatattggaagattcttccaggtttggaattttgtggtacatatggagtattcacttttaaataaaaacgtacacccccccacccccnaaacacacacacacacacacaatgaaaactagcaggtnnnnaaatattctagcttattttanacttcatttgtcctgggaggctgaggcgggcgttaccagttgaggccaggagttcgagaccagcctggccaacatggtgaaaccccgcctttactaaaaatacaaaagttagtccgggcgcagtgtctcatgcctgtaaccccagcattttgggagtccaaggcgggtggatgacttgaggtcaggagttcaagaccagcctggccaaca

SEQ ID NO: 615750 - DNA, 106 bp, Homo sapiens
aaaacaccgtctatgtagctagaatagtgggaagattaataggtagaggcgaccaacctaccgagcctgttgatatctgtttgtcctgtataaaatcttagtttga

SEQ ID NO: 615751 - DNA, 383 bp, Homo sapiens
atatctacatacttagaaacgatgaatactgaaataatagggggtacatcaaaacacgttagtccaggggcagttgctcagacctgtgagcccagcacttttggaggccaaggcaggcagatcacttgagtctaagagatccagaccatcctgcccaagagggtgaaaccccatctctactaaaaatacaaaaattagctgggtgtgatggcgggaacctgtaatcccagctacttgggaggctgaggcagggagaattgcttgaacctgggaagcggagggggcagggagccgaaacgtgccattgcacttcagcctgggggacagagcgagactccatctcagaaacaaaaaacaaaccttgagtgatgatggacttgaat

SEQ ID NO: 615752 - DNA, 150 bp, Homo sapiens
cagagtccaaacagtgcccagagtccaaacagtgcccagagtccaaacagtgcccagagtccaaacagtgcccagagtccaaacagtgccatttaatccccaccctgggctctgggagcagcccgctgagtggactggagtggagcattg

SEQ ID NO: 615753 - DNA, 1448 bp, Homo sapiens
  misc_feature (894)..(894): n is a, c, g, or t
  misc_feature (1447)..(1447): n is a, c, g, or t
ggctcatagtgcccaggagttcttcgaacccgggtccggcggatttgttcctcgggagtgcggtgaaggcggtgcaccctgacgcgtgagtccttttattgactcggcccgcgtgccccatcactccagggtggatcctggctgcgcgtacatgcggccaagaattgaactgctgaggattcggtgagaggatctctgagcaggagtgcagtagacattgacgtgacacgcgtgaaagtatacccatatgtacacagtgtgctgtggctctgtgaacatagggagtggcaaatgggaggacattatcttggtgctatctagatgtagcatatggaggagacatgatgcgctggtgcatgggatcgagggataccatggatagatgtgactgattgtgtcagcgtaacaacgcacagaggtcaaccatgatggaccacatttatggagtacagcttatactggtcatgatggagacttttgtaagctagcctcacgggtacagtgtaaactgtaggcctaggaccaatgtggcgggaggtggtctcgatctagcgcgctctggggacgcaccgactggcagtttgtcattggacatcgtgggatgactggtggtcaactccacaacgtgtgtcccactcataacgatggtgctaccgcgcacgtcctcctagagagccaagcctgtcgttcgtgagaacctggctgggaccggtgaactgtaccagatatactcgtaatttgtaaagaatctctaatagtagatggggaatggattagcctcgtttttgaaccgggctacggagcgaacgcgtgggaaaattacaggtagctggcggaagacttcacaaggatcaaactgctagtgggatattgatatacggcacatggagactntgtgagaagattggagaatgtgtccaagcggggcggattgcgttccatataagtgctgtgaaagaaaaaaaagtaatcaatgggtttgctctcagcaattgagccataggggtaaatgaacgcgaattggtggaaattagagaacgagggaccagggttgatgtaatgaagtggcggtttacacaatggatattatatctgagggagttagtggaacctttaggagcgagtcacacaaaaacaaagcacttaacgccatcacacaacaaacactgacggccattaagcgaaccccactgaccaacatccacgacccaagcacaactccagtaacacgacgagagcaacaacagacaacacgaagagcccgaagaagcgcaacaagagaccgtctgggcacagaatggaggaacaggagccaccagaggaacaatatgatagaccacacaacagcactccacacaaatcgaagaacaggaggaccccaccatcaagcaacacaatgtactaatcaacctcggcccgacgacttataaatgatcgatattaaggnc

SEQ ID NO: 615754 - DNA, 250 bp, Homo sapiens
  misc_feature (43)..(43): n is a, c, g, or t
gctcgacactgctattcagaatatataaaagaggctgggcacngtggctcatacctataatcccagtactttgggaggccaaggtgggtggatcacttgagtccaggagttctagatcagtctgagcaacggcgcgaaactccgtctctacaaaaattaaaaaattagccaggtgtggtggtgtgcacctgtaatcccagctacttgggaggctgagacacaagaatcacctaaatgtgggaggtcgacg

SEQ ID NO: 615755 - DNA, 155 bp, Homo sapiens
gcagatatgacaaaaattatgcaataaaacggttcaggtgtatatccatatgtgcttccctatccctattaggaaagtacactgtccgcccaagagacaggatggacggacttcttccagacgctacatacaagcgcaagcccactggaatcacc

SEQ ID NO: 615756 - DNA, 233 bp, Homo sapiens
ccgcatcggagcacatcgcgtagtgcaggacacacggggcgtgggacggtgtctgtgtgagagcagcatctgtgtgtatgcagtgttatctaaggacacacccacagacacggacacgtccttacgcagagaacagccgctgcctcttagtgttcaggatgatacgtttttccttaatatcatccttcgctttgcacatcatactgaatacgtgtgtatgtgacttttactgc

SEQ ID NO: 615757 - DNA, 1004 bp, Homo sapiens
ctctactaaaaaaaaaaaaaaaaaaaaaattagccgggcattggtgggcaggcacctgtaatcccagctacccaagaaggctgaggcgggagaaatcacttgaatgtggaggcagaggttgccgtgtgtggggaaaagcaagaagagatcaaatgggccctgtgtctgtgtacaaaagaagtagacatggtgagactccatttggttctgtactaagaaaaattcttctgccttgagatgctgtagaccttaccccaaacccatgctctctgaaacatgcgctgtgtcaaactcagggttacactggatcaagggcggtgcacagatgtgcttggttaaacagatgcttgaaggcagcatgccccttaaagagtcatcaccatctccctaatctcaagtaacccagggacacaaacactgcggaaggccgcagggacctctgcctaggaaagccaggtatgggccaaggtttctccccatgttgacagtctgaaattatggcctcgtgggaagggcaaagacctgaccgtcccccagcccgacacccgtaaagggtctgtgctgaggaggattagtaaaagaggaaggaatgcctcttgccagtggcaacaacgaggaaggcatctggtctcctgcccgaccctgggcaatggaatgtctcggaataaaacctgattgtacgtaccatctacctcgcgactacgggaacaaacgcgccttaagacgctgaaggttggcacccctgcgctgcagccaaacgtcgtgcctatggtacacgcctttcacaatggcttaaatggtagtaaggcagatattaaagagagggcaacccaggacccatataaactcacctttaacccatggatactatagcatgcgaaacacccctatagggtaccacggaatgatatggacatagcaaggacaccctactacccccaacatactataggacctatagtagaaccccttacatcaacaatcccccccttctcagaggaaca

SEQ ID NO: 615758 - DNA, 308 bp, Homo sapiens
ctccaaatggaatccatctttcagtatgcttgtcggctgtttatctttggagaaatgtgtgttcaattcctttgcccattttcaaattgggttatatgcttatttttagagttgtaaaagttctttatatattgtggataatatacctttatcacataaatgatttgcaactattttctcctataagttgtcttttcactttctaggtaatatcctttgatgtgcaaaagttttttatttttatgagttccaatttatctatttttgtggttgttgctcatgcttttggtgtcacatgtaataatctg

SEQ ID NO: 615759 - DNA, 341 bp, Homo sapiens
agaaatttgaaccctcatacactgcttatgaggataaattatatctcagtaagatggagctgctttggaaagcaatctggcagttcctcaaaaagttaaatatagagttaccatatgacccaacagttccacttctaggtacatacccaagacagagaataacatacatccacacaaaaacttgttaatgaatgttcatagcagcattacttataatagccaaaaagtggaaataatccaaatatccatcaatttgtgaatgaatacataaaatgtgtttacataatgggaaaattattttccaatggaaaaggaagtggaactaattacaaggctacaac

SEQ ID NO: 615760 - DNA, 206 bp, Homo sapiens
cccactctcctctattccgaactgtctgacgtcctgtgcctgtcttgtccttaatttttaatatttttctatttggctttatttttctcttttcctcacttttgtattttatttatttttttttattaaaaaaaaaaacaagggggggcagcaaaaaaaaacccctatggaaaccctttttttttatcagcggggcgggcaacaca

SEQ ID NO: 615761 - DNA, 437 bp, Homo sapiens
ggtatatacattcttggccggcggttccgcagcctggattattcctggttgcagctcacctccttcctttacagtttttgtcaacagagccggcggcagggtatcatccaacggaaccgcacggagcgcctttccgaccttttggactggaaaaacctaggccgggtaggaccccccctttcctatcctttcctggcaaatcaacaggtcctggctaagggtttttggtgcagggggcagggtctcatcctacttggaacaggtgctgtccctttaaacaatgaaccaggccggtcgcgatggtgggtcatggttgtaatcccagccctttgggaggcctaacaggaaggattgcatgagctcaggagttaaaagaccagcctgggccacctttttttttttctaaaaataaaaaaaaatcagccgagaaaaaaaaa

SEQ ID NO: 615762 - DNA, 193 bp, Homo sapiens
ctagaggatcctgagcagctcgtgatctctcaaaccccagcacttctacaaaccacaactcctttccatcctaagcatggttagctcggtcagaattcttacacaagagccaggaccacaccctgtagcctttctgtccaaacaactagaccttactggttttagccctagccctacatgtctagcgtgcgag

SEQ ID NO: 615763 - DNA, 399 bp, Homo sapiens
tccggttcaaaagaacaacgagaggcagaaacgaagacattccactcgcgcgggcgagccggtagacatcacacagtacacactggccccatcgcccccactcgggcggggccccccaaagaagcgcctcggcccaggatagacgcagcgcaaaaggttgccgcacaagcatgctatacaaaaagagtggtcgcatgcccgcccctgcatggtgggaagaaacagaaccgcccctgcaataacatacagaggcggcatgcaaccgcggggtcgccgacacgccccgccggccttgtggagagcggaatgatggtttcaacgccaccagtgctcgcacgaaccacccaaccgcgggccgatggcgcctcaggaaaaaccaacgccccccccacaaataca

SEQ ID NO: 615764 - DNA, 672 bp, Homo sapiens
ttttggtgctgattgcttatcccagacatcaccaccatagccagccaatttaccagacttgactgcctcggcaacatcttctgcgacacaaatagcacctctagcggtattcaccaagtatgcaccatctttcatgtgggaaataagctttttattgaataaaccccttgagtccttgtgcaatggacagttgatggtaacaacatctgactgagcaaccatatcctccaatttctctactctctgaacaatatcacctctgccattgaaaagcttgctggcctcgttcaatctattgattgcttccgcaggtagttcctggtagtcgtagtacagtaacttcttcggattaaatgcgaccaatctttccagaaccctatatccaattctaccggcacctaccgttgaaattattttgtcttccagatcatactcattttttagccacgccggcaatatcccactcaccattaattgcttattgatgaccaccattatagtttcttatcaaaaccaaaattgtggccataacgtgctctgcgacagaaacgacgttagaaccagtaacttcggtgaccgtgattttccgttcatttgcagcttctaaatcgacatggtctgaaccgacgccagcggttacacagagcttcaggttaggagcttctgcaatcc

SEQ ID NO: 615765 - DNA, 183 bp, Homo sapiens
atacctgcgtgtactgcacatgtgtcccagtgcttaaagtataattaaaaaaaaaaaaagttctggtgcattatatgtaaatcttatcccaggtaaaaaagaaacagtaggatgtgagaaaaataaaggtttctactggaaatatggatggggggaagtaatagggatgtctggggattgggt

SEQ ID NO: 615766 - DNA, 251 bp, Homo sapiens
cagtcactttcctcctgcccacgatttgtccctgatgctgtcagaagatcccagctgatcacggccctttctctgcggtcagagggagaatacaggcgcagctctgcaggtccagctgttgcaggtgggatgcttatattcccacaggaacaaaggtctccatgatgatacggggtctctcatagtcatatcgatagcctgatggcccttggcataattgctggtgtcggggtagaagatgtcttggagtt

SEQ ID NO: 615767 - DNA, 937 bp, Homo sapiens
  misc_feature (201)..(201): n is a, c, g, or t
  misc_feature (210)..(210): n is a, c, g, or t
  misc_feature (268)..(268): n is a, c, g, or t
  misc_feature (286)..(286): n is a, c, g, or t
  misc_feature (291)..(291): n is a, c, g, or t
  misc_feature (298)..(298): n is a, c, g, or t
  misc_feature (305)..(305): n is a, c, g, or t
  misc_feature (308)..(308): n is a, c, g, or t
  misc_feature (315)..(315): n is a, c, g, or t
  misc_feature (317)..(317): n is a, c, g, or t
  misc_feature (334)..(334): n is a, c, g, or t
  misc_feature (336)..(336): n is a, c, g, or t
  misc_feature (345)..(345): n is a, c, g, or t
  misc_feature (937)..(937): n is a, c, g, or t
gtgccagtgtgtcccggacgcatcactaaggaagagagagtttatttagtcaactggcccaaggcagcgaggcttctacagtcccacaccccatagccgcctgggctggggcttactgggggctgaaggttctggacatgaacaagggtcaggtagaagagaaaggcttcccctacaccccagcctcctgctgtcccctgnagcccaggnctgcgttgtatgctttccatccactcaccttaccccatagcatcttgcggcccagaanccagagccatttgtctcngaccntaaatcnataatcncanaccccanancgggagagagcagtganancatgcaggnctgtggacgggggaagggttgtggcgggtgttctgaggctgagaggacacctatatgcgtatttcctctacacacatcaccccccttctataatcttaagccatgactagcctggtggcgtgttagtttctgcccagttctaccccctcatgtgcttcttctgaatactgaatgtgactgtttgaaagctggtagaattcatccctcttactgtagataacactgcaaatcttggaattttgttttttgctgtttccagatgtatctataaatatctatacattatatgtgtgtgtgtgtgtgtgtgtgtgtgtgtgtgtgtgtacatcgggtcctcccatgtgtggtgttcttctggaggttgtctctttggtcaaggtgaacttttaatgtttattattttcttctccgcacaaagtaaagagcctaattttgtgtattctggtggctgctgtcatgagatgataaaatgtaaaacaaaactctagtcaacgtagaaagagttaactgtgctgaaaaactaataaagaacctaagaagaaaaaatcaccctacactctccacactactttacaattcactgggccgcgtn

SEQ ID NO: 615768 - DNA, 118 bp, Homo sapiens
gttaagtcatttccattttaacgttatgaacaaagctatccagtgcacaggagcccagatggccgacataggaactgtgagataataaaatttttttattatattttttttatttttt

SEQ ID NO: 615769 - DNA, 114 bp, Homo sapiens
ctcttgcttgggacggcggcatggtgctctcagaaccactctgtggcagagagcctgtctgtgagggtgtatcacagtgcagggtcattcagaagacttgaggcaggctgatgt

SEQ ID NO: 615770 - DNA, 255 bp, Homo sapiens
tgacgaaccgagctcgtacccctttctagcgtctacgacgtaggacagacggcacagagcattcccagactattgatggtagtatgcatattatatatgctttaacactatataagtctggattctttcagaagcatgtgagataagcccaattcaaacttttagacaaaaataaagaaattttatttcttacaaattgggaagttcaaagggtaaccttctttgagcacaggtggacgtcatcgaagaaccaat

SEQ ID NO: 615771 - DNA, 127 bp, Homo sapiens
gcactaaactgttacctcaacccaatccgcctggaccgaacttttcattcaccgacatcatactatagtccgataagagattttgtatagccttccccatcaattattgttcatttaagcccaccca

SEQ ID NO: 615772 - DNA, 1495 bp, Homo sapiens
gggggaacaaacaaaaaaacaaaaaaaaaaaaaaaacaacattggtcggcgcgcgcgcccgcgggcccccgaagaaagtatttttaaaaccacactcagtggggaggcgcggggcgcccaagtaagaaagaggagaaacatggcggctcgaatacagctgggtgtagcacatagagagaaagaacacgtgcgcggcgagcgagaaagaccgggcgtggggatggtcttcaccacaatatacaacaaaaacgcgccggggcggggaaaacccagagacgcggttccgtagaacagaacatctccagagagtggagagagatacttggaggggagcgaactacaggggagggaggagttatctaaaccagagggaggggtagcaaaccgagagagagcgccgcgagatatagtatcaaaatatataaagagcgcccccggcaccgggggggttgggtggaaaagaaacagcaaaagcgaaaaagacgaaaagcaaaaagaaaagaacaaagcaacagagaagcacaaaaacaaggggagaggagagaggggaaaaagcggaagagagagggaagaagggagcagagagggggagagggaagggagaagagaggagaggggaagagacagagggaggaagacggaaggaggaacggggagaaggagaggaaaaagaaggaagagagagaagggacaggagagagaggaagaaaagagcaagagcggaggaggagaagaaagagagacaagagacgagaagagcgagaagaggacgaggaagagaaacaaaagagaagggaaggaaaaaaagcaaggacagacaaaggaaggaaggaagcgacagacaaaggaaaaggagaggaggagagaagagcaaaagagaaaggcaaagaacaaggaagagagaaggaaagaaagaagaaaacaagcaaagcagggcaagacagaagaccgaagaagaggaagaaaagagagagagagaggcgaagacggagagagaacagaaaagacaggaagaaacaagagaaagagaggagagagaaaccggagacaaggaagagagaagggagagaagacagagagaaggaaagaggagagcaaggagagaagaagacggaagagagagagaaaagcagaagaggagggaagaaagaacgaacagaagaaagagcaaaggaggaaggaagcaaacaaggaaagagggagcaaagagaagaagagggagcaagaggagaaggcacggaaggagaagagaaggaggaaaggggaagggagcaggagagagggagaccagcaaaggcgaagggaagaagaacacgagcagggagagaggcagggagcaggaaaagagagaggagaagagaagagagggaagggaagaagatagggaaaagcagggaacagagagagaggagaagggagcggagaaggagagagagaaggaaatagaagagaagagagagggagagacgagagaagagaaggacgcgacagggag

SEQ ID NO: 615773 - DNA, 414 bp, Homo sapiens
aacactcatcatttccccacctgccctcgctgtggcgacacacaccgtgctgagcgctttctcctggctccgtaacgaggtgctccgtgcggaggcatcattcctctttccgtctcagccagccctgtgctggccgcctaccctcatgaacgggcgtctttgtgctggcaggcgctcttgttgccccccagatctccctgtgccctgtgaggttggcctctgtggaccgccatctgacgcccctgatctctcccagatggtgggacgacgtgggggggctgtaacatccctttctgcagctccatcagtgccaagctcagccccccggttggctctctgggagtatgcgctccttcgtggctccggcgtcctgtcgctcctggatgtacagtggctcccgatagggtcaggcct

SEQ ID NO: 615774 - DNA, 712 bp, Homo sapiens
  misc_feature (182)..(182): n is a, c, g, or t
ttctctcccattacacataggttgtctcagcatgcaagagtttttcctttaaaaaaaaaaaaaaaaaaaaaaaaaaaagaaggttttttttaaaataaagagggggggagtattttatcccaagatgttttatcttttttgttaagaaataaagttataattttttttaaattttggagagngaggggatcaactccatgttcccaattggtctattgtgtctatggtggtgtatggtggccatacattatgtttcccctttgaaagaccgcgcttgtgccaagttctgcgtgggagggagcactcatgttgtggacgaggcaggggccattgtgaccctgcagggctgggggtcgtatatacgtggcacgcttgggagggtgggaactctattctcacacttttctagtgggagccttccggagtcccagggtttccacttggagggcctggtcctggtgctgggatgggcgggtttcaagacctccaataaaaatccctacccaggaattctggtactcgcgggggggcgttctctctgggttataaaccctttttaccagggtgacaacttcggataccaccctgtgggttgccatcctcgcgtggcggtaaacatcctggacgtacctcaccggcagaaatctggactgtcggcaatcccttgcccggactaccgtggcggctccacgctacacacaacaaacaaaag

SEQ ID NO: 615775 - DNA, 186 bp, Homo sapiens
gtgacaaggccccttccctgcaaacatggggttggctgggccagaaggttgcgatgaagaaaagcgggccagtctggattcggcaagaaggaatttacttcgactgttacctttgggatttctccagctctagacaacctcaaagactgtttttcctgtctgtttgcctaagtgagtagttgctcc

SEQ ID NO: 615776 - DNA, 1474 bp, Homo sapiens
ggtgtcgagcagcggacgcgggtctctgtgccgcaggatgcggggcctggtgtaaaggttgttgacaataaggcctactttaatagataccaatgtgacacattgaaaacgacgacggacgagggtaaacaactgcttgtagtgtatgctcgcgaaacggcattgcgttgactacatacgattaagaagataaattagctaacctatcacgccgaagagtacaggactgcaatagttccggtgttgaccaaacaagagcatactcaattgtgtcagatctgggtgtatgcccagtatacgacgcggggactatgattagtcttgctcagcggtattgccacgacggaaaacctcgactagatagctatagcgtgttggacacggtctgggacctagaaacatattgatcgctcgcaggtatatctgtacatcggcctcgcctgctgtggcacctggtagcgcttctccaatgactgcttttgtgcccaatggggaccatatgcatccttaatcgtagacgtgggccaatagcttgcgaagggtgcagttgagatgaaatgaacactaccagacggttgggccgacatcccaatacgaagtgggtctcgcgcccaagggtggctgggttcccccacgtcgtcgtaatatgtatgtaatgggaccgtgtgcgtatgaaaccagggataggccatgaggccagttaggtaacccatttaggacgcttctaaaggggcgatcgctccattgcaaaaaagggccggctggatggcgagttgccacaagactcatggggctgacttccagaattaaaaccacgataaggcatttaccacgatatctaacgcatcgagtttgaggtgaagaacgctaacaccaagggcaaaggcggatagagcactaagagtgggctggaacaacccttggtcacaagtcgtgtgaggaacaacaaaggagtattaaccttgtgggggcaatccacaccctaggtatggcatcgatatattgcccacttcgaaggcggtagctttctatcttcgggacattcaaccgacctaaaaggcaacctagcgtgtagaaattgggatagacaacgattgggtacaaaaagacccccgaagtaacgaaggcaccccttgtcgccttgacccttcttggggagcctggactcggccaggggagaattggtcatcaaagaaagacgccttgccatgtattatttggcttttaaggaggtgacccaacggcatttggaaggcttgaagtggcccattgacatccaacgtttagggaagtgaccaagggttgaaacccgacccaaggacaatgttcagggtatgcaacttcccaggatcgaatttcgactaatgcgcaccaagaactcggagactgacattcgttagacatcacgcctacgcaggtggtagggaaccactttgaaggggcgtggcttacattctatgtttagaagatacta

SEQ ID NO: 615777 - DNA, 206 bp, Homo sapiens
cccccagttttttttttttaaaaaatagggcccgggcccgcgggttcatgaggtcaggaaattgagcccttcctggctggcccggtgaacccccccattcaatggggcggtcaatccagtatttttaaggcccccggtcagctgttttttcccccttcgagggttgtgattaatttaaaatcaaaataaaggaattactgggttta

SEQ ID NO: 615778 - DNA, 106 bp, Homo sapiens
ggaaggaacgagagtctgtgaagaggcgcggaagaaactgggcccagatccccgcagcagcagtacaaagttttttgcctccagagcttcgagttagagcactaaa

SEQ ID NO: 615779 - DNA, 245 bp, Homo sapiens
agaagacgaggcatccttcctctcgtacgcagtgttgatggacgcaggcaggcccgtgcagaactggccaatgggcattgtggtatccatccatcacgttggttattgcctcacccgccagtaaccagcgtctccttgtaagatcaaaccatcgtcccactcggcagcatggcgcacgggtgtcagaagttccctgtctacagatgttgcggcccaaaaggtggtcctcgggttgggtaccgagg

SEQ ID NO: 615780 - DNA, 275 bp, Homo sapiens
ctcacactgcgcccggcggagcaccgaagttggcagtgtctcttagcagctgcgctggagacgaacggtgagcctgcatcattgcaggaacatgatgtgtaaatatgatcttttaggattacgagtgcagatggaagagcccctaggctcctccatgagagaacattcatctccccctatagaaagacatcaagggaccctacgtttccatccacagctctggcttccgggactatatggtgaagccggagctcctgcgggcgcactccgtgagg

SEQ ID NO: 615781 - DNA, 453 bp, Homo sapiens
atttaaaaaaaaaagaaaaaaaaatcctaaatattttctttaaaaaaaaatcccttgccaggcatggttgctcacacgtgtaatcccaacactttgggaggccaaggtgggaggatcgcttggcccaggagtttgagaccaggctgggtaacatagtaagatcctgtctctacaaaaaataaatgaaattagccaggcatggtggcacacacctcagtcccagctacttgaaagattgaggtgggaggatcacttgagcctgggatatggaggctgcagtgggccaagatcctactccagcctaggtgacagagtgagatcctatctcaaaaaaaagaagaaaaaaatcctgcagggcacagtgactcacacctgtaatctcagcactggatcacttgaggccaggagtttgagaccagcctgagcaacatagcaaaaccctgtttctactga

SEQ ID NO: 615782 - DNA, 1005 bp, Homo sapiens
  misc_feature (56)..(56): n is a, c, g, or t
  misc_feature (549)..(549): n is a, c, g, or t
  misc_feature (626)..(626): n is a, c, g, or t
gtgcgcaactacaaatataaactaatcttataataaaccaaataacaaacaaagcnagaaataagtagtatgtgtcgacagtctggctgtgcccacaacattgtcggcgctgtgatagctcgccgtggttggagagcaggcttgttgtgcggtgctgtcgcgtaatgtggtgcaggagcgccctgtgtccttcgtagtgggccaggtgtccccggcttatgtgtgggccggttaaccacatatcaacggggttcgaaaaacacactgtggtggttcggaggaagcttcgggcttttcgaacttgcccgttgctctctggttataggcgttcttccctgcccagtgtgtagcttccgcctcataattcgccctgcccagattggggagaaacatttaagggtctgatccgagggttcacggaggaacagaatttctgggtggccacccacgagtgggcccaaatggggttaggaccccggctgcccgactcttaccgagtgtttctaagagggcgcagaaatttattctagtaacgccaggccacgttcntgatcagcgagtatgtctccgcacttagtgcctcgccaataatttcctcgtgcaccagaagtgatcgttcctccaantctgttaaagtagcataagataaagtgcacccatttttggaaggaccccccgagagcaacccatgatgcggcgattaattgggggtcgcacgccataacaccgcacctaacaatgctatggttcaactcttggcgatagtggcttttaacaatgacgtgtgcccagtgggttcaccgcactactatcctgagtgccgcccgcccattatgataaggagagacttattgtattctctctctgtgcggggccctccatatataaatacatactagtgatgttttggggacgccaataattatagattgagatgacgatcaccgaggggaacataagaaaaaacccccatacaattccaaaattcttcgggcaaacataaca

SEQ ID NO: 615783 - DNA, 407 bp, Homo sapiens
tctgctagtcgatctctagagtatcccgtgcagtcttctgaattcttgctcatttagtacccgtaaccccatcttcatcctcaatgatatcaagaccagaaaatgggatcgcttcatattggattgactagagtttaaatgcttattatctggtctcttttgcacgttctgacttgtaacagccgaggtactgtgtcctcggcatctgaatccaacctgtgaattatttctttgttcagtttgccttccacctctagaaaatgtctgatttttttccatccaaggttttttctgagttgcctggcaagttacattggaccaatttacaccacctgcacacatagatgattccacatgattcatggtcccagaatcaggatttctcaaagcccctgctgcaggctggt

SEQ ID NO: 615784 - DNA, 1038 bp, Homo sapiens
tccgatgggatgagcggatggcatgaggacgaacgtgcgcgttgtcagtcggcggaggtcggctgtgtagcgtgggcgagctcaggggctgtgtaggtggtcggtatggttggctgtgcagtgcgtggtggcggaaacgtgaggcgactgctgagcaagtatctgattcccatgttgtccctcggttaacccccagtttcggggaaaaacacgctgtccgctcctcttcgctggttaagccgcctcccccgcgagtgctggtgtagcagctctcctatttggagccgtttcgttcctccccaggcgcgtgagtgtcggggtcccccccgatgtcctctgtctggcgaggggaatccgcgccgcccaaaacttggtccggtggacgccataccctctgttagcggagggtttatccgcatttcgcgttccccgaaaactatttgcccgcggggatttgtgcccccccttttcgggccgcgggcggaacacataacatcgttacgtgcccccagagaggcctctcgttgctcgctagtatacaattcttctctggcgcggcgcgttaatattacacctgtctgttgtgcgccgcaccacacgcactctgttattcgcgactcatactgccgcgcgataagcccaccgcagactggtttaagcttcgtggggtctccctcgcgcagttattaagccagccccctacgtggtaacatcccggcctgtgctctcctgtgtagcgacacactcacctttgtcgcatacacgcacgcgtaatgttcttatctcatagtcactgaagtatgagaaacccacttggcttctagataacgacgaaattccttaatacttacaacaacctccccctctaccaccggtggggtaccaaaatcggaggcccccccccccatcccacccctcttttaacaaacccctaataaccataatatattttatgccacaaaaagggaagaggatacacccccccccaaggtggttccaaccaaccccccggccccccatacttttttcccaaaaaaa

SEQ ID NO: 615785 - DNA, 119 bp, Homo sapiens
tcagctcggtacctattggtgatggttcattgtccggatagtatatgtaagaggatagctattagaaggattatggatgcggtagcttgcgtggcggaaatacttggggcgctcctgcc

SEQ ID NO: 615786 - DNA, 503 bp, Homo sapiens
  misc_feature (229)..(229): n is a, c, g, or t
  misc_feature (231)..(231): n is a, c, g, or t
  misc_feature (242)..(242): n is a, c, g, or t
  misc_feature (297)..(297): n is a, c, g, or t
  misc_feature (430)..(430): n is a, c, g, or t
ctgtgtgccccaggagacacttacctttacatggcccgaagactctggtcttgcatggtgacaattgacaatcttgggactaaccccaagataggcaccccaaggtgttatgtgctttctaggcttaacctaagtgtttaaccattgttcaactaagaaggtatatatttaatttgaaggaaggaaccaaccattttatttaaacagagtcctttgggttgtgggcgananaagcgcgaganaccgacacagttggcgacacggtcaacggcggcaaggtggggcttggttggaacnaacacaaaaatttctcccagagaaatattttggtgggcggcttcccttatattgtggcgagtgcgcggcaagcaagaggacacacggggggcaagggaaacacttttgtgggcacagattcaaggtttatatnattggcgctatataggggaggggggattaagacaagaggcgtctatcactattcggctatccgttctcgcggg

SEQ ID NO: 615787 - DNA, 985 bp, Homo sapiens
  misc_feature (10)..(10): n is a, c, g, or t
  misc_feature (89)..(89): n is a, c, g, or t
  misc_feature (98)..(98): n is a, c, g, or t
  misc_feature (142)..(142): n is a, c, g, or t
  misc_feature (184)..(184): n is a, c, g, or t
  misc_feature (220)..(220): n is a, c, g, or t
  misc_feature (226)..(226): n is a, c, g, or t
  misc_feature (257)..(257): n is a, c, g, or t
  misc_feature (266)..(266): n is a, c, g, or t
  misc_feature (429)..(429): n is a, c, g, or t
  misc_feature (467)..(467): n is a, c, g, or t
  misc_feature (483)..(483): n is a, c, g, or t
  misc_feature (518)..(518): n is a, c, g, or t
  misc_feature (540)..(540): n is a, c, g, or t
  misc_feature (570)..(570): n is a, c, g, or t
  misc_feature (594)..(594): n is a, c, g, or t
  misc_feature (654)..(654): n is a, c, g, or t
  misc_feature (711)..(711): n is a, c, g, or t
  misc_feature (750)..(750): n is a, c, g, or t
  misc_feature (758)..(758): n is a, c, g, or t
  misc_feature (783)..(783): n is a, c, g, or t
  misc_feature (785)..(785): n is a, c, g, or t
  misc_feature (814)..(814): n is a, c, g, or t
  misc_feature (819)..(819): n is a, c, g, or t
  misc_feature (857)..(858): n is a, c, g, or t
  misc_feature (888)..(888): n is a, c, g, or t
  misc_feature (896)..(896): n is a, c, g, or t
  misc_feature (906)..(906): n is a, c, g, or t
  misc_feature (923)..(923): n is a, c, g, or t
  misc_feature (956)..(956): n is a, c, g, or t
gccacacgtncaggtgtagactgactacattgagtatcgctccaacaccgaacttcccttaacggtttaaaaaaagggtcatgagtgtnaacacagtncagcagtgttttcatgggagaacttaaggcaggcaggaggacancctcctctctgcccaggaccaccacgggagttctaggcactncacctcactgttcttcagaaagcggtaaagtgagcnggggcnaggccggtaatcaagggggccagattgagcnatgccacanccttcctcctagttcccatgccctcctgggagcctggaagccctgcttacttccgtttgtgttttttcttttgttccttacgttgctgttctctttggtccttcttcatccttgagttcaccaccttgaaatgacccctgattccagcgggccggcgcacttngcggcccaaaccttttttggctacaacgtaggtgaaanggcgtttctccttgcnaagcccagccttcttgtagagacttcgcagctgtnccactttctctcgttctgagangttcactgtgttcaccacggcttctgcctncttcctggtctgctccagcctctncagcatcctccttttctttctagccttagcctcagccaccttcttgatgggacgtgcatngatttcccgccagcgtttccggtaatgctccaacttcttcttaccaacaggtaactnttgtatccggtgctgcttttcctcttgcacaaaccactncggaagcnccccctcaccctcattaaatgtgtncnggttgaaggagttatctatgaggtctctnttggnctttttggaagaggcattacagccccagagcaaggctnnggggtcagtttcgatgttcgtgggtctcanaggactantaagaccgtnacatctgattaggccangctcgctcttacaggagggtgccagcctttctnctcatgcagtctgcataatgttgagagca

SEQ ID NO: 615788 - DNA, 150 bp, Homo sapiens
cgatagccttatgatcgtattcgtggaagcctgtggtttacatggtatgtgaaacgtaatgccgtcggaaatggtgaagggagactcgaagtactctgaggcttgtaggagggtaaaatagagacccagtaaaatttggcccttatcgag

SEQ ID NO: 615789 - DNA, 1503 bp, Homo sapiens
agcgggggatatgatttgctgctcgagtgcatctgcagggtctggctgaatagtcgttcgaagaccaattctgaaaagtgtatgctggccgacgaattagttattggcctccgactttaccttccaggcggtagagactctggactgagagtggctttcacaatggcaagggatcagtaacttgcaggacaccaagcaaagtatcagaaagcaaggaaatctgtatgatgtccaattccaattataaatatcccggcctctccgttatatgcaggaagctaggtttggacgggggaaaagtgtgtacctattgacacagatctccaagaggttggtctcattctcctttgggctgtaaagaaagattaatcctatattgtaatgatcatatatcgaagttgtgtatcaaaagagactaattggtattgaagctaagatttggaaaagccttcatcatccaaagcattgtgggtaatcgtgctttttactgaagcaatgatggcagtcttgtggcttggctattggaatatgggggtgaaacagtctctaaatgacttaatagaaagaacgattaaagcaggcaagaatcttttcaagaggcataattcacagttgctggaaattggagcgcgctaaggatttgtccagaaaaaatgtcatgggacaaagttacagttgaattaaggcgttgaaacacaaatgtgggggggctcccaggggaataatggacccgcacatgtcgttgtccggacaacccaggagggggtagtggccacctattttaacatcaaattatattattaataatttatttattatagttttttttaaacacacccgacgtaccctcacacttcgaccgtgcaccgccgcccaacagcagtacaccgccaaagactgcctagacacatacagagactcatacgagcccgacgcaagagacgaatagataaagacgaaggtgctgtagtaagagcgagcggagcggggacaagaaggagaggcagaacagagacacaggagcgcgccccagccgcacgacagacacgagacagaaacgaaccgtcccttaagcacccaacacgacgcgtcacgaacagccgcgccagagacagcagtagagcagcgagagaagcaaggaaacagagcttcctcagactgcagcactcaggaaagtagatgagcacgacgagaaacagcggagaacaccaaaccgagagaccacgaacacgagccagacagagcaggaagagcaagcagcgcgcacgtgcagaagagaaacgacccccagatgaacgcgaagcaggacacgaccacagcaagacgacaaccgaagacgcggcgaccacaacagacacgacgcccactagaagcgaagcgtcacgagagcaaaccgagagatgcgaaagaacaacaagggacagcacgcaagcaactcagaccggcaaccgcagagaacacgaagaaacgaggcacgaagagaacccagagcaccgcgccaac

SEQ ID NO: 615790 - DNA, 325 bp, Homo sapiens
  misc_feature (21)..(22): n is a, c, g, or t
  misc_feature (33)..(33): n is a, c, g, or t
  misc_feature (66)..(66): n is a, c, g, or t
  misc_feature (84)..(84): n is a, c, g, or t
  misc_feature (110)..(110): n is a, c, g, or t
  misc_feature (123)..(123): n is a, c, g, or t
  misc_feature (174)..(174): n is a, c, g, or t
tgaaatacccaccccccaaannatttataaatnaaagtacgggccgggcacagtggctcatgcctntaattccagcactttggnaggccaaggtggacagatcactttgngctcaggagtttnagaccatcctgggcaacatggtgaaacctgtctctacaaaaaatacaaaanttagctgggtgtggtgttgtgcacctatagtcccagctactccgaaggctgaggctggagaatggcttgagtccaggaaatggaggttgcagttgacctgagatcgcggcacttatacttcaccctgggcagcagagtgagatcctgactc

SEQ ID NO: 615791 - DNA, 214 bp, Homo sapiens
  misc_feature (53)..(53): n is a, c, g, or t
ttttggaaaacttgacttatcttcctcataaaagaggagaaccagataaaagnccaattgcagtaagttcccttatgccttttttcagtgggacagtttccagaatattaaacaattgttaaaatgtgaaccaacaaaaaatagattttggggacctagttactgccagaattttattatcagggtttactttataaaagatccttttttgata

SEQ ID NO: 615792 - DNA, 746 bp, Homo sapiens
  misc_feature (442)..(442): n is a, c, g, or t
  misc_feature (488)..(488): n is a, c, g, or t
  misc_feature (543)..(543): n is a, c, g, or t
  misc_feature (550)..(550): n is a, c, g, or t
  misc_feature (604)..(604): n is a, c, g, or t
  misc_feature (613)..(613): n is a, c, g, or t
  misc_feature (656)..(656): n is a, c, g, or t
  misc_feature (672)..(672): n is a, c, g, or t
  misc_feature (710)..(710): n is a, c, g, or t
  misc_feature (732)..(732): n is a, c, g, or t
ggggtgatcaataaacattatataatgaacacttccccgtgtcatccaaaagtttagaaaaatcttagtgattataagtgacttccagttttcttgctaatttggaaagaacgttatattgagcatgtttaccttcatccttttctgtatttctgaatattttcttagaatatacacctggaagacaaatttctggaaaagaagttactgtttcagagtatgttaagttttaaaagttgcttaacttttctttttttaagagaattttttccacttggtattcttactagtaatgtttgaaatacctaatataattgaaaatgtttgaatttgctaagttaaaagggatatcactttgatgacatgggattacattattttcctgttgatttattaagtatttatatgtcctttgaaatttttttggcggtggcattctttntattttaatatataaggttttgttactttttgataaacagtctttntacatacaaaatttattactgtttgcccatattatagcaaacatagtttcctttntactatnaaatcttgaagggttgtgggagtttttcatatacagtgggttaaaaatgtttangtacatatnatggatgtttacattctttcatggtaagtttatggtagaaaantaattactaataagcngaagttattctaccctaatattctctggtcggtgactngtttacacttagcggatacctntctagatattttct

SEQ ID NO: 615793 - DNA, 133 bp, Homo sapiens
  misc_feature (112)..(112): n is a, c, g, or t
  misc_feature (120)..(120): n is a, c, g, or t
gggtcgcgacaggtgcgctaggtagagcgccgggacctgtgacaggctggtagcacgcagaggggcgggttttagccagtattcatgtctgtagacaagatggtcatctccnttataganggcccatggactc

SEQ ID NO: 615794 - DNA, 843 bp, Homo sapiens
cacgtggtgactcacgcctataatcccagcactttgggaggccgaggcaggtggatcacctgaggtcaggagttcaagaccagcctgaccaacatggagaaaccccatctctactaaaaatacaaaattagccaggcgaggtggctcatgcctgtaatcccagctactctggaggctgaggcaggagaatcgcttgaactcgggaggtggaagttgcagtgagccaagatcacgccactgcacttcagcctgagcaacaagtgcaaaactctgtttcaaaaaaataaataaatgaattttaaaaagtaaaaagggccaggcgtagtggctcatgcctataatcccaacacttgtggaggccaaggcgggcagatcacaaggtcaagagatcaagaccatcctgccaacatgatgaaatctcctctactaaaaatacaaaaaattagccgagtgtggtactggcaggcctgtagtcccagctactcaggaggctgaggcaggagaatcgcttgattcctccaccaggaggcacaggttgtagtgagctgagatcgacaacaaatccagcctgcaacagagtgagattccatctccaaaaaattactaattcaacataacaaattaaaccaaaacaataaaaagcaaggtgggcatggtggctcaagcctgtaatcccagtcttctgggaggcaaagcagggggttcccaaggtcaggggtccgagaccaccttggccacatggtgaaccccgtctactaaggtcaaaataagccagctgggggtgtggcgcgtgaaccagcaacaaggagggggtgaagaacagaatgtttatggccccaccgg

SEQ ID NO: 615795 - DNA, 295 bp, Homo sapiens
ggtcgacaacggcgcatcgaccacaaacttgtcggtcaccacgatggacgctgccgcccggtcggtatgcacctggtaggtcacttcggtcatgccgccgtccttgggcaccagcttccagaagtcttcgacctgggcgacacggacataacctttctcttccggcaggtaggtcggcacttccttgagcgtgcgggtcaggctgccgtcagcgcccttggtggtggtgatctgcaagatcgagtcacgatcggtgaccgggaacggtgccttgaactgggtgtaggtccagctc

SEQ ID NO: 615796 - DNA, 307 bp, Homo sapiens
gtttttttttgggggccccccgaccctttttggaaaacccgcccccgttggtttttcccctgccccccttgaatgggtaagccccccccgggcatggcccgtcggggcaaagttcccaggaaaccatttttgcctgatggcccccccccttttggaacccccttttggttgggaagggcccttttcccccgggcttttttgtaatagaaaccccggatataaggtttccaacccccttggggttttcccccggggggtttttttttttgaatttgggttttttaaaagaaataaaaagtttaaggta

SEQ ID NO: 615797 - DNA, 3418 bp, Homo sapiens
agttaaaacaattttttaagagaaaggagataaccagagcatagccagcagaaggactcgcatgaggtttggtgggactgcctagggagaaggaggcagctggctgcgtgacagagcccagtgataggggagggcctgtgaccccttaaggagctgagacgctgtcacagagcaatgggagcgctgagtgatggagctggatttgtgcttttagaaaagctttgttggctgctgttgggagaatggattggaagggggtgagactgcagtcagagactcccataaggtagctgttactgtaatcacaacaacagatgcctacactccttcccaagacttccctctctgatcttagaagcattgtcaaatctgggttcccagcctgccatggcaagctgcttgctacttgggagtgaaaagcccttgtggagctttttcttattcggtgactgctcataaagtgccttcacctcgcttgccttattagccagtcctgcctccaaattaccaccacttgctcctttcaggagtctcttccccctaaagtccctattactccttctctctgctttcagatcagtaacagaaaaagtcaccttccctaagagtctgctccagtccagtagaaatgctttaaaatttttctggcctcagctgcccttcttgagcacagaaatttctagaatattgaatgaatcactggttctttataatcattttgtccagtttcaatcactgcattttaggaaagatttgaaaaactgaaggacaaagtggggccttagaggacttaggattctttcagaggaaagtaatctaaagaacaagttaatgtttcttcatcgtttgggaattagttattaaatggaagatgcctgaaaaattattctcttaatacagttcttcaggaggacagcattaaaaggcctggaattaaatagccacaaggcacatttagatgacacagcaggaagaactttccagtaaaaactattgaataggataccgtgttcaggcagaagtcaggagactctctttaggagagctgagaaataacttgagggggggggccacatctgggggaggattttataatttttaaatctcttaaactatacagctttgagatggaatgattaagctgagcaggcatttgttaacatcctgaaatacgatttccatcctgtccctagagcctgcccttggggtccactgtagactggccttctagaagaaaccgccttataaggctctcttggatagttcagtgacagaacacccttggatggagtccaaggccagctagccttcactgattcaaaattcctccctacagtggatgagattatgatgcttcctttacctcaagccacccctaccccacaaacaatctgacctcatctgtgtttttcattgttagacaaataacatcttgtttttagcagctggggaaccctgaattatcgtcaaaagaatttttaagccagggaatatgagtgtaacctttatttgaaatttaggagtggcacaattagaaagctttgaaatggaaggagacttaggtatatgtgaattaataagcccacttatttaaggtaatttcaaagatttcccagtgagtcttttactcttatgtggggatagcagtggaggactagaaatgttcaagggaagcttcccccagcctgtcatatatggcttttccaggtcaatcaagaccgtctcctccaccaggcctctgagagaaaatgagatcagaagaaaaaagccaggatgataatggggggagggggggaaacgtttacttatttattttttttacttaaaattgattgtgttaaatagttgacctctgttttatcccaagttggattaatggcaaaatgatatggcccttttgaaaaagctaatgtgttgaattgcctttactgttttacagaggagagcggtcaaagttaattagaaacagctggagctaacagtaagcctcacccccatcaatgtccctaccaggagagggttaccagggagaggagcagtcccgggaatccagggaggggcctctggtcccaaaagcaggccagagttgcagagaagttttgtgtctgaaaaataagaaaggttcatttcaggtgaaacagacctaggaaccctgtgttgacaaagccccattcatatggtatgaagttcccacagtaaagagcactgacaaggccaaggccaacccgacaggttcaaagcaggcttggccactgtgaaaaaacaaccccctcaaaacttcaggagaatgtatataataaatgaaggtacaatttcataccttcacaggattattgagaaggtcaaattacataacagatatgaaagcactgtgtaaactatgcggactatgctgcaccaaataactgtaaagaattattaactagactgtaaatgccttgagggcaaggaatgcatctgcaacgggtatttgtgaagtacttgacagtttgctaaggacttctgtggattttcctcatatgctactcataacaaccctggaaggtaaggggaattgttatcccaaattccaaataaagacactgcaggtcagacatcacacaggtggtaaatagcaattctggtacttactttagatattctgctacaggcttgctattcaaagtgtggtatgtagaccagcaacattgactctctgtgctatctttcttttttataaactcggaattatttcaaaataagaagtttctaacaaaagagattcagaagagtcaaacccttgggtgtgaaaaagttttaggaagactttcctgaatttattttgcctatattttgtttctgatgaatgagcaagggggttatatgatatatttgtgtctaaatacatctaaaagagctctttcattcgcataaaataaacatgctgtatgataacaaagtttatgtcagagttgagatggctctttatggtacatatatgctgtgccttctaaaaaatgtcatattatattcagtgaaagatgatgtttcttaaaatgaatgaatgtctctgaggtggccaacattagtccttctatagccagattagcaatcttagagcctggtcaggcacagtggctcttgtttgtaatcccagtactttgggaggccaaggtgggaggatctcttgagctcaggagttcaggaccagcctgggcaacatagtgagatctcatctctactaaaaataaaaatgaaattgttaattggccaggcacagtgggaagcacctgtagtcccagctactcaggaggctaaagtgagagggtggctctagcacagtcatcaaggctgcaggaggctatgatggagccactgcactccagcctagatgacaaggtgagacgctgtctcaaaaaaaagaagagaaagggaaaga

SEQ ID NO: 615798 - DNA, 493 bp, Homo sapiens
  misc_feature (44)..(44): n is a, c, g, or t
aaaggaaggagcaaacggccattgtgtatgcagaggtggattanaaggtaagaaatcaggggattaaagacttgggtgggtaggcatctctcaggagccccatctccgggggtgtcccctcctgggcagggttttgggaccctctgtgggtgacgcacaccctgggatggggctagtaaaaccttcaggcgcctttgggggtggactttggggcactttagtggacaggaaaaggaacgccttccaggaacctgtggactaagggtgcagggacttccctttgcaaggggtaacagaccgctggaaaacactgtccctttcaaagctcggtggctcacagggtgtcctgccccggttttcggacgaaaaaaatttcgggccacaagcatccccccatccctttcagggtgggggctggggatgttgcattttaaccttttgtatttattccctccccttttgcaggggtccgtgcggggtgaaattaaaaatt

SEQ ID NO: 615799 - DNA, 103 bp, Homo sapiens
catgcgtcagtgcaatctgtgctgcaagtgcacaaagtgacaacgtgctgaagtgacacgtgctgaatgacgtgctgaagtgacaccgtgctgaacgtgacaa

SEQ ID NO: 615800 - DNA, 626 bp, Homo sapiens
  misc_feature (31)..(31): n is a, c, g, or t
  misc_feature (77)..(77): n is a, c, g, or t
  misc_feature (565)..(565): n is a, c, g, or t
  misc_feature (567)..(567): n is a, c, g, or t
  misc_feature (570)..(571): n is a, c, g, or t
  misc_feature (573)..(573): n is a, c, g, or t
  misc_feature (577)..(577): n is a, c, g, or t
cccgactagcccgacagcatccacaggtcangccacccctcttcctgtcaccagcccttcctcagcatccacaggtnacgccaccctcttcctgtcaccagcccttcctcagcatccacaggtcacgccacccctcttcctgtcaccagcccttcctcagcatccacaggtgacaccacccctcttcctgtcaccgacacttcctcagcatccacaggtcacgccacccctcttcctgtcaccgacacttcctcagcatccacaggtcacgccacccctcttcctgtcaccagcacttcctcagcatccacaggtcacaccacccctcttcctgtcaccgacacttcctcagcatccacaggtcacgccacccctcttcctgtcaccagcctttcctcagtatccacaggtgacaccacccctcttcctgtcactagcccttcctcagcatccacaggtcacgccacccctcttcctgtcaccgacgcttcctcagcatccacaggtcacgccacccctcttcctgtcaccagcccttcctcagcatccacaggtgacacacccngncgnncntacngtcccttccgtcgcagtagtctggggagtcctctagagtcgcctagatg

SEQ ID NO: 615801 - DNA, 400 bp, Homo sapiens
ggatcctccgggctgcaggaattcggcacgagaaaggacatgttttttttttgttgttgttgtttttgctaagtagtattgctgtacatgtgacacttttaaattcaatttagcattaataggctggacacggtggctgatgcctgtaatcccagcactgtgggaggccaaggtgagtggatcatgaggtcaggagatcgagaccatcctggacagcataatgaaaccctcgtctctacagaaaatacaaaagttagccggacggttgtcatgagcctgtagtcccagctactcgggtggctgaggcaggataattgcttgaacctgggaggtggaggttgtagtgagctgagatagtgccactgcactccagcctgggaacagagtgagacttcatctc

SEQ ID NO: 615802 - DNA, 329 bp, Homo sapiens
tcagacgctgaactatgtgtccacaggtcacgctacccctcttcctgtcaccagcctttcctcagcatccacaggtgacaccacccctcttcctgtcaccgacacttcctcagcatccacaggtcacgccacccctcttcctgtcaccagcctttcctcagtatccacaggtgacaccacccctcttcctgtcaccgacacttcctcagcatccacagccacccctcttcctgtcaccgacacttcctcagcatccacaggtcacgccacccttcttcctgtacggacacttcactcagcacatagttcagcgtctgagcagggatcct

SEQ ID NO: 615803 - DNA, 355 bp, Homo sapiens
  misc_feature (292)..(292): n is a, c, g, or t
  misc_feature (299)..(299): n is a, c, g, or t
  misc_feature (303)..(304): n is a, c, g, or t
  misc_feature (307)..(307): n is a, c, g, or t
  misc_feature (315)..(315): n is a, c, g, or t
gtaagagtgaaaccgtgtctcaacaacaacaacaacaacaacaaaaaagatttctttttcgtggccaggtgcagtgtcggtgacaccacccctcttcctgtcaccgacagcttcctcagtatccacaggtgacaccacccctcttcctgtcaccggcccttcctcagcatccacaggtcacgccacccctcttcctgtcaccgacacttcctcagtatccacaggtcacgccccacccctcttcctgtcaccgacacttcctcagcatccacaggtcacgccacccctcttnctgtcancagnnctncctcagcntccacagtatcctcgactcccctctgaagtgtacgttatg

SEQ ID NO: 615804 - DNA, 4663 bp, Homo sapiens
aaagctcaaaccgacaccctcacgcagatgatgacatcaactcttttttcttccccaagtgtacacaatgtgatggagactgttacgcaggagacagctcctccagatgaaatgaccacatcatttccctccagtgtcaccaacacactcatgatgacatcaaagactataacaatgacaacctccacagactccactcttggaaacacagaagagacatcaacagcaggaactgaaagttctaccccagtgacctcagcagtctcaataacagctggacaggaaggacaatcacgaacaacttcctggaggacctctatccaagacacatcagcttcttctcagaaccactggactcggagcacgcagaccaccagggaatctcaaaccagcaccctaacacacagaaccacttcaactccttctttctctccaagtgtacacaatgtgacagggactgtttctcagaagacatctccttcaggtgaaacagctacctcatccctctgtagtgtcacaaacacatccatgatgacatcagagaagataacagtgacaacctccacaggctccactcttggaaacccaggggagacatcatcagtacctgttactggaagtcttatgccagtcacctcagcagccttagtaacagttgatccagaaggacaatcaccagcaactttctcaaggacttctactcaggacacaacagctttttctaagaaccaccagactcagagcgtggagaccaccagagtatctcaaatcaacaccctcaacaccctcacaccggttacaacatcaactgttttatcctcaccaagtggattcaacccaagtggaacagtttctcaggagacattcccttctggtgaaacaaccatctcatccccttccagtgtcagcaatacattcctggtaacatcaaaggtgttcagaatgccaatctccagagactctactcttggaaacacagaggagacatcactatctgtaagtggaaccatttctgcaatcacttccaaagtttcaaccatatggtggtcagacactctgtcaacagcactctcccccagttctctacctccaaaaatatccacagctttccacacccagcagagtgaaggtgcagagaccacaggacggcctcatgagaggagctcattctctccaggtgtgtctcaagaaatatttactctacatgaaacaacaacatggccttcctcattctccagcaaaggccacacaacttggtcacaaacagaactgccctcaacatcaacaggtgctgccactaggcttgtcacaggaaatccatctacagggacagctggcactattccaagggtcccctctaaggtctcagcaataggggaaccaggagagcccaccacatactcctcccacagcacaactctcccaaaaacaacaggggcaggcgcccagacacaatggacacaagaaacggggaccactggagaggctcttctcagcagcccaagctacagtgtgactcagatgataaaaacggccacatccccatcttcttcacctatgctggatagacacacatcacaacaaattacaacggcaccatcaacaaatcattcaacaatacattccacaagcacctctcctcaggaatcaccagctgtttcccaaaggggtcacactcaagccccgcagaccacacaagaatcacaaaccacgaggtccgtctcccccatgactgacaccaagacagtcaccaccccaggttcttccttcacagccagtgggcactcgccctcagaaattgttcctcaggacgcacccaccataagtgcagcaacaacctttgccccagctcccaccggggatggtcacacaacccaggccccgaccacagcactgcaggcagcacccagcagccatgatgccaccctggggccctcaggaggcacgtcactttccaaaacaggtgcccttactctggccaactctgtagtgtcaacaccagggggcccagaaggacaatggacatcagcctctgccagcacctcacctgacacagcagcagccatgacccatacccaccaggctgagagcacagaggcctctggacaaacacagaccagcgaaccggcctcctcagggtcacgaaccacctcagcgggcacagctaccccttcctcatccggggcgagtggcacaacaccttcaggaagcgaaggaatatccacctcaggagagacgacaaggttttcatcaaacccctccagggacagtcacacaacccagtcaacaaccgaattgctgtccgcctcagccagtcatggtgccatcccagtaagcacaggaatggcgtcttcgatcgtccccggcacctttcatcccaccctctctgaggcctccactgcagggagaccgacaggacagtcaagcccaacttctcccagtgcctctcctcaggagacagccgccatttcccggatggcccagactcagaggacaagaaccagcagagggtctgacactatcagcctggcgtcccaggcaaccgacaccttctcaacagtcccacccacacctccatcgatcacatccactgggcttacatctccacaaacccagacccacactctgtcaccttcagggtctggtaaaaccttcaccacggccctcatcagcaacgccacccctcttcctgtcacctacgcttcctcggcatccacaggtcacaccacccctcttcatgtcaccgatgcttcctcagtatccacaggtcacgccacccctcttcctgtcaccgacacttcctcagcatccacaggtcacgccacccctcttcctgtcaccagcccttcctcagcatccacaggtcacgccacccctcttcctgtcaccgacacttcctcagtatccacaggtgacaccacccctcttcctgtcaccgacgcttcctcagtagcatccacaggtgacaccacccctcttcatgtcaccgacacttcctcagcatccacaggtcacgccacccctcttcctgtcaccagcctttcctcagtatccacaggtgacaccacgcctcttcctgtcactagcccttcctcagcatccacaggtcacgccacccctcttcttgtcaccgacgcttcctcagtatccacaggtcacgccacccctcttcctgtcaccgacgcttcctcagcatccacaggtcacgccacccctcttcatgtcaccgacgcttcctcagcatccacaggtgacaccacctctcttcctgtcaccgacgcttcctcagcatccacaggtgacaccacccctcttcctgtcaccgacacttcctcagcatccacaggtgacaccacccctcttcctgtcaccaacgcttcctcagcatccacaggtcacgccacccctcttcatgtcaccaacgcttcctcagtatccacaggtgacaccacccctcttcctgtcaccggcccttcctcagcatccacaggtcacgccacccctcttcctgtcaccgacacttcctcagtatccacaggtcacgccacccctcttcctgtcaccagcctttcctcagcatccacaggtgacaccacccctcttcctgtcaccgacacttcctcagcatccacaggtcacgccacccctcttcctgtcaccagcctttcctcagtatccacaggtgacaccacccctcttcctgtcaccgacacttcctcagcatccacaggtcacgccacctctcttcttgtcaccgacgcttcctcagtatccacaggtcacgccacccctcttcatgtcaccgatgcttcctcagtatccacaggtgacaccacccctcttcctgtcaccagcccttcctcagcatccacaggtgacaccacccctcttcctgtcaccgacacttcctcagtatccacaggcgacaccacccctcttcttgtcaccgacacttcctcagtatccacaagccacgccacctctcttcctgtcaccgacacttcctcagtatccacaagccacgccacctctcttcctgtcaccgacccttcctcagcatccacaggtgacaccacccctcttcctgtcaccgacacttcctcagtatccacaagccacgccacctctcttcctgtcaccgacacttcctcagcatccacaagtcacgccacctctcttcctgtcactgacacttcctcagcatccacaggtcacgccacccctcttcctgtcaccgacacttcctcagcatccacaggtcacgccacccctcttcctgtcaccagcacttcctcagcatccacaggtcacaccacccctcttcctgtcaccgacacttcctcagcatccacaggtcacgccacccctcttcctgtcaccagcctttcctcgtcacaccacccctcttcctgtcaccgacgcttcgtcagtatccacaggtgacaccacccgtcttcctgtcaccagcccttcctcagcatccacaggtcacaccacccctcttcctgtcaccgacacttcctcagcatccacaggtcagacaccacccctcttcctgtcaccaatgcttcctcattatccacacgtcacgccacctctcttcatgtcaccagcccttcgtcgacgcggccgcgaatttagtagtagtagtagaccgccgctc

SEQ ID NO: 615805 - DNA, 462 bp, Homo sapiens
  misc_feature (5)..(5): n is a, c, g, or t
  misc_feature (22)..(22): n is a, c, g, or t
  misc_feature (48)..(48): n is a, c, g, or t
  misc_feature (66)..(66): n is a, c, g, or t
  misc_feature (101)..(101): n is a, c, g, or t
  misc_feature (114)..(114): n is a, c, g, or t
  misc_feature (122)..(122): n is a, c, g, or t
  misc_feature (148)..(148): n is a, c, g, or t
  misc_feature (449)..(451): n is a, c, g, or t
  misc_feature (454)..(454): n is a, c, g, or t
aaggnattccccgagacccagnaaggtttccacggccaggcgggccancgtcccctttggaaaccncctaagttcctatcctaaagggtacgggtatcctnccccctacctaanggcaaaanttagttccatgttcctaatgttcccngtttgacataaaaaaaagtttgagtattttttatacctgagagcgtatacttgctgcccagatttattaaatgatggagatagaaaaattgaagccaaaatactttatatttgatttgatttgagttctcatatatagaaagctacattttaaccaatatcctatttcccctaacgtgcatttgacttacaggtaataagcttcataacatgtttaattattaattttttaatacagttggccctccatatctgtgggttctatatccatgggttctgcatccatgggttaactgcaaaannntanatgttctg

SEQ ID NO: 615806 - DNA, 623 bp, Homo sapiens
agttaaaacaattttttaagagaaaggagataaccagagcatagccagcagaaggactcgcatgaggtttggtgggactgcctagggagaaggaggcagctggctgcgtgacagagcccagtgataggggagggcctgtgaccccttaaggagctgagacgctgtcacagagcaatgggagcgctgagtgatggagctggatttgtgcttttagaaaagctttgttggctgctgttgggagaatggattggaagggggtgagactgcagtcagagactcccataaggtagctgttactgtaatcacaacaacagatgcctacactccttcccaagacttccctctctgatcttagaagcattgtcaaatctgggttcccagcctgccatggcaagctgcttgctacttgggagtgaaaagcccttgtggagctttttcttattcggtgactgctcataaagtgccttcacctcgcttgccttattagccagtcctgcctccaaattaccaccacttgctcctttcaggagtctcttccccctaaagtccctattactccttctctctgctttcagatcagtaacagctacctttccgggaccaactcgagtgtatatgtatat

SEQ ID NO: 615807 - DNA, 104 bp, Homo sapiens
cataggggccatagcttctgcctccaaaattcctcccttcattggtccaaaatttgaagactgatggttttacttcccaaaatcattgtatcttccgccaacac

SEQ ID NO: 615808 - DNA, 4619 bp, Homo sapiens
  misc_feature (4558)..(4558): n is a, c, g, or t
  misc_feature (4560)..(4560): n is a, c, g, or t
  misc_feature (4563)..(4564): n is a, c, g, or t
  misc_feature (4566)..(4566): n is a, c, g, or t
  misc_feature (4570)..(4570): n is a, c, g, or t
aaagctcaaaccgacaccctcacgcagatgatgacatcaactcttttttcttccccaagtgtacacaatgtgatggagactgttacgcaggagacagctcctccagatgaaatgaccacatcatttccctccagtgtcaccaacacactcatgatgacatcaaagactataacaatgacaacctccacagactccactcttggaaacacagaagagacatcaacagcaggaactgaaagttctaccccagtgacctcagcagtctcaataacagctggacaggaaggacaatcacgaacaacttcctggaggacctctatccaagacacatcagcttcttctcagaaccactggactcggagcacgcagaccaccagggaatctcaaaccagcaccctaacacacagaaccacttcaactccttctttctctccaagtgtacacaatgtgacagggactgtttctcagaagacatctccttcaggtgaaacagctacctcatccctctgtagtgtcacaaacacatccatgatgacatcagagaagataacagtgacaacctccacaggctccactcttggaaacccaggggagacatcatcagtacctgttactggaagtcttatgccagtcacctcagcagccttagtaacagttgatccagaaggacaatcaccagcaactttctcaaggacttctactcaggacacaacagctttttctaagaaccaccagactcagagcgtggagaccaccagagtatctcaaatcaacaccctcaacaccctcacaccggttacaacatcaactgttttatcctcaccaagtggattcaacccaagtggaacagtttctcaggagacattcccttctggtgaaacaaccatctcatccccttccagtgtcagcaatacattcctggtaacatcaaaggtgttcagaatgccaatctccagagactctactcttggaaacacagaggagacatcactatctgtaagtggaaccatttctgcaatcacttccaaagtttcaaccatatggtggtcagacactctgtcaacagcactctcccccagttctctacctccaaaaatatccacagctttccacacccagcagagtgaaggtgcagagaccacaggacggcctcatgagaggagctcattctctccaggtgtgtctcaagaaatatttactctacatgaaacaacaacatggccttcctcattctccagcaaaggccacacaacttggtcacaaacagaactgccctcaacatcaacaggtgctgccactaggcttgtcacaggaaatccatctacagggacagctggcactattccaagggtcccctctaaggtctcagcaataggggaaccaggagagcccaccacatactcctcccacagcacaactctcccaaaaacaacaggggcaggcgcccagacacaatggacacaagaaacggggaccactggagaggctcttctcagcagcccaagctacagtgtgactcagatgataaaaacggccacatccccatcttcttcacctatgctggatagacacacatcacaacaaattacaacggcaccatcaacaaatcattcaacaatacattccacaagcacctctcctcaggaatcaccagctgtttcccaaaggggtcacactcaagccccgcagaccacacaagaatcacaaaccacgaggtccgtctcccccatgactgacaccaagacagtcaccaccccaggttcttccttcacagccagtgggcactcgccctcagaaattgttcctcaggacgcacccaccataagtgcagcaacaacctttgccccagctcccaccggggatggtcacacaacccaggccccgaccacagcactgcaggcagcacccagcagccatgatgccaccctggggccctcaggaggcacgtcactttccaaaacaggtgcccttactctggccaactctgtagtgtcaacaccagggggcccagaaggacaatggacatcagcctctgccagcacctcacctgacacagcagcagccatgacccatacccaccaggctgagagcacagaggcctctggacaaacacagaccagcgaaccggcctcctcagggtcacgaaccacctcagcgggcacagctaccccttcctcatccggggcgagtggcacaacaccttcaggaagcgaaggaatatccacctcaggagagacgacaaggttttcatcaaacccctccagggacagtcacacaacccagtcaacaaccgaattgctgtccgcctcagccagtcatggtgccatcccagtaagcacaggaatggcgtcttcgatcgtccccggcacctttcatcccaccctctctgaggcctccactgcagggagaccgacaggacagtcaagcccaacttctcccagtgcctctcctcaggagacagccgccatttcccggatggcccagactcagaggacaagaaccagcagagggtctgacactatcagcctggcgtcccaggcaaccgacaccttctcaacagtcccacccacacctccatcgatcacatccactgggcttacatctccacaaacccagacccacactctgtcaccttcagggtctggtaaaaccttcaccacggccctcatcagcaacgccacccctcttcctgtcacctacgcttcctcggcatccacaggtcacaccacccctcttcatgtcaccgatgcttcctcagtatccacaggtcacgccacccctcttcctgtcaccgacacttcctcagcatccacaggtcacgccacccctcttcctgtcaccagcccttcctcagcatccacaggtcacgccacccctcttcctgtcaccgacacttcctcagtatccacaggtgacaccacccctcttcctgtcaccgacgcttcctcagtagcatccacaggtgacaccacccctcttcatgtcaccgacacttcctcagcatccacaggtcacgccacccctcttcctgtcaccagcctttcctcagtatccacaggtgacaccacgcctcttcctgtcactagcccttcctcagcatccacaggtcacgccacccctcttcttgtcaccgacgcttcctcagtatccacaggtcacgccacccctcttcctgtcaccgacgcttcctcagcatccacaggtcacgccacccctcttcatgtcaccgacgcttcctcagcatccacaggtgacaccacctctcttcctgtcaccgacgcttcctcagcatccacaggtgacaccacccctcttcctgtcaccgacacttcctcagcatccacaggtgacaccacccctcttcctgtcaccaacgcttcctcagcatccacaggtcacgccacccctcttcatgtcaccaacgcttcctcagtatccacaggtgacaccacccctcttcctgtcaccggcccttcctcagcatccacaggtcacgccacccctcttcctgtcaccgacacttcctcagtatccacaggtcacgccacccctcttcctgtcaccagcctttcctcagcatccacaggtgacaccacccctcttcctgtcaccgacacttcctcagcatccacaggtcacgccacccctcttcctgtcaccagcctttcctcagtatccacaggtgacaccacccctcttcctgtcaccgacacttcctcagcatccacaggtcacgccacctctcttcttgtcaccgacgcttcctcagtatccacaggtcacgccacccctcttcatgtcaccgatgcttcctcagtatccacaggtgacaccacccctcttcctgtcaccagcccttcctcagcatccacaggtgacaccacccctcttcctgtcaccgacacttcctcagtatccacaggcgacaccacccctcttcttgtcaccgacacttcctcagtatccacaagccacgccacctctcttcctgtcaccgacacttcctcagtatccacaagccacgccacctctcttcctgtcaccgacccttcctcagcatccacaggtgacaccacccctcttcctgtcaccgacacttcctcagtatccacaagccacgccacctctcttcctgtcaccgacacttcctcagcatccacaagtcacgccacctctcttcctgtcactgacacttcctcagcatccacaggtcacgccacccctcttcctgtcaccgacacttcctcagcatccacaggtcacgccacccctcttcctgtcaccagcacttcctcagcatccacaggtcacaccacccctcttcctgtcaccgacacttcctcagcatccacaggtcacgccacccctcttcctgtcaccagcctttcctcagtatccacaggtgacaccacccctcttcctgtcactagcccttcctcagcatccacaggtcacgccacccctcttcctgtcaccgacgcttcctcagcatccacaggtcacgccacccctcttcctgtcaccagcccttcctcagcatccacaggtgacacacccngncgnncntacngtcccttccgtcgcagtagtctggggagtcctctagagtcgcctagatg

SEQ ID NO: 615809 - DNA, 136 bp, Homo sapiens
caaagccctagacccattttttaaaaatttattggttttctactataaaatgaggatgctcaatgcttgcactaccagataggtagggcaagcatggagcatcctcattttatagtagaaaaccaaaaaaaaaaaa

SEQ ID NO: 615810 - DNA, 4426 bp, Homo sapiens
  misc_feature (4365)..(4365): n is a, c, g, or t
  misc_feature (4367)..(4367): n is a, c, g, or t
  misc_feature (4370)..(4371): n is a, c, g, or t
  misc_feature (4373)..(4373): n is a, c, g, or t
  misc_feature (4377)..(4377): n is a, c, g, or t
aaagctcaaaccgacaccctcacgcagatgatgacatcaactcttttttcttccccaagtgtacacaatgtgatggagactgttacgcaggagacagctcctccagatgaaatgaccacatcatttccctccagtgtcaccaacacactcatgatgacatcaaagactataacaatgacaacctccacagactccactcttggaaacacagaagagacatcaacagcaggaactgaaagttctaccccagtgacctcagcagtctcaataacagctggacaggaaggacaatcacgaacaacttcctggaggacctctatccaagacacatcagcttcttctcagaaccactggactcggagcacgcagaccaccagggaatctcaaaccagcaccctaacacacagaaccacttcaactccttctttctctccaagtgtacacaatgtgacagggactgtttctcagaagacatctccttcaggtgaaacagctacctcatccctctgtagtgtcacaaacacatccatgatgacatcagagaagataacagtgacaacctccacaggctccactcttggaaacccaggggagacatcatcagtacctgttactggaagtcttatgccagtcacctcagcagccttagtaacagttgatccagaaggacaatcaccagcaactttctcaaggacttctactcaggacacaacagctttttctaagaaccaccagactcagagcgtggagaccaccagagtatctcaaatcaacaccctcaacaccctcacaccggttacaacatcaactgttttatcctcaccaagtggattcaacccaagtggaacagtttctcaggagacattcccttctggtgaaacaaccatctcatccccttccagtgtcagcaatacattcctggtaacatcaaaggtgttcagaatgccaatctccagagactctactcttggaaacacagaggagacatcactatctgtaagtggaaccatttctgcaatcacttccaaagtttcaaccatatggtggtcagacactctgtcaacagcactctcccccagttctctacctccaaaaatatccacagctttccacacccagcagagtgaaggtgcagagaccacaggacggcctcatgagaggagctcattctctccaggtgtgtctcaagaaatatttactctacatgaaacaacaacatggccttcctcattctccagcaaaggccacacaacttggtcacaaacagaactgccctcaacatcaacaggtgctgccactaggcttgtcacaggaaatccatctacagggacagctggcactattccaagggtcccctctaaggtctcagcaataggggaaccaggagagcccaccacatactcctcccacagcacaactctcccaaaaacaacaggggcaggcgcccagacacaatggacacaagaaacggggaccactggagaggctcttctcagcagcccaagctacagtgtgactcagatgataaaaacggccacatccccatcttcttcacctatgctggatagacacacatcacaacaaattacaacggcaccatcaacaaatcattcaacaatacattccacaagcacctctcctcaggaatcaccagctgtttcccaaaggggtcacactcaagccccgcagaccacacaagaatcacaaaccacgaggtccgtctcccccatgactgacaccaagacagtcaccaccccaggttcttccttcacagccagtgggcactcgccctcagaaattgttcctcaggacgcacccaccataagtgcagcaacaacctttgccccagctcccaccggggatggtcacacaacccaggccccgaccacagcactgcaggcagcacccagcagccatgatgccaccctggggccctcaggaggcacgtcactttccaaaacaggtgcccttactctggccaactctgtagtgtcaacaccagggggcccagaaggacaatggacatcagcctctgccagcacctcacctgacacagcagcagccatgacccatacccaccaggctgagagcacagaggcctctggacaaacacagaccagcgaaccggcctcctcagggtcacgaaccacctcagcgggcacagctaccccttcctcatccggggcgagtggcacaacaccttcaggaagcgaaggaatatccacctcaggagagacgacaaggttttcatcaaacccctccagggacagtcacacaacccagtcaacaaccgaattgctgtccgcctcagccagtcatggtgccatcccagtaagcacaggaatggcgtcttcgatcgtccccggcacctttcatcccaccctctctgaggcctccactgcagggagaccgacaggacagtcaagcccaacttctcccagtgcctctcctcaggagacagccgccatttcccggatggcccagactcagaggacaagaaccagcagagggtctgacactatcagcctggcgtcccaggcaaccgacaccttctcaacagtcccacccacacctccatcgatcacatccactgggcttacatctccacaaacccagacccacactctgtcaccttcagggtctggtaaaaccttcaccacggccctcatcagcaacgccacccctcttcctgtcacctacgcttcctcggcatccacaggtcacaccacccctcttcatgtcaccgatgcttcctcagtatccacaggtcacgccacccctcttcctgtcaccgacacttcctcagcatccacaggtcacgccacccctcttcctgtcaccagcccttcctcagcatccacaggtcacgccacccctcttcctgtcaccgacacttcctcagtatccacaggtgacaccacccctcttcctgtcaccgacgcttcctcagtagcatccacaggtgacaccacccctcttcatgtcaccgacacttcctcagcatccacaggtcacgccacccctcttcctgtcaccagcctttcctcagtatccacaggtgacaccacgcctcttcctgtcactagcccttcctcagcatccacaggtcacgccacccctcttcttgtcaccgacgcttcctcagtatccacaggtcacgccacccctcttcctgtcaccgacgcttcctcagcatccacaggtcacgccacccctcttcatgtcaccgagcttcctcagtatccacaggtgacaccacccctcttcctgtcaccggcccttcctcagcatccacaggtcacgccacccctcttcctgtcaccgacacttcctcagtatccacaggtcacgccacccctcttcctgtcaccagcctttcctcagcatccacaggtgacaccacccctcttcctgtcaccgacacttcctcagcatccacaggtcacgccacccctcttcctgtcaccagcctttcctcagtatccacaggtgacaccacccctcttcctgtcaccgacacttcctcagcatccacaggtcacgccacctctcttcttgtcaccgacgcttcctcagtatccacaggtcacgccacccctcttcatgtcaccgatgcttcctcagtatccacaggtgacaccacccctcttcctgtcaccagcccttcctcagcatccacaggtgacaccacccctcttcctgtcaccgacacttcctcagtatccacaggcgacaccacccctcttcttgtcaccgacacttcctcagtatccacaagccacgccacctctcttcctgtcaccgacacttcctcagtatccacaagccacgccacctctcttcctgtcaccgacccttcctcagcatccacaggtgacaccacccctcttcctgtcaccgacacttcctcagtatccacaagccacgccacctctcttcctgtcaccgacacttcctcagcatccacaagtcacgccacctctcttcctgtcactgacacttcctcagcatccacaggtcacgccacccctcttcctgtcaccgacacttcctcagcatccacaggtcacgccacccctcttcctgtcaccagcacttcctcagcatccacaggtcacaccacccctcttcctgtcaccgacacttcctcagcatccacaggtcacgccacccctcttcctgtcaccagcctttcctcagtatccacaggtgacaccacccctcttcctgtcactagcccttcctcagcatccacaggtcacgccacccctcttcctgtcaccgacgcttcctcagcatccacaggtcacgccacccctcttcctgtcaccagcccttcctcagcatccacaggtgacacacccngncgnncntacngtcccttccgtcgcagtagtctggggagtcctctagagtcgcctagatg

SEQ ID NO: 615811 - DNA, 174 bp, Homo sapiens
tgcagatccactctacaccacgacgctggtgcctccgtgttggccacactctggcgtcactgactggtttgactttcatgcggtgactatgcatttggtctgtactgatcatggagtcaacccatctctctttttttttttttttttttttttttttttttttttttttttttt

SEQ ID NO: 615812 - DNA, 4441 bp, Homo sapiens
aaagctcaaaccgacaccctcacgcagatgatgacatcaactcttttttcttccccaagtgtacacaatgtgatggagactgttacgcaggagacagctcctccagatgaaatgaccacatcatttccctccagtgtcaccaacacactcatgatgacatcaaagactataacaatgacaacctccacagactccactcttggaaacacagaagagacatcaacagcaggaactgaaagttctaccccagtgacctcagcagtctcaataacagctggacaggaaggacaatcacgaacaacttcctggaggacctctatccaagacacatcagcttcttctcagaaccactggactcggagcacgcagaccaccagggaatctcaaaccagcaccctaacacacagaaccacttcaactccttctttctctccaagtgtacacaatgtgacagggactgtttctcagaagacatctccttcaggtgaaacagctacctcatccctctgtagtgtcacaaacacatccatgatgacatcagagaagataacagtgacaacctccacaggctccactcttggaaacccaggggagacatcatcagtacctgttactggaagtcttatgccagtcacctcagcagccttagtaacagttgatccagaaggacaatcaccagcaactttctcaaggacttctactcaggacacaacagctttttctaagaaccaccagactcagagcgtggagaccaccagagtatctcaaatcaacaccctcaacaccctcacaccggttacaacatcaactgttttatcctcaccaagtggattcaacccaagtggaacagtttctcaggagacattcccttctggtgaaacaaccatctcatccccttccagtgtcagcaatacattcctggtaacatcaaaggtgttcagaatgccaatctccagagactctactcttggaaacacagaggagacatcactatctgtaagtggaaccatttctgcaatcacttccaaagtttcaaccatatggtggtcagacactctgtcaacagcactctcccccagttctctacctccaaaaatatccacagctttccacacccagcagagtgaaggtgcagagaccacaggacggcctcatgagaggagctcattctctccaggtgtgtctcaagaaatatttactctacatgaaacaacaacatggccttcctcattctccagcaaaggccacacaacttggtcacaaacagaactgccctcaacatcaacaggtgctgccactaggcttgtcacaggaaatccatctacagggacagctggcactattccaagggtcccctctaaggtctcagcaataggggaaccaggagagcccaccacatactcctcccacagcacaactctcccaaaaacaacaggggcaggcgcccagacacaatggacacaagaaacggggaccactggagaggctcttctcagcagcccaagctacagtgtgactcagatgataaaaacggccacatccccatcttcttcacctatgctggatagacacacatcacaacaaattacaacggcaccatcaacaaatcattcaacaatacattccacaagcacctctcctcaggaatcaccagctgtttcccaaaggggtcacactcaagccccgcagaccacacaagaatcacaaaccacgaggtccgtctcccccatgactgacaccaagacagtcaccaccccaggttcttccttcacagccagtgggcactcgccctcagaaattgttcctcaggacgcacccaccataagtgcagcaacaacctttgccccagctcccaccggggatggtcacacaacccaggccccgaccacagcactgcaggcagcacccagcagccatgatgccaccctggggccctcaggaggcacgtcactttccaaaacaggtgcccttactctggccaactctgtagtgtcaacaccagggggcccagaaggacaatggacatcagcctctgccagcacctcacctgacacagcagcagccatgacccatacccaccaggctgagagcacagaggcctctggacaaacacagaccagcgaaccggcctcctcagggtcacgaaccacctcagcgggcacagctaccccttcctcatccggggcgagtggcacaacaccttcaggaagcgaaggaatatccacctcaggagagacgacaaggttttcatcaaacccctccagggacagtcacacaacccagtcaacaaccgaattgctgtccgcctcagccagtcatggtgccatcccagtaagcacaggaatggcgtcttcgatcgtccccggcacctttcatcccaccctctctgaggcctccactgcagggagaccgacaggacagtcaagcccaacttctcccagtgcctctcctcaggagacagccgccatttcccggatggcccagactcagaggacaagaaccagcagagggtctgacactatcagcctggcgtcccaggcaaccgacaccttctcaacagtcccacccacacctccatcgatcacatccactgggcttacatctccacaaacccagacccacactctgtcaccttcagggtctggtaaaaccttcaccacggccctcatcagcaacgccacccctcttcctgtcacctacgcttcctcggcatccacaggtcacaccacccctcttcatgtcaccgatgcttcctcagtatccacaggtcacgccacccctcttcctgtcaccgacacttcctcagcatccacaggtcacgccacccctcttcctgtcaccagcccttcctcagcatccacaggtcacgccacccctcttcctgtcaccgacacttcctcagtatccacaggtgacaccacccctcttcctgtcaccgacgcttcctcagtagcatccacaggtgacaccacccctcttcatgtcaccgacacttcctcagcatccacaggtcacgccacccctcttcctgtcaccagcctttcctcagtatccacaggtgacaccacgcctcttcctgtcactagcccttcctcagcatccacaggtcacgccacccctcttcttgtcaccgacgcttcctcagtatccacaggtcacgccacccctcttcctgtcaccgacgcttcctcagcatccacaggtcacgccacccctcttcatgtcaccgacgcttcctcagcatccacaggtgacaccacctctcttcctgtcaccgacgcttcctcagcatccacaggtgacaccacccctcttcctgtcaccgacacttcctcagcatccacaggtgacaccacccctcttcctgtcaccaacgcttcctcagcatccacaggtcacgccacccctcttcatgtcaccaacgcttcctcagtatccacaggtgacaccacccctcttcctgtcaccggcccttcctcagcatccacaggtcacgccacccctcttcctgtcaccgacacttcctcagtatccacaggtcacgccacccctcttcctgtcaccagcctttcctcagcatccacaggtgacaccacccctcttcctgtcaccgacacttcctcagcatccacaggtcacgccacccctcttcctgtcaccagcctttcctcagtatccacaggtgacaccacccctcttcctgtcaccgacacttcctcagcatccacaggtcacgccacctctcttcttgtcaccgacgcttcctcagtatccacaggtcacgccacccctcttcatgtcaccgatgcttcctcagtatccacaggtgacaccacccctcttcctgtcaccagcccttcctcagcatccacaggtgacaccacccctcttcctgtcaccgacacttcctcagtatccacaggcgacaccacccctcttcttgtcaccgacacttcctcagtatccacaagccacgccacctctcttcctgtcaccgacacttcctcagtatccacaagccacgccacctctcttcctgtcaccgacccttcctcagcatccacaggtgacaccacccctcttcctgtcaccgacacttcctcagtatccacaagccacgccacctctcttcctgtcaccgacacttcctcagcatccacaagtcacgccacctctcttcctgtcactgacacttcctcagcatccacaggtcacgccacccctcttcctgtcaccgacacttcctcagcatccacaggtcacgccacccctcttcctgtcaccagcacttcctcagcatccacaggtcacaccacccctcttcctgtcaccgacacttcctcagcatccacaggtcacgccacccctcttcctgtcaccagcctttcctccccttcgtcgacgcggccgcgaatttagtagtagtagtagaccgccgctc

SEQ ID NO: 615813 - DNA, 472 bp, Homo sapiens
  misc_feature (228)..(228): n is a, c, g, or t
  misc_feature (350)..(350): n is a, c, g, or t
cccaggctggagtgcagtggtgcaatctcagctcactgcaacctctgcctcccgggttcaagcgattctcctgcctcagcctcctgagtagctgcaattacaggtgtgtgccaccacacccagctaatttttgtattagtagagatggggtttcaccatgttggccaggctgttctcgaactcctgacccgccttggtctcccgaagtgctggggattacaagcgtgngcaaccgcgggccagccttcaactttgcttttttactttaacgacatatcctggggatattagttccaatgttccattaaatgttaaaggcttaactcttcttttattttaaaaaaatggantaacatggagatttcccatcttaggcacaattattttaaaatccatttcccccgccaatgggaaggttggggttgttcttgatcttgtttttgataacaataaggcattgacatagtattac

SEQ ID NO: 615814 - DNA, 3809 bp, Homo sapiens
aaagctcaaaccgacaccctcacgcagatgatgacatcaactcttttttcttccccaagtgtacacaatgtgatggagactgttacgcaggagacagctcctccagatgaaatgaccacatcatttccctccagtgtcaccaacacactcatgatgacatcaaagactataacaatgacaacctccacagactccactcttggaaacacagaagagacatcaacagcaggaactgaaagttctaccccagtgacctcagcagtctcaataacagctggacaggaaggacaatcacgaacaacttcctggaggacctctatccaagacacatcagcttcttctcagaaccactggactcggagcacgcagaccaccagggaatctcaaaccagcaccctaacacacagaaccacttcaactccttctttctctccaagtgtacacaatgtgacagggactgtttctcagaagacatctccttcaggtgaaacagctacctcatccctctgtagtgtcacaaacacatccatgatgacatcagagaagataacagtgacaacctccacaggctccactcttggaaacccaggggagacatcatcagtacctgttactggaagtcttatgccagtcacctcagcagccttagtaacagttgatccagaaggacaatcaccagcaactttctcaaggacttctactcaggacacaacagctttttctaagaaccaccagactcagagcgtggagaccaccagagtatctcaaatcaacaccctcaacaccctcacaccggttacaacatcaactgttttatcctcaccaagtggattcaacccaagtggaacagtttctcaggagacattcccttctggtgaaacaaccatctcatccccttccagtgtcagcaatacattcctggtaacatcaaaggtgttcagaatgccaatctccagagactctactcttggaaacacagaggagacatcactatctgtaagtggaaccatttctgcaatcacttccaaagtttcaaccatatggtggtcagacactctgtcaacagcactctcccccagttctctacctccaaaaatatccacagctttccacacccagcagagtgaaggtgcagagaccacaggacggcctcatgagaggagctcattctctccaggtgtgtctcaagaaatatttactctacatgaaacaacaacatggccttcctcattctccagcaaaggccacacaacttggtcacaaacagaactgccctcaacatcaacaggtgctgccactaggcttgtcacaggaaatccatctacagggacagctggcactattccaagggtcccctctaaggtctcagcaataggggaaccaggagagcccaccacatactcctcccacagcacaactctcccaaaaacaacaggggcaggcgcccagacacaatggacacaagaaacggggaccactggagaggctcttctcagcagcccaagctacagtgtgactcagatgataaaaacggccacatccccatcttcttcacctatgctggatagacacacatcacaacaaattacaacggcaccatcaacaaatcattcaacaatacattccacaagcacctctcctcaggaatcaccagctgtttcccaaaggggtcacactcaagccccgcagaccacacaagaatcacaaaccacgaggtccgtctcccccatgactgacaccaagacagtcaccaccccaggttcttccttcacagccagtgggcactcgccctcagaaattgttcctcaggacgcacccaccataagtgcagcaacaacctttgccccagctcccaccggggatggtcacacaacccaggccccgaccacagcactgcaggcagcacccagcagccatgatgccaccctggggccctcaggaggcacgtcactttccaaaacaggtgcccttactctggccaactctgtagtgtcaacaccagggggcccagaaggacaatggacatcagcctctgccagcacctcacctgacacagcagcagccatgacccatacccaccaggctgagagcacagaggcctctggacaaacacagaccagcgaaccggcctcctcagggtcacgaaccacctcagcgggcacagctaccccttcctcatccggggcgagtggcacaacaccttcaggaagcgaaggaatatccacctcaggagagacgacaaggttttcatcaaacccctccagggacagtcacacaacccagtcaacaaccgaattgctgtccgcctcagccagtcatggtgccatcccagtaagcacaggaatggcgtcttcgatcgtccccggcacctttcatcccaccctctctgaggcctccactgcagggagaccgacaggacagtcaagcccaacttctcccagtgcctctcctcaggagacagccgccatttcccggatggcccagactcagaggacaagaaccagcagagggtctgacactatcagcctggcgtcccaggcaaccgacaccttctcaacagtcccacccacacctccatcgatcacatccactgggcttacatctccacaaacccagacccacactctgtcaccttcagggtctggtaaaaccttcaccacggccctcatcagcaacgccacccctcttcctgtcacctacgcttcctcggcatccacaggtcacaccacccctcttcatgtcaccgatgcttcctcagtatccacaggtcacgccacccctcttcctgtcaccgacacttcctcagcatccacaggtcacgccacccctcttcctgtcaccagcccttcctcagcatccacaggtcacgccacccctcttcctgtcaccgacacttcctcagtatccacaggtgacaccacccctcttcctgtcaccgacgcttcctcagtagcatccacaggtgacaccacccctcttcatgtcaccgacacttcctcagcatccacaggtcacgccacccctcttcctgtcaccagcctttcctcagtatccacaggtgacaccacgcctcttcctgtcactagcccttcctcagcatccacaggtcacgccacccctcttcttgtcaccgacgcttcctcagtatccacaggtcacgccacccctcttcctgtcaccgacgcttcctcagcatccacaggtcacgccacccctcttcatgtcaccgagcttcctcagtatccacaggtgacaccacccctcttcctgtcaccggcccttcctcagcatccacaggtcacgccacccctcttcctgtcaccgacacttcctcagtatccacaggtcacgccacccctcttcctgtcaccagcctttcctcagcatccacaggtgacaccacccctcttcctgtcaccgacacttcctcagcatccacaggtcacgccacccctcttcctgtcaccagcctttcctcagtatccacaggtgacaccacccctcttcctgtcaccgacacttcctcagcatccacaggtcacaccacccctcttcctgtcaccgacgcttcgtcagtatccacaggtgacaccacccgtcttcctgtcaccagcccttcctcagcatccacaggtcacaccacccctcttcctgtcaccgacacttcctcagcatccacaggtcagacaccacccctcttcctgtcaccaatgcttcctcattatccacacgtcacgccacctctcttcatgtcaccagcccttcgtcgacgcggccgcgaatttagtagtagtagtagaccgccgctc

SEQ ID NO: 615815 - DNA, 250 bp, Homo sapiens
tggaccatactcatgctcttgagacctgtcaacaggttggctcttcagtttgtggccacaccttcctacagaacttcaaaggtgatttctgtggaccctctgcctggtgtgtgaccttggtctcaattcttgaagcttcaccagtgaagtgcatgcagtccgtttaatgccagttgagggaatgcttcagaaatttgatgaccagtgtccccgcagtgcaagtgggatccatcgtagatgtctgaccgtg

SEQ ID NO: 615816 - DNA, 448 bp, Homo sapiens
  misc_feature (237)..(237): n is a, c, g, or t
ctgggcggctcagaaaattaaacccagacttactacccatttccaccccccaccaacccccttctagggcctactttaaaaaatttaatagttttctatggaacggatctaaaattaaaaaatttatttttcctttatttccattataaactttaatttacatgactctaagactataaaaaaatctgagggcagtgacaagttgctagcatttatggtcatctaataaagacctgngagcatatgtgcaccttatgagtgtatcagtaatggcatgtaatttgggccttggttaaagccgtgacctggtaagaaattgaacattcaatttctttttccaaggacgagctataaaaaagctatggagagtatctagtcacccagtgcagtattgggaaccctggctggtgtatggtgaggtgctccggggcttgggaaggacttaatc

SEQ ID NO: 615817 - DNA, 177 bp, Homo sapiens
gtgtacacatagagaatcgtctcaacaaaaaagtaattttagccaggttctgtgagctgtagtcccagctacaaggtgggaggatgcttaggcctgggtgattgaggatgcaatgagctgtgattgtgccaccacactccagcctgggcaatacagcaagactttccgtatggatgc

SEQ ID NO: 615818 - DNA, 663 bp, Homo sapiens
ggcacgaggagataactactatcccgtctcaccgtgaaagctgtcggaatgcaaattctcaccatcattcatacattgaagcccacataaagaaggccacatggttgaccaaattgatgaattttcccggttatgcctatacacctactctatgggaacatcagacgaatggccgggggatggggggacggctgcttcgcatgtgcgtgacgtgcatgcaaggctcttacatggacagtcatgagccgaagggagctgggtttgccggggcagggttgtgaccttgctgagtacaccaggtcgcctgatgcggcccgtgggcggcgggggagggggcctgcgggggggcccggggggggggggaggttctacgggccctgaagctttggtgtaagaggctgggcaggtgctgggccttcctgggggctggtgggggtcttcagacaggtccagtagagcccgggcgaaggggaatgtggtagggtgagcatttgtggaacctggtcgcgatgaagtgccaggcggggaatcggggggcgctgtgcgccgagggtgctgggccgtttggggcggtgccgatgggttggccgggagattgtgtgggtggaggggttgaggggatgcgggcgcggggaggggtgtggtgagggggggcgagggggg

SEQ ID NO: 615819 - DNA, 442 bp, Homo sapiens
  misc_feature (383)..(383): n is a, c, g, or t
tgagcatctgtgcttcaggactctctaggttctaccatcaagacagagaatggtgtgatactcaggttaacaaggtgagtccaggagtgttgccctggaggcataaaacaggggcccagcctttggagataaagcatgctctggtcctaaatggcagcaggagaagaatcttcccaaagtgagagtcaggccacaatacctcccctgggaggacgtctgtgcctgtgtatgttggagagagaaggagctttttcatcccaagtgagtagagaggttacatcctctgactgcttccccctctctctgtctttctctctctcctgctgtgaaggccaagtatgacttcacagaatccctaagctccataaatcagttctagatcncatcccttgcagctgtaatgaaagcaggattttaataaaaactggatacttctactgtt

SEQ ID NO: 615820 - DNA, 155 bp, Homo sapiens
gagcttatgaatcgacggtttctaacctttgaggttaagtgtcctctgtcacacaggctggagtgcagagggcaatctcagctcactgaaactccgcccactacaacctccgactcccaggttcacgcgattcccctgcctcagcctccacagta

SEQ ID NO: 615821 - DNA, 444 bp, Homo sapiens
cccgtgagtacccttctgcacgtaatcgttcatctggttcatggcctaatcggtgtcacaggagtttctagtcaaggcttctgagtggctcagcttcttccagtcctacacagccttatccactagctgcaggtccgcggtcaggaccaggccattgtcggtggtcagctgtagatggctgtctggctggttgagggtatggagaagttcctggaagccttcatggatctgagcctgggcaatccctgtcaggttgaaatccagtgccctccaggatttcatcgtaagtgtcagcgttggtcctcagggagagcagtgcataggctgtagcgatgctcactggggagaagatcatattggtcctgttgcactggtgtgccagctgacggtataggctgaagtcgaacgcatacaggtgtctggtggtcatgttgaaggttgggt

SEQ ID NO: 615822 - DNA, 489 bp, Homo sapiens
gcacgagaacatctgtggtttctactggggacagagtcacgggtactggccaattcttctgtggtttattgccttcctttgtgattgaaggagatgccaatttttagttaaaggtttgtgaaaataaagatgtaatttttttccccatccaagctcaaggaccctctgaattctgtccacagagtgcttgtgtctctctggaccagattaagaaccttggggccaggcacagtggctcacgcctgtaatcccagcactttggggggccgaggcaggcggatcacttaagttcaggagtttgagactatcctagacaacatggcaaaaccctgtctctctacaaataagctgggtgtggtggctcatgcctatagtctcaactactcaggaggctgaggctggaagcttgcttgaacctgagaagtcgaggctgcagtgaaccatgatcatgccactgcatgacagaacaagaccctgtcaaaaaaaaaa

SEQ ID NO: 615823 - DNA, 252 bp, Homo sapiens
cagagatgatgccactgcactccagcctgggctgacagagcaagactccatctcaaaaaaaaaaaaaaggttgttgaattcaggcagggctttcaaaatcccgggccaaggtgatttggaaactctggggcccctgggttagggcctttctaaggcccgtgcaataaccctcttcctcaattaagcatgtgggcaatgtctctaacttctcttaacccagttttaacggggcgggtgtaagacgctttaacc

SEQ ID NO: 615824 - DNA, 100 bp, Homo sapiens
actgtatgtcacggttacctgctgtagaggaagaaggagccgtcggagtcaagctctgtccacggtgagcttgctatagaggaagaaggagccgtcggag

SEQ ID NO: 615825 - DNA, 144 bp, Homo sapiens
cacgaggaagctcttaactgctgccacgatcctagctgatgccacagccaagatggtacaggttgccatgggatcagctgcccaccctgacagtgaggagcatcatcagcggttgctggaggtatctgaggggctgcgcatggc

SEQ ID NO: 615826 - DNA, 350 bp, Homo sapiens
  misc_feature (1)..(1): n is a, c, g, or t
nttggcttctgtgaatacccatataggaatatagggttaaaagttgggcaccaatatcttctctgttctccattaagcctcatgtaaatctcacaagtgtggttacacaaaatgcctttccccaaggccagaagtcaaaaccttgtgggcccatatatatatcaagttataggccattcatatatctcatagattaactcttttttttttttttttaaggtgaagtttcactcgtgtcgccagtgtgcatccatctataaaaaaaaaaaataaataagcacaacactttcactattcacatactaagcttgtgtgtgtccaagtatgtgacctcggcatatctacagccg

SEQ ID NO: 615827 - DNA, 264 bp, Homo sapiens
  misc_feature (61)..(61): n is a, c, g, or t
  misc_feature (67)..(67): n is a, c, g, or t
gcgtcagacggaggcctatgtaactggaatggaatgagtgaagtgccaagtactgggaganaagganagcaggtcagggttgtcagtagagggtgctcctaccaagccttattagactgtcactttgcagttcaattatagcataatcatactatttttcttcagttagcaataggttgtttgaaggcagaatctgtgtgacggtcattttgtatttcgacatccagcactgcaacacgttaaggcttaaatgtgtggtcgacg

SEQ ID NO: 615828 - DNA, 1425 bp, Homo sapiens
  misc_feature (164)..(164): n is a, c, g, or t
  misc_feature (1084)..(1084): n is a, c, g, or t
ccatcttcattcgtctgtcgattattagtgaagaagatttgatggcatggccttgatcaaccttccatgactgacaagatgtcgtccagctaatcacttcattgtagtcctctcacgagcgagattcgcgtaagggcgctcaatccctggtccgctatgtgatntaggaactattccttatactcctccagctcttactcttgattcggccatgctaccagggagtatcgtactgcgagtcaattcctgaattgaagtgcaagccttagcgcgcaaagctagagtgggatcgtaacaattcaagacattcgtaacacctcttcgataataccaaaaactcacactcatactatatgtaccaaaagatgcattttgataagtgcatcaataccctagggaacttattgtctataacttaggatcagtaccttattaaattcctataatttggtaatttccggacgcgaggcacaccttctaagacctcaactttccgttttggctttgcttgcccttttcaacttccatttcaattgaaccccacaatggcacaactccacattctaacgtctaacttatacatccagtaagacactagtggagtccctagttgcggcgcgctttaaagtaggatggcggagggccagacccttatgaaattatccttaggagacctttgtgctgtcgttcctaagactggaccttttagactatgggagtaggtcgcccatgagtagcggctcacttttcacgtgatctcactcacacgcgcggacacatttcctaatacatgctaccctattagttccccccaataagcttaggtttgactttacttgggaggatacttcatttctagggcccttagccttcggagttggcaatctctaggttaacgctcagctagggtcccgtacaggcgccctgagagtcccgtttgaaaatctattttaagttaggggaaggggctcggaacataaaactactgatatggcggtcgtttaacttgtgtggggaagggcacctcagagcgctttgttggccatttgagtgtctcaaaggcgcctcttttaagagacttttntccccgtagatataaaaaggtgtggaggtcccaaactattcttcccgggaagataccgtagacagtcgggtagccccgggaagaggagactccccccaggaaagaaaatcgatgtgggcgcctgaccgcgtggaaaacccccaactagccccgaccgaggtgttgctgacgaccccactcgaagcgcaagagcccaccatgagccggggccgccgaaagtacccccggctgccgcaccacatgctgacaaaacaaggaggagcgaggggcgacccacaaaaaacatccaccacccgaggcgcagccaaagatcgcggagccgcacagaagcgtcgcgcgaa

SEQ ID NO: 615829 - DNA, 861 bp, Homo sapiens
tcagagcctggctgagacgggactcccggaggagctttgcaggaatgttgcaaggcccggagcttttttctcaaaaggaagatgtggtcattgtgctgcaccggatgccaccctgatttcgggattcttaccacacaccatgctgtggttgttccttggtgccgctgatggcaccccaaggggcctctcctgccaaccccctggtgacacgacaccactgttcccccgacccatctctatttgagcccagaccacaggctttgttagaactcactctggactgttacgtggccactggtaggttgggaccacccagggccagaaagatctcaacgcctctcctgaaacatgacatgtgtttgccaccgtgcttttacatgggaccagccccgagcctgggcgtgccccatccatgggagcccccacgcccgatcatagggatagataggaggacatctggactggaggcccctggagcccagatggcaaaagggtgtaccagcttcctttcctgagtgtacatctgtcacagattcctttagaaaaaatggatgcccagaggactcccccaacctggcttggggtccaagaaaccaacccagaccagagtttaggggacttagggcactgggctgttgttcccattgaagaccgactctggcctggcccttacttgcttctctagctctttaggcctctcccgtttgcacctgtcccccccctcccatcagctgtcctgcagccaaccctcccccctccaccgttcccttttcccccccttctgcagcacctcccggcctgttgctatagagcctaccctgtatgtccattaccacagctgaagccaaaaaaaaaaaataa

SEQ ID NO: 615830 - DNA, 1049 bp, Homo sapiens
gcagcagtgcctgtggtgcaccctggagccctgagggcctggttacctcagccgacggggactcacctggagcgcccagctgggcccccatcacccacactccttcctggccctacgaggtgggtcccgcagcccgcgtgacaccccaccggcctgcacatctgtggtgcctgcactctagcctgcaccatgtactggtctcgggagggcttgcagtgccagacctgccagtggtgagaccaccccacagtggacctctgcatgacctactgcaacgtggattgggtgacgtgccaggggcaccgaaacagtggcacagctgccagaggatggtgaggcctggaccttcactgcggcatggacccacagccttccagccctggacgctggagtgccgccaaggctaccttgacggcggcccctgggtgcttgcggtgggaacccatggcgctgacgaaggcaccctggcacctgtgccccaagaggcacacctgatgcatgcattgcgaccagcggggacttcccgagggatgccagggcccaagcagcttggacacgatgcagaccttggagccctcagaggtgcttgctgtaattgcacactggctgacccctgaccaggaagccagccaggcaagcacccacgtgggcaacaggcttgaacgcaccctggggtcagttatacgggacatagcacccaatagcaccacatgccttgttggcagctggggaacgcggagagaccccacggaccagggttgccccctcattcaatcccagtaaagatgccggattgagaggaggaatcagcagacgcgcgacagggaccctgagcggcgcgcaagatagaaggacatttgaaaccacggcacatatcggatgggcgctccagcacgggtcagagatggaacagcaaaacggaaggctgtcacgtgagcattgaccctatggaaggcgggacacacagcgcggcaaaacggctcatagccctactcaatggagtgaaccttggaacccgccgaaatattcacagatgaacataaccttgg

SEQ ID NO: 615831 - DNA, 402 bp, Homo sapiens
cgagccgccgctttggtcacagtgaccgccaccgttgccgggggatgggtccctgagacttggcgaagtaggagccctgtgtgatcgtgcgtcagagtcggggctgagaccagccctggccagggcagttaccaggacggtctccggaggccgggattcgcggagggtccaccagcaggaagaagaccccgaggaggacagaacacctcgagacaggatcgcctggggacggcagcagcgggatcccagcctcaggcgtgcgcggacggtgtgcggagtctagctttgtaccaggctgcagtgcagtagtgccatctcacgctcactggcaaccgtcgtgccttcaccggagttacaaggcggattggtacctagcacttcagacccttccgcgaagatcac

SEQ ID NO: 615832 - DNA, 899 bp, Homo sapiens
gctcgagtattgtttttgaagatagagtctcactctgcaggcccgggctagagtgcagtggtgggatctcggtcactgaacctctgcctccggtgggttcaagtgatcctccgcacctcagcgctcctgagtagctgggataacagggcgacccgccagccaggtccagctaattttatatatttttgagtagagacggggtttcaccatgtgggtcagcgcgggtcttgaactcctgacctcaggtgatccgtgggcctcggcctcccagaagtgctgggattataggcgtgagcctcttggcccggcctttcctttgtcctctcctctcctgccgagagtggaccacgcgtgtcctgggagctgcatctgggtgatagggagtccagcatgcattatgggggactgcgaggaatcatcctcccctgtgggcccgtggacgtcggagacctggggccttcgcccacgctcccgtctcggcttgtgcctaacggagccccaaattccaggcctccagtgtgcgcatggtggggttcccagatagcgcgcatgctccattgtggaccttccaatgcagggcccatacggaccataccctgtctgacatgagagagacgcctgggggtaccccaaaaggcccaattggtgacaacatctcccaggcataagggccaatttggcgcttatgggcagtatcccccggtgacctggtcaccatttccccgagacccacactaccccttcctagatgccccttggaaagggcttccgggcacttatgaggtgtgaccccattggggatgtcaacacactgggtagcccttgaccttgatatgaccccagtttagccattctcaaggggagcccacagctggaggggcccttgaaccctgggactg

SEQ ID NO: 615833 - DNA, 241 bp, Homo sapiens
atcaggcgagacgtggcgctttgtgttgaagaggagccggtgtctgtccagctgtttctctacttccagggtcaccgtgtctcttccccaccgactgcctgttattgagacgttgtctttgtctttgtagttttgggtcacctctctcccccaccgtctgcctgttactgagacgttgtctttgtctttgttgttctgggtcacctctctcccccacagtcttcgcctgatgggtaccgag

SEQ ID NO: 615834 - DNA, 540 bp, Homo sapiens
  misc_feature (114)..(114): n is a, c, g, or t
  misc_feature (202)..(202): n is a, c, g, or t
  misc_feature (228)..(228): n is a, c, g, or t
  misc_feature (343)..(343): n is a, c, g, or t
  misc_feature (378)..(378): n is a, c, g, or t
agcagtacttattaatcatctccaagcatatcctcactagattctcattaattacaaagggaaaaatagtaacttcagaatggataaccccagaaggaaccaccataactaacngaccaaagctgatgcccgcaatcaagagacaaatcaatatcatgtatctcatgaaacaatacacgagaaagaacacgctttctttttnggcatttctaccaaaatacacagccngattctaatcataaggaagcatcacatgaacccagttgaaggatacttgacaaaacagctgacctacactcttcaaatatgtcaaggtcataaaagggcaagacagaggaacaangctagattaaagaatatgggccaggtgagatgtantcccagcacttggggaggccaaagcgggcagatggcttgagcccaggagttcaaggccagcctgggcaaggtggtgagacatcatctctacaaaaaatacaaaaactagccagatgtggtgatgcatgcctgtagtcccaggtactcaggaggctgaggtgg

SEQ ID NO: 615835 - DNA, 378 bp, Homo sapiens
ctagaatgcagttgttagcagcagcgaatctgcatgggtctgcagcaacctcaagtctcctcagaagaaagaatttgaccaaggggcataaggcagaaggagagacccgggcaagcttcagagcaagagtggaagtttattaaaaagcttcagagcaggaatgaaagaaaagtacacttggaagagagccaaacaggtgacttgagagatcaagtaaaacctcattaacgtaactgcaacaatgaagacattacctagacgtgctggcttcctctttgccttcctccatgatgtaagtttcctgaggactccccagccatgcttcctgtacagcctgtggaactgtgaaccaattaaaccttttttctttataaatta

SEQ ID NO: 615836 - DNA, 635 bp, Homo sapiens
  misc_feature (351)..(351): n is a, c, g, or t
  misc_feature (384)..(384): n is a, c, g, or t
  misc_feature (468)..(469): n is a, c, g, or t
gcaggaattcggcacgaggccctccccaccgacccgccacctgccacctctgacggagtgggagaagttagtctgtgctaagatagtactgagtccccagatgttgtatactgtaaattacagtataatgccaaatgcagcaaaatcttccagctgtacgttacaagtttggtcaattttgaagcttgacattttagtttgccattatgttatcctgtaaagcagacatcgttcttggcctgccctgcattgtatactagatttcattggtgtctctcatgcttcttgagttgcttcatggtttatgctcgccatggaaagctatcagtaacagtttcatgcttataccanagaattaaatctgatctttaatatctgatattntcctggtactcgtactgataagggattattggaagtagtcacagaatttggaataaatctagtctctcctagctattgatgctnntatatagccaagactcatgcaaacattttgcaggataatgccgatttgtctatgacagtcatttagctgattagatactggagctatttaagcatgaaagcactgactcaattgctgcttagatgctcggaaatttggataagggttcatttctggctactataag

SEQ ID NO: 615837 - DNA, 533 bp, Homo sapiens
  misc_feature (45)..(45): n is a, c, g, or t
tgataccttatagagaaaagtgtgaattcaggtggagagtaggcncaggccccatgaggcaccagtggaagcacagctccaagttcagacaggtgcccttagagaggaaaaccatgacaggcaaatgcatttcctctggagtttgagaccctgacaaacaacaggtggcatctggtgtgctgttcttgagttttcgtttaggattagttgagttccagctgggttttgggagaaaggagatgctaccaagtcttggatgttagggcgagaccctgcaagttgagtattagagagcttgtctttcaaggcaggttcctggggcttcagggctaggagggaggagcctgccttttaaacagaacccccagtcacattcgggtcaaggccatccggagcttgttccattccagggttttgttggccctttgtttcccccttaacccacagctgtttgtgtttcacatatgttgtgaatttcccttggttctttttaaaggattgatattaaagttacttgctttggaaaaaaaaaa

SEQ ID NO: 615838 - DNA, 332 bp, Homo sapiens
ggggtagtgggtttgtaatcaacttctgagagtacctcagtatgttttggatccccatcctttatcaggtgtgtgtctaacaaatatcttctctcagcctgtgcttgcctatcattctaacatcttacagtgctctgcagtgcgtcactactcctgacatagtagacactcacacccacctcaatccactgcgctgcaccatcacattagctgctctggcccccaaacaccacagcatactacagaaaatcaggctgtccaagtgccctcatcgttgccgtctcaggcagctcagtgcggcacagtggagcccaataatgcacgtgcacgtc

SEQ ID NO: 615839 - DNA, 277 bp, Homo sapiens
gccattcagacttgaggaagacccggaaacttagggggccacggttagccacggccacggccccaataggcaagcaccaaaagcacccccgcggccgcggggtaattccttgatggtctcaataccacccggaaataaccttgacaaaatgaggtctccttgacctctctttatttacacagcgcttggagggatggggcaggaggagagggctctgccctatacacaaaaggttatgaaagcacagcccccttctatctctcgtgttttaccacgg

SEQ ID NO: 615840 - DNA, 224 bp, Homo sapiens
atgctgttagcaccgcgtatctcaacgattcagacaactccactgacggatacacggagatgatcatgcgatttagggttagccatgcagtagtactgtgaacatctgtctgttctttagagatcccggaacttgcaggatttgatatatgtgagtctgctagagcacttgctagtttgattagacaatcagtaacgggatgaggatacatgtgtgagagccgc

SEQ ID NO: 615841 - DNA, 169 bp, Homo sapiens
aatgggaggaggcgccgctcagcccctcaccttgaatcattaaaaagcggcgcctttgaaacaagcagggcttcagaaggtgcccgctggccacagccaggttttcccaaaaaaaatgttattttgttgggttttgttccccccccatctcgattttggtacccaacta

SEQ ID NO: 615842 - DNA, 958 bp, Homo sapiens
gcaatgcttgtccctaaagtcaggaagtaccttgctagtaagacactacctttgaaagttctttgatactggacaatgcccctggccacctaaaaccccataaattcaacaccaaagcgatgaagtggtctctgtgctcccaaacacaacatctttaattcaggaataagggggtcataaggactttttagatccattacacacagtactctggaaaggactgtcaatactgtgaaagagaaccccaagagagaacattatgaacagtctggaaggaatgattatgccatgccactgaaaatgccatcattgttacagaaaaagctgtgaaagccaacaagcccaaaacaataaattctggctggcgaaacctgtgcagatgttgtgcataacttcataggatttacaaacagagtcaatcaaggaaactcatgaaacgagatgtggatgtggcaaaaaaagtggggtgtgaagggttctcaagagaaattcaggagctaataaaccccacaccataggaatgaacagatgcatctgttgatggacgacgagtgcttccaaatcagtgcacagatgatgaggaacaaaacttagaagcaatgcccaaaggaacaaaggatgctggtaatgacaaatctggacaggcaggggtccacttattccaaggctgcttcggaacttctttttaccaacatggactccattctaatgataatggcaatgaaaattaaggcacacagttaaacgaaagatgggtaccatcttgaacgactttagacgactgacaccgcccagtcccttcacacgcactctgaaattgaacaccgtgctgctctgtgctccctcagcgggcacctgatcagcgaccaacgttcgtccccgtctccggactgcccgccttgaggcacccctcagcggcagctccttggactaaatggtgcaccggaatatacaaaag

SEQ ID NO: 615843 - DNA, 895 bp, Homo sapiens
gccgcacgttgaacaattcttggcgggtagtagggcgcccgccaaccaagaacaacaccggggtccttttaaccgctgcaacatggcagcattgcttgggcgcgagcctggagcaccccccgcccccctccggtgcgggtaggacaatcggcgtctcgtagccaccactgtgctccaagctgcagcgatcgctggggagcaagtgcgactggtcgcaaagtgcaaaagtgcgttgtactgcgagcaagaggcgtcccacaggaacgcacccgtgcccaaaaacggctgagtccccgtcccgcgtggggtgggaaggggggccccccgtgctttggtgggcatccaaagggcgcgactgtcccggcctttcaatatgctgccctcggttgtttctagatagtgtgtcttcctccctgccccggcacgcacgcttgttgtccctcctcgcggcggggaggtccctcggcgcctcctttgcttgagaggccgactcctcgttgctggtcaggaacagtgtacgcttcgtgactgatttgctatctctcgctatctaagggagcccctcgccgcgcctctctcctggggtgcttccagcgcccacgcgagtgcccaccagttttctggccccccctgtttcccgcgcgtggtaagacgcgtggacacacaggttgttgtgcgcacaggctctcgttgacaccaagcacttccctgccggtcagcgtgccgtgtggaccggcacacttggttgactcttgtgtcaccgacgtggagacacaccccggagatccccacccctctggggggaggctcaccaaggggagcgtgcgatctccatggcgcgtcaggggttcaagacaccccccctccggccaaaataggcccccctttcgcaaat

SEQ ID NO: 615844 - DNA, 314 bp, Homo sapiens
  misc_feature (16)..(16): n is a, c, g, or t
  misc_feature (25)..(25): n is a, c, g, or t
aaaccctggctttacnaaaaatacnaaattatccaggcatggtggcgtgcacctgtaatcccagttactcgggaggttgaggcaggagaattgcatgaacctgagaggtggaggttgcagtgagccaagattgtgccactgcactccagcctgggccacagagcaatactgtcttaaaaaaaaaaaatcattgggcaggccaggcagagtggctcacacctgtgatcccaggactttgagaggccaagggtggtggattgcttgagcccatgaggctgagaccagcttgtgtggcacggcaaaaccccatctct

SEQ ID NO: 615845 - DNA, 122 bp, Homo sapiens
  misc_feature (11)..(11): n is a, c, g, or t
  misc_feature (33)..(33): n is a, c, g, or t
  misc_feature (77)..(77): n is a, c, g, or t
gactctgctgntcctgggcttgcatcccagggntcccagagtggcctgcctatcacaaccacatccctttccccccncaaggcaataaatctcatttctttataaaaaaaaaaaaccccaaa

SEQ ID NO: 615846 - DNA, 333 bp, Homo sapiens
  misc_feature (43)..(43): n is a, c, g, or t
  misc_feature (67)..(67): n is a, c, g, or t
  misc_feature (99)..(99): n is a, c, g, or t
  misc_feature (117)..(117): n is a, c, g, or t
  misc_feature (304)..(304): n is a, c, g, or t
aaaaagaaaagaattataaacgggcataaataaaatgtttggntgtaagtagggtgcgatggctcanacctgtaatcccagcaatttgggaggctgaancgggaggatcacttgagncccaggagtttgagaccagcctgggcaacacggtgagacacccacctctacataaaaatgtgaaaattagcccaggtgtggtggcacacactgcggtcccaccttctcaggaggccgaggtgggaggatcgcttgagcctaacagtttgaggttacagagagccatgatcacgccactgcccccaancctgggcaacagtcaagatcctgtctcta

SEQ ID NO: 615847 - DNA, 374 bp, Homo sapiens
atcaagaccatcctggccaacatggtgaaaccccatctctactgaatacacaaaaattggctggacatggtggcgcatgtctgtaatcccagctactgtaatctcagctactcgggaggctgaggcaggagaattgcctcaaccgggagcggaggttgcagtgagccaagatcgcaccactgcactccagcctggcaacagagcgagactctttctcagcaaagcaaccaaaaccagttaggctgggtatggtgctcaccagcacttagggaggctaggcagtggatctctgagtcgggatttagccacctgccacatgtcaacctttcttactaaatacaaatagcagcatgtgcgttcatatccactacttg

SEQ ID NO: 615848 - DNA, 1125 bp, Homo sapiens
gatcgcaaaggtagcatccagcggtagggcgcctgcaataccatttcctggtctgcttctatctatatgtgcattcagccgactataatgtctttagtgcctgatatagaagagtctcgctagaagtaccatactaagtagggcagacgatgtgtaatccaatggttgacactaatacgagtggcagcccgagatagaatcgtggtctagccagaattgtccagcgtaagaaccatgcaatacgcaaccataatacctgaatatcccaagatccatagtataactaccattctgcgtaagtagcagaatccctgagacgcacaaaggaattacgccaagatggtcgccatcaaatgcgggaaacgaaagtgaaagtgaaacataagctagtgagagtcttagggactgtggagcaggtacttgcgaccattcttgataaatgtgtggaagatttagagagttgtaaaaaggtgagcgttatgcccaatatatatgagccatacacacgatcttggagtttgatattctatgctagtcctgtgtaaaacgatagatttgtacgtcaatgcactatttcgaatccgggtgaatttagcccatccgtttcctttaagatagttctactctctttgaatttgcccttgataaaaattgtttatttttggccaagcaattcccaacaattccttcgtttcgggcattccaaagcttgtggtctctaaattgtgggttctttccagatctcatccccaagtaaggtacaagcccctcaaacaccgattgcgaacaaaccctgttcccaggatagaatagcgcgggggccacgaccttgtgaacagcgcacggatggaacgaacgttaaaagctggggtaacctaagattattgaaataagagtgttgtggcaatatggttattgccaaggtgtaaccattatgaaatttcaacgaaattatgcttatggtggattgggatgcggtcaaacttcttttttaaaagagatcccaggttattttgagccaaccgtttgggtaaggcatttatcccggggataaaggagatacacataggtgaggtggaaattagagaaaaagcgccgagaataggccaatattaaatgtgaaac

SEQ ID NO: 615849 - DNA, 433 bp, Homo sapiens
catggttcaagttagagatcactcttgatgtagtacatcctatgggctttgataattataaaatgacatgtatccaccattatagtattatacagagtagtttcactgccctaaaaatcttctgtgttctgcctatttatcccaccctccctccaacccctggcaaccactgatctttttactgtctccatagttttgccttttccatatgtcatatcattggaatcatacagtatgtgacttcttaagattgtcttctttaacttacttagtaatatccatttaaggttcctgcatgtcttttcatgacttgatagctcatttcttttagtgctaagtaatattcgattgtctgaatatactactactgaaggacatcttggttgcttccaagttttgaaaattatgaataaacctgccgtagacatccaaa

SEQ ID NO: 615850 - DNA, 268 bp, Homo sapiens
tatgattcatcaaggggactctggatgtcagacttctctatagacgaatgaatgaatgtgaagcgaaattcacaggcttcgtggatgcggactttgtaggagacttggacacaagacgatctttgactggttatgtcttcactttgtttgggtgtgcagttaagttggaaagctcaactacatcatgtagtcaagtacattgccacaacaaaaggcgtaaaggaatctctttggttgaagggattgatcaatgtaccataacaccaca

SEQ ID NO: 615851 - DNA, 1263 bp, Homo sapiens
  misc_feature (827)..(827): n is a, c, g, or t
agcggatcttcccgtcgccgcccttgtcctcgcgtctctcgcgctaccctcccgccgcccgcgggtcctccgtcgtgttctctcgtttgagtccacggtctggtcgttcggtcttcccgcctcttcgcttgtccaacttttgcgaacgtcggcgggaccgcgccgtgcccggccgcggaacgcagggactgtgagctcaggcactacgctgtgaccatgcatgctgactggccgtgcccatctcgagagacgaaactgtgtgaatagtggaggagagtggatccctggtggaaagaacatgctttgctcacgtagtcttcatgcaataggcaccaggctctcccacgacgtgtgatagtggtgcccatcaggttggtttgtgatgaactatattgttgaggccgatctaatcgaagggtggaatggacaaggcaggatagacgcttggactgttgtaggcatcaacaggcttgggactcgaaagaatgtacttgatcgcacatgaaggcccccatcatccatactccaggagtacccgcactggtataatacttgatgatggtgtgtattccagtccgcaaccaaggccgtaggaataagttataagaacaaaacaattgctcaggaaaaaaagatggcacccgcagatagttcacaagccaatgggctgctcccaaactggtgcccacatcactccctggggttggggcattacagacaggtattccttcggagacattggaattgaaggccaccacttataggtctgtatgatacttaagcctaagaagtgcatggctcaagcgcatgtgcggaggtaaacaagncttggaaaggaaagcggttcaaggaaagacttacttgcgggaacaaccacgggattcagggtcggcatgtttgcgggtaccatttggatggtaggtttcacggtcataacagtaagccaaatagcatttggagtgttggacagcaactaatggggtacttcctgggaaaaagtttgcgattaaccaaagaatatgcctttggcaccaatggggcatagagcctaggaaacgcgcttggggaaacacacaattacgacaactccgtaggaggattggcgcaatcgcgtaaatttggtgggcaccacaccgatattgggttcgcgcaattgatcgacaaacagcgcccatttataaatcgacagagggttataaacttttcgaaaaggatggtccgagtgatataatatacccttaagagtggttatagaacatgccg

SEQ ID NO: 615852 - DNA, 294 bp, Homo sapiens
  misc_feature (94)..(94): n is a, c, g, or t
  misc_feature (234)..(234): n is a, c, g, or t
  misc_feature (275)..(275): n is a, c, g, or t
  misc_feature (279)..(279): n is a, c, g, or t
tgagacccatcttcactggcacaccgtcgccaaagagacatgcagcgagaagagcactaacttgcacgactatggcatgctgctgccctgcggnatcggtgttcatttataaaataacgtggaaagaaacaaacccttccgtttatttactcaccctcggcttttgacagctgtgcttaacacaagtagatgcctgaacttgaattaatatacaaatcagtaatgtattctcgntttctctctttacattctggtctctacattacatgattcangggntttgtgtactgtaaa

SEQ ID NO: 615853 - DNA, 343 bp, Homo sapiens
acttctgggcattgatcagaaccaccatcgaaccactgaatgaggcacgttccttttttttgagacaaagtctcgctcttgctgcccaggctggagtgaaatggcgcaatctccgctcactgcaacctctgcctcccaggttcaagtgattctcctgcctcagcctcctgagtagctgggatcacaggcacttgccaccatgcactggggccgggtacagccaggcctgcaggaccccaagacactatagtccacgggcagcagggctggcacagccagacccacaggacccgaagacgctgcagagccggggaacgagggcccagcggctggtgctccgggt

SEQ ID NO: 615854 - DNA, 349 bp, Homo sapiens
tatttccacagggcaaaagaaaaaaaagagaaaagaaaacgaaaagaaaaaaggagggagggagggaggaaaaaggaaaaaaaagaaaaagagaaacaagaataaagtttggccaggtacagtgacacatgcctataatccagcactctgggagtccaagacaggacagtgtgagaccaggagtctgagaccaccctgggcaacatagcgatattctgtctctacaaaaattaaagaaaataagctgagcacgatggtgtgaacctgcagtcgcagctacttgggaggcctaggcgggaggatcactggagctcaggggtttgaggctgcagtgaggtaggactgcgcc

SEQ ID NO: 615855 - DNA, 276 bp, Homo sapiens
cttctacaggcggatataggccacaaactggttcccttcctctatccatcatgcccctaatcatggcctgtagacatcatctccaacgcagctgccccactcgtgtccttgtggggctgggtctgagtccaagatcacctgagcacatggattgatccacatcttaaagtctgggaagacaggcatgacctccaccggatatgactacaaaattgctcgggagtacaactggaacgtgaagaacaaagctagcaagggctatgaggaggtaacatg

SEQ ID NO: 615856 - DNA, 256 bp, Homo sapiens
taggctaactgtcgaccaggctggagtacagtaggcgcgatccctgtacactgcaacttccccctccgagttcaggcactctatctcagcctcccgaatagctagtacagcaggtcgcagccaccacacctttttgtatttaaagtaaagatagggttcaccattttggccaggcaggtctcaaactccttaattcgactgatctgccttgctcagcctcccaaagtgctgggattgcaggcataagccaatgtgc

SEQ ID NO: 615857 - DNA, 327 bp, Homo sapiens
ggctcgccgagacagatacggagttcccagctgcgcagtcgtgcagcgtggacagcgctgaggcggctaccagcgtcatatgctcgtacttgtaattgtcggcttgggaggtcaggagcaccggctggtcctctagtagctcctcggatgggtaggattcggtggtgaatccgacggggatggtggtcacttagaagtagatcagccggtcagtcctggcgcacaccttgtttcgagatcacagatttgtacatggtagagacgtaggcattctggatcaccagcttgctcacagtcttattctttccctccacaaactcggtccag

SEQ ID NO: 615858 - DNA, 333 bp, Homo sapiens
tatgagcccatgattctgtttgtttattgttgctttttaatttcattttacattgtggggtacgtgtgcaggatgtgcaggtttgttacataggtaaacgtgtgccatggtgacttactgcatctatcaaccaatcacctaagtattaatcccagcatgcattagctatttttcctgatgctctcctttcccccaccacacacccccaaacagtccatagggtgtatgttgtgcctctctctgtgtccatgtgttctcattgttcagcttccacttataagtgagaacatgcagtgtttggttttctgttcctgcattagtttgctgaggata

SEQ ID NO: 615859 - DNA, 867 bp, Homo sapiens
ggggtctctcggtcccgccagccgtgaggaggacggtctgcatactcgctgccgccggctccctcccccgcgtccctgcgaccgccgcgggaagatgattttcagttcacccactattaggcaaagacgtaagagagctaccagcgtattgagaggagatacacaggcactacgagaatggagtttcagcacagaaggtcagagccctgggcagtgttgggccaggctttagggcctcaggagtgcaagtagctgatgaacgtatgtcgcattttttatgacatgaaagttcgtaaaatgctccacaccagacgaaatcagaaaagaacgaaggctgtcattttttggtctcagttgcagacaaacaagtgcatcattgtagaagacaggcaaagagatctgggtggcaagatgttggtgtaaccataactgatcctttcaagcattctgtgcggactgcttcctgacaacgattgtccgctatgcttgtatgatgcaagctttgaaacaaaagaatccagaaaacgacgagttgctgcttctcgtgggcaccaaactagcacctctgcaacactacacatgatctatgcaagcttccaaggatgcaattacacaagaaacttcacggcataaaccctgacgtgtcacgcaactggaccacaagatctcatcgggctggattgctgacaggtacgggactctaattgtagctttgagggatcctgtgtacatatcagggccagctggaagcccaggtatgtaccctgcattaataagcatattaggccagtcactggcgaacgagggacctcaagaacatctaacattcgagcataatagtcgtgcaaaaaacaagggcgccgcagt

SEQ ID NO: 615860 - DNA, 1121 bp, Homo sapiens
  misc_feature (125)..(125): n is a, c, g, or t
  misc_feature (133)..(133): n is a, c, g, or t
  misc_feature (135)..(135): n is a, c, g, or t
  misc_feature (140)..(140): n is a, c, g, or t
  misc_feature (144)..(144): n is a, c, g, or t
  misc_feature (146)..(146): n is a, c, g, or t
  misc_feature (148)..(148): n is a, c, g, or t
  misc_feature (151)..(154): n is a, c, g, or t
  misc_feature (157)..(159): n is a, c, g, or t
  misc_feature (165)..(165): n is a, c, g, or t
  misc_feature (173)..(173): n is a, c, g, or t
  misc_feature (180)..(180): n is a, c, g, or t
  misc_feature (188)..(188): n is a, c, g, or t
  misc_feature (190)..(190): n is a, c, g, or t
  misc_feature (210)..(211): n is a, c, g, or t
  misc_feature (213)..(213): n is a, c, g, or t
  misc_feature (220)..(220): n is a, c, g, or t
  misc_feature (230)..(230): n is a, c, g, or t
  misc_feature (232)..(232): n is a, c, g, or t
  misc_feature (235)..(235): n is a, c, g, or t
  misc_feature (241)..(241): n is a, c, g, or t
  misc_feature (251)..(252): n is a, c, g, or t
  misc_feature (257)..(257): n is a, c, g, or t
  misc_feature (267)..(267): n is a, c, g, or t
  misc_feature (269)..(269): n is a, c, g, or t
  misc_feature (274)..(274): n is a, c, g, or t
  misc_feature (284)..(285): n is a, c, g, or t
  misc_feature (290)..(290): n is a, c, g, or t
  misc_feature (294)..(295): n is a, c, g, or t
  misc_feature (301)..(302): n is a, c, g, or t
  misc_feature (309)..(309): n is a, c, g, or t
  misc_feature (324)..(324): n is a, c, g, or t
  misc_feature (327)..(327): n is a, c, g, or t
  misc_feature (335)..(335): n is a, c, g, or t
  misc_feature (355)..(355): n is a, c, g, or t
  misc_feature (409)..(409): n is a, c, g, or t
  misc_feature (494)..(494): n is a, c, g, or t
  misc_feature (499)..(499): n is a, c, g, or t
  misc_feature (527)..(527): n is a, c, g, or t
  misc_feature (625)..(625): n is a, c, g, or t
  misc_feature (642)..(642): n is a, c, g, or t
  misc_feature (732)..(732): n is a, c, g, or t
  misc_feature (742)..(742): n is a, c, g, or t
  misc_feature (751)..(751): n is a, c, g, or t
  misc_feature (852)..(852): n is a, c, g, or t
  misc_feature (1002)..(1002): n is a, c, g, or t
  misc_feature (1044)..(1044): n is a, c, g, or t
  misc_feature (1118)..(1118): n is a, c, g, or t
ccgggcgggcagcatgaataaccctataccttccaatttgaaatcagaagcaaaaaaggctgccaaaatattaagagaattcacagaaataacttccagaaatggacctgataagatcattcctnttctcgtntnttttntaangntnaannnnttnnnattttntttttttnttaaatntggtttcntnttttttttttatagtgtttnntnttttggnttttttgttntnctnttttcnattttgtttnnatttnttttttttantnttttnttttattttnnttttntttnncttttnnttttgtnttgtttttttttttnttntttttttnttgttttttgtttttgtttntttatttttttttatatttttttttttttttttttttatttttttttttttttnttgtttttttttttttttttttttgtttttttttttttttttttttttttttttttttttttttttttttgttttttttttattntttantgttgcacctgtagagagctcccgctgnccgtctttcacagtaactggcaagtcaaagggtgactcttatgcaggtcgtgtcttatagaagaggagctgttttgatttgaaagggaaagaaactanataggaaaattttattngtcaaagatatccagagcttatggacatttttatttgggagatacaccgcggcctgctcaagccgaagatctttatgaaattcttgattnctttactganaagtatganaatgaaggacaacgaatcaatgcaagaaaagcagcaagggagcagaggaagtcttctgctaaagaattacctccaaagccattgtcaagaccacagcagtnatctgcaccagttcagctgaactctggctctcaaagtaacagaaatgaatataagctctatcctggactttccagctatcatgagagagttggcaatttgaatcaacccatagaagtgacagcgctgtattcatttgaaggacagcagcntggggatttgaattttcaagctggagacagaatcacagtaanataaaaacagactcacattttgaattggtgggaaggaaacttcgaggtcaactggcattttccagcaactacgntac

SEQ ID NO: 615861 - DNA, 422 bp, Homo sapiens
gtgcgcgtgccattgtgaggcttgagtaggtaaacaaaacagccaggaatcttgaactgggtggagcccactgcagctcaaggaggcctgcctgcttctgtagattccacctctggtggcagggcatagctgaacaaagggcagcagaaacctctgcagattaaatgtccctatctgacagctttgaagagagtagaggttctcccagcacggagtttgagatctgagaatggacagactgctttctcaagtgagtccctcacccccgagtagcctaactgggagatacctcccagtaggggccgactaacacctcatacagccaggtgctcttctgagatgaagcttccagaggaaggatcaggcggcaacatttgctgttctgcaatatttgctgcagcctctgcaggaacccacgcggg

SEQ ID NO: 615862 - DNA, 355 bp, Homo sapiens
tcccggggggaggatgaagaggaagaggaagaggacgaagaagaggagaaccaaagcgctcccccaagaacgacgaaaccacagacagacgccagaaagagaaagaggcctcaaggactaaagacgaaacgggcacgaaaacgcaggaggagcaacagcagtgtaacaacagagaccatcgcagagacgacagaagtactgaatgagcccttcgacaacgcagaagaagagaggccaatgccacagccggagcctacctgtgagacggaagcggaggaagatggcaggaagccagtcccgagaaaagcattccagcagcagcctgtgaagaaaagacaaacagaggaagagcaag

SEQ ID NO: 615863 - DNA, 103 bp, Homo sapiens
agtagtgatgctgaggtgattagaggatcccgaacaacggtgagcccaggaagttgaggctgcagtgagctgtgatgtgccactgcactcatcctggaagaca

SEQ ID NO: 615864 - DNA, 132 bp, Homo sapiens
ccccctggtcctttcccattgccccaaaaagggggggcccaagggccgagcttactttagttgggaggagaagggtgagggtgggggccccaggattccccccccccttcccaaataaaaatggggggccta

SEQ ID NO: 615865 - DNA, 285 bp, Homo sapiens
  misc_feature (245)..(245): n is a, c, g, or t
gaagcctttgaggccgatcaggaaaccggtgtcgtagtagatggtggtggacggtgcaatcagcaggcccgacagcgcgccgatgaaggcggccatcgtgaaggtctgcgcgcccgccgagtcgcccgagatgcccatcagccgcgcgccggtgcggttgaccgacgtggcccgcagcgccttgcctgtgagcgtgcgctcgaagaagacgtacatggccgccagcaaggccatcgaggcgccgnagatgatcagcgtctggcccgtgaggctcagcggccccgc

SEQ ID NO: 615866 - DNA, 124 bp, Homo sapiens
cacgaggagcatcgtggccagcttccttcatttggccaacatccactttgctgccatcgatgcaagcaatgcccaggtcaccaccgagaaccagctcacgtatctgaccaggctcctcagcgtg

SEQ ID NO: 615867 - DNA, 282 bp, Homo sapiens
aaatccggtttttttttttaaattttaaaaagggaaacctttttcaaaagcggggatccaaatggggttttgggggatgaaaaaaaatggggttttggggtaaggggaccccttttgaacccggggggttttactttgggggtaaagggggaaattcccccccggtttggttaggggcccccatttttggttgggtttttgggcaaagggggtcccccgttttcatttaaccaggggtgttttttttttttggaattaaataaaaaccgggtttttccttga

SEQ ID NO: 615868 - DNA, 321 bp, Homo sapiens
  misc_feature (321)..(321): n is a, c, g, or t
taagatccactaagagcatcagtgtgtggtgcgcgatacagcggacaagctctatgcgcgtcagagatatctctcgctcagtctctttgtttgatttttgctgattccttccatgtaagaagcaattctcagaacaggtcatcagttagtgtggctcagttctcttgggcgtcagaagccggtccgcacaggaggcctctttgtctccatgaagctttcactgtcggctgaaagaagaggtcgctgccctgctccatcgcaggtgaagtggtgaggctggaaagggttcttcaaggcaggctctcggatcattgttaatcn

SEQ ID NO: 615869 - DNA, 200 bp, Homo sapiens
tgagactgcgatagtaagtgcgttgggctgaggggacaagtcatgggacaaactgtcagctcctgctctagtggagaaaatcacagctggagctatagaagtgagtgctcctttccactgccaggcagcttagtgtgttaggctgttgctgacgccccagctctagcttgcctgccgcctcccccaaccgcacctcacac

SEQ ID NO: 615870 - DNA, 231 bp, Homo sapiens
aaaaaaagggggccccccgggggggggggggggtttttttttcccccctggttttttcccccccaaaaaaaaaaaaaggggggggggggggttttttccaggggggggggggggctttttccccccccccccgcggggggggagggggggaattttttttttttttttttttttcccccccccctaaaaaccctttttttttaaaaaaggggggggccccttttttttcca

SEQ ID NO: 615871 - DNA, 487 bp, Homo sapiens
  misc_feature (1)..(1): n is a, c, g, or t
  misc_feature (68)..(68): n is a, c, g, or t
  misc_feature (146)..(146): n is a, c, g, or t
  misc_feature (154)..(154): n is a, c, g, or t
  misc_feature (172)..(172): n is a, c, g, or t
  misc_feature (180)..(180): n is a, c, g, or t
  misc_feature (395)..(395): n is a, c, g, or t
  misc_feature (422)..(422): n is a, c, g, or t
ngcttgctgtggtttttgctctgggtcctctgggatcggcgcctggctgtggcgcgtggtctctcacnaggggcgccgggcgggggaacgcggccaccctgagtctggtgagtcgactgcggcggcctgtgtccgaagtgtccagntagcttgnacaagggcagcggctggnctcagctngcgttcccacgtttggaaacggggaagctttcgtcgatttgtgtttacatcatcgactatgccaagggagttctccaagataagcctggttttattttcgtcagtgaaaaggccttacccgtataactgactttatgcttgccctgccccccgtataaaataacttaaaagcaagcgtgcctggttacagcttgtttcccacgtgcggtgctccntcggggagtgatcaacctaaccctaanaggtgggaagatggatgcctgaagtgtagaactgctgctaacttgaaattaacccccaaaatttt

SEQ ID NO: 615872 - DNA, 1213 bp, Homo sapiens
gtgctggccgatggaggaggcggcggcgttggatgctgcctcctggccggcgggcctgggccgggccgagccccgggcgctgcggcgtacgcctggatcctgcgctccgcctaggcctggtctgccttggtgccccgaggaggcttgctgatgccccaggccatggtcccctctcggcaggacgtggaacctgggagccacgccctcgctgcggggcctgtggacgagttggtgccggtgccccgggagtcctcgatgccggggggagtgtgcgtcgaccgcgcgctcctgagctcgccagtctcagaccgcggcccgcgctcgcgccgtttccgcaacacatccgtgcctcggggagggttggaggaacctgggcgatgggaaagagagatatccacgagatctgcgtggtggacgtcagggactccgagctgcccgtagaggtgcgagcctcagcccagctgccatacgctcagatagccgtgagcctcaataggcggtgggacgttgggtcgtgggcaccagtgaaagaccgcccccgatgggggacgtctttaggcatgaacaccctgaccagggctagggaaccagccgtgacaggggaggacacgcgtcaatttaagcgcaaggggcccccaagggaacggtgaacggccggcaacgtggccgaaattcgtggagaccgttggttgcgggaggcgacgctgtgagccatttgggaaagaacagacacgccgggtgaacgcatggccttgaatagggatagacgacggaaacttggagccgggaatgttggacagggacaagggaaggcacttgcccgggcacggcatatgaatataagcggccaccggaatccttgcgaaaaggcaagacttggagaccacccaaaaagtgccaggaaaggggtcacccatgggacacaagggcaaatgccaggaagcccgagccaaggatccgagggagaaggaaaggacgagcccaacaaagggaacttccgagagtagggaatagcaaagagacgttggggtacccccaaaggacgtttgaaaggggatggagaaggaaattgcggtgtgaaaaaaaggaaaacatggggcaaattgcttggatccaaggaaaggctatgaagaccacataagaaaaggggggtagaaaaggaagaggaaagataagcccggaaatcaggaagatgggtgattaaagggtaggg

SEQ ID NO: 615873 - DNA, 110 bp, Homo sapiens
ctcttccaaggcttgaatggcatcattatcattgtacacaaagttatcccaacaatatttaaaactcttcatatgtcactccgctccgggtgatccatctagaagtcgac

SEQ ID NO: 615874 - DNA, 403 bp, Homo sapiens
cagctatggatctccgctctgttgtccttctgaatgaatgcagtaaggttgtcatagataatgtccatgggtgtccttttaaagtattgatcagcatactgcagtcctgtagagacctccgataccaaaatgaagatctcttcaaaagcatagcagaatatgtggctacaacctttgacatctggaagttgaaacaagttatctttttcctcttattatttgaaactcttggttttcgacctcctggtttgatggacaagcttatggagaaagtagtacaggagcctggctctctaaacgtgaagaacatcgtttctatcctgcatgtgtattcttctctcaatcatgttcacaaaatccacaacagagagttcctagaagctctggcgagtgctctgactgg

SEQ ID NO: 615875 - DNA, 109 bp, Homo sapiens
gcagacgggcagtcgccactgtcctggcgctaggagagcgccactgctgcagcaatcacgccagccacgggtggaggctgtgggttctaggcacgagccagaacccaca

SEQ ID NO: 615876 - DNA, 766 bp, Homo sapiens
tgctggaagcctggggacccggccacgtccccctgccgcatctttgacctgggcagcgacaacgaggaggtggtggctggcccaggccccgcccagcgccaaggagggcttgcggcactttctggaccgcgtgctggagggtgcgggcgcagccacagctgtctggagcgcatgctagacgaccaaggtggtcagagctgctggcccatgtggccacaccaagccaccctgagcgcagtgccacaggcgcaagagcaagtacctcatccttcaccactggctgccttcaccgtacatccccacaccagaatcggcatcaagccagatcctgccacaccagatgaccacgggcatgggccctgtgctgggtgagggccggggctccgatgccttcttcggacggcgctggaccacgtcatagacatacacgggacacatcatcggcatgggcctgtcgccctgacaacaggtacctgtaccgttgaacatgcctgcgccttggcccaacggtgccggtggtggcctgaccccatgcaggcgcaacaaatcggcgggaggaagattttgacctcgcttggttgttccgacctccaagaccagtgcgggcaccgtgaagggcgggatactgcggttgcggcacccggggacataagagcccccaatcgacgaagtgggcttcttccatatttcctggagtgtcaggcggtgactttctctggccacgcgggctgacgaaacgggcacgcttaaatctgtgaccggccct

SEQ ID NO: 615877 - DNA, 280 bp, Homo sapiens
gcatcaccttggacaagcacaccagctgggcacaggcggtttccgccacgcaccagtacgcagcggcagcggcatgcaagcccaggcatcagcagagcccccgctgcacgctggtggataccgggcatcagcggagcccccgctgcatgctggcaatcaatcccaggcatcagtggagtccccgctgcatgctggcaatcaatcccaggcatcagcggagtccccgctgcaccctggtgatcctgagcatcagcggagccccactgcactggcaatcccg

SEQ ID NO: 615878 - DNA, 142 bp, Homo sapiens
gcagtatctagactgatttaaacctcatcatatgatagctgtttggtattctgactcatatgtactctttggagcgggaggctttcgggttgcccagaatagttctgcatttgtcttccaccaatgccactggccacccatc

SEQ ID NO: 615879 - DNA, 1258 bp, Homo sapiens
ggcacgaggccaacctccctcctccccatcccagctttatcctctggggcttctcctgtggtgtgcaggtaaatgtttaacaagcagctctcgcaggggattgaggggagctcatgtgaagtgttcgtcaacatctgtggtgtaaatattctcatcatggctgatttcaagctaccaacatgacatggctgaacacgagattgagaagaaatgtgcaccatctgtccaggagcgggcgagctggatccagcacacctggattctcctcccctgacacgtgacaaccctgcagagacttgagatcagccgctcagattaggtgatcagaagcattttgtcacggagacacggagttctgggccggctcttatcttcagggcatctggtagggtggaaagcacttcaagtcatgcgccaagcccacgtcctattccctgggcccattcccttccgttgaagtgctggaggcagagctcgcagctgaagacctacaggcggctctccctcgtgtctgggcatgagcggtctgtggaggcagcagccaggctgtgtccaggtagccctgacggccactgcacaagagcagtgtcgggtagagtccgagcacccatcagctcagccccaggctccatcagaggcggtggaacgggccctgaggatgcctcagtcctgggccttagtgggaggccttccaggtgaagccctggggaccaggtagccctgctcagcaagcagccctggaccctacctcagcagccccggaccccacctcggccgccgcaggaagccaaggggatgagggaccaactcgggaaatggtgggtgaggctggtggctcctggaaacgccggtcaccagggcggcagcaccggtcctcacccctccctgccaggacttcacccagctctcagcccctaagcatgatagtttcttgggtcaaccaaatagtcatctaggggttactgtgaaggtgttctgtaagtatgtcacatctgcagtcagctgactggagtgaaaggccattactctcaatcatgtggcgggggtaggggtgggaagccttgtgcaaccagtgaaatgccttgagagcagagctggggtttccctgaggacagagagattttacctgtggactatagcatcgcctactgcccgagaggcccaggtgccgcctgccctatggatttccaccttgctcagccagcccccaccttgtctgagccaatttttcacaataaatctctccctccctcccttc

SEQ ID NO: 615880 - DNA, 353 bp, Homo sapiens
tcaagtgatcctcataatttccttttccaattttcaagaagaaaataatcgggggcggggccttagatcaagtcttcgggagaaggatgatccctaggcacaaagaggggtaacggttcttattaaaaagattcacaggctggatacaagggctcaggtttataaccccagcatttggggaggcggaggggggcggatcactggagctcaggagttcaagactagccggggcaagggggtaaaaccccatctctacaaaagatacaaaaattagcggggggtgggggtgcatgccggtaatcccagctactggtaggggcggaggcaggaggatcactggagcccaagaagca

SEQ ID NO: 615881 - DNA, 549 bp, Homo sapiens
gaagaactgatacatgttacaacatgaaccttgaaaaccttatgctaagggaaagaagccagacacaaaaggccatatattgtacataccgtatgagtcaatttatatgaaatatcctagaataggcaaatccatagggacagaaagcagattaatgaccaatgtcctcaccacacacacacatacacacacacacacaccaatgtgtgatgtggtaatcgtcagattgtggtaatcgtttcacaatgtatatgtatatcaaataatcatgttgtacaccttgaatatgtacaatttttattctgtcaattatacctcaataaacgctgaagaaaaaacatgtagattagtggttgctagggaatgatggaaacgaaaaataataaatactgccaacagatacggggtttccatttggagtgatgaaatgttctggaattacgatgtgggtgatgattgcacactttgtgaatggactaaaaccacctgaattatacactttaacaggacgaattctagtgtatatgattacatttcaactaacagaga

SEQ ID NO: 615882 - DNA, 133 bp, Homo sapiens
tctactgaaaaatgcaagattagccaggtgtggtggtgcgcacctgtaattgggaggctgaggcattataatagcttgaacctgggaggtggaggctgcagtaaggcgaggtgagatggggccactacactca

SEQ ID NO: 615883 - DNA, 996 bp, Homo sapiens
cgcgagctgccgccctttttatattttttttaatatccgcctttcttaaaagacaagctagtatacgggaaaaagaaaaaaataatactaaaataaaaaccaagacaactttagtaccctcatctttattggggaaggggagggggaactccggggtcgcccacgcctacacccgtggtccttcccgaggttcatgctaaaggctcgatcccttcggtgccccccctttggggggcgatgggaaaggaccagggggccgtggaggtgtcgggaactagcagagggtggtgaggggggcaggtggaggtgggacgcttaccggggacccggggatcgggggaaacccggggtgcccaggacgggaaaggggcagatagcatggcgtgcatgcagaaccagggtgaaagggctggggcccaggcagacggacggtaacacagtgtccaaaacgggggaagggccggggcatgagtgcgcttacgcgaggacatggaccccttggggaccgggatctcccatcgtgaccctccaggccttagctggcctcacatgtcacgggcaggtatccacctaaccaggctgcaggggcaggacgcagggaagccgggcaagggggaacggacagaacagctaaagggggcattgcaaagccggggctggggccccagacggcggacaacaataaatactaggggaaataaagccaatcccgagccaccaagggagtctggggccaacaataccatatccacacgagcaccaaggtaatcaccatgaggagacccagacagcaaaacacacagggaccgggaaccacaggaaaaccaaacatcacacacaataaacccccgggaaaagatggtccccaacaaaccccaaaacacgcaaaacatgcgaaaagggatgggacatgagaaacccaacgaagacaagaaaagaagcagacacagggaagaaacgagcagaaggaaacggaggacacacacaagtacggca

SEQ ID NO: 615884 - DNA, 936 bp, Homo sapiens
  misc_feature (162)..(162): n is a, c, g, or t
  misc_feature (190)..(190): n is a, c, g, or t
  misc_feature (205)..(205): n is a, c, g, or t
  misc_feature (235)..(235): n is a, c, g, or t
gataactaccccaggcgatacctaggtcagtcgacccacgcgtcgctctctctgtgtctttcctctctctctccctctccctctctcttatcattgtgtatcagtttccatgaaagacctgaatacacttactcaaataagcatatgtgttacttcaagtantacgtttgacataagatggttgaccaangtgcttttcttcggnttgagttcaccatctcttcattcaaactgnacttttagccagagatgcaatatatccccactactcaatactacctctgaatgttacaatgaatttacagtctagtacttattacatgctgctatacacaagcaactgcaacgaaaaaaacttactgggtaggtgattctaatcatctgcagttctttttgtacacttacattacagttaacgaagcaatctccttactgtgttctcagcactgactatgtatttcttctatgctcattcttcaatctcacacacaatttttaaaatacttgttctcacgcttctctgctagatttctacattaacttgcccctttctctaaccaagtcgctcctaggttcttaaccgataatttctcctcaatcacactacacatcacacaagattctgactgtaatatctcacatattaccctccaagtctgtacctcaaatgaatttctttaaaggagatggacctaattgatcttgcaaaagactaccttccagacttcaacaaggaatgaactttgttactttgcccgccattccttgtttccctcaacccttctgcaattcgttcaaactgacgctacccctagtcaaactattgtcgtaacacgcactctgctcgcacggacacgttttttcttctttcgcccacacatcatttatcacattcactaagcactttcacgaatgacttggtgggacaagccaccg

SEQ ID NO: 615885 - DNA, 341 bp, Homo sapiens
aaggatccactacacctaatcgccctacgcgagtggtgtagtgcttgtgtgatacccaggatgtagtacaggaacatctggtgcaacgccagaacctggtctgcaacgccaacagcggtggtgttggagctggtcacatacgggtaggtaccgtggtcgatgtccagcaactgaaccctgggcaccttcgaacatgatgtccttgccacgcgcgacgcaggtcgggcaactcggccgtcacatccagcatcagcggcttgaagccgctccgcgtattccttgcactcggccagtgtcttatcaaactcgatggctggctctttgtagtaacccaccagcat

SEQ ID NO: 615886 - DNA, 120 bp, Homo sapiens
catgggccaggtgggggtgcctcagtcctgtgcccttgggcagtgagggggggggggcattcacctttctcctagaatgctgttgtaaataaacaaatggatccctggaaaaaaaaaaaa

SEQ ID NO: 615887 - DNA, 213 bp, Homo sapiens
ctttgttttgggttttcaaagaatagccccttgttccttcttgtgctggccaatgccccctgtttttgtttctttgccttttccgggcccccccttcctctggtttttggttgtttattgatgggtccataatattgggggaggcttgttttgttttttgttgggttgaaagccctttttggaaaatattaaaaggctaccattaaaagacta

SEQ ID NO: 615888 - DNA, 1448 bp, Homo sapiens
  misc_feature (42)..(42): n is a, c, g, or t
  misc_feature (81)..(81): n is a, c, g, or t
  misc_feature (99)..(99): n is a, c, g, or t
  misc_feature (136)..(136): n is a, c, g, or t
  misc_feature (159)..(159): n is a, c, g, or t
  misc_feature (346)..(346): n is a, c, g, or t
  misc_feature (781)..(781): n is a, c, g, or t
  misc_feature (849)..(849): n is a, c, g, or t
  misc_feature (993)..(993): n is a, c, g, or t
  misc_feature (1086)..(1086): n is a, c, g, or t
  misc_feature (1119)..(1119): n is a, c, g, or t
  misc_feature (1232)..(1232): n is a, c, g, or t
  misc_feature (1409)..(1409): n is a, c, g, or t
ttattttacatttatcatatcttctatctttctctgtactgntatattctctcgtcgtctactttatttcttactatcctntcctgtcgtcgccttctnacttataattctaatatgataataagatctatatggngtcaacgatggttatagtaatangaaaagagatactcgagaatgatgaagagagagataaatatattattgaataatataatatatgttcgttcactattatctatacttcttataccttactttatatctgacacaacgtgttggaggttgagcaaaatagaatgggtcgagcgtgtgtgcagagtgcatctcgacgcagcggctatangagaaggtatagtgtgtggttgtactttgctttattgagattagtatgtagtcacagactgccagttacgcgcctatcatgattgaatacaacgtactcatgagtatattagatgtgaaaacgtgagcaggggactagaacttaatgtagtgatcgtatctgagaatgctcgcgctgatagttcagcgcgtcgagtgtgacacacgccgcagtagcgcggtctgtgcgagtatctttgtgaggcagggagacagatgaataagcatgcagtcgtatagagatgagtgaagatacagacagaagctcgtatcagttgtacgaggtcgtcgggcagcgtgctacgctcgcgttactatcgcacgtgcgaactcagatgtctcttgagactgtttagtagcgtgactctcgaccggtgcatgatttgagtagtgtaangacgtaagcgtgttcacatctatagctacagggtcacagtgtcattcgtgttacgatacagctcaagntactacataaatgtgtatactcgtctacgcaccttacacctgcgttcagtgctcacgtgcaccatgctaatcgatctgtatcgtcttgtcgctcaaggtatataatatgtttagttaaattagttctacgtgcagatcactaancgcactctatgctgtctcagtgttatataagtgcctgttcgacgctatgagaagagcgtgtatatgacgatgctgtattagtaataggctgcnagacaaccattggatcatcgctcgttactgtcngtgtagtcttactgactgtactactaggtagtaggcctcgtcatctacgtgtgatactagacacaccacactcgtcagcagatgataatgatatacgatgtagattatgtgtnagttagaaccatgtacgtatatatagcatgtatctacacagaattgagttacgatcgtatcaggcgatatgctggagcaacattagcgacgcttgaatactagaccgcgcggaacgatgcgatcatgagtctgtactgtggcgtagcatggcaagtgctgttatcgtactcgctgantatagtgcttagacttgtatagtagttgcgtattaacct

SEQ ID NO: 615889 - DNA, 693 bp, Homo sapiens
ggagcagctaccgctcagccatcgactacagtgacagcgccatgctccagagtcgtcatggcagctgctcctgtgggctgggctctttcctggaggacgcacgtgcctacactgagggggcagctggcctgcggctccgatcagggaagcgatgctgtgggagaggctctccatgcaccaaggagggccgtgaagggcgggcttggcaagtatgattttgtacatcacgccagggatggttggatgctcatccatggtgctcttgcaaacaccaacggcgaatggactagcgtcaacgggcggtcgccgtgaaggcaacgctgtcaagggcctgatgaagtccgtagcctgtgttggggtgccgagtcaatcatcgtgtacgtatgggaactaggttgttgtgtgaaacgtggtatggtaattacatcttggccaaatctaactagttgggctaaactctcgtgcgtcacgaaacgcacggagatgacgtccgagtctccgaggccaatcacgaaatgtccgacccagcgtctgctagcgacatcggtgctatcgttccaagacgatctctctagcatatgtgctagcaagtcacagtgccacatacgtttcagggagacgggcagtcgaggtcgtaccttgcatggtggtggtgcgatgagctggtgcggtaccgcgcgaggaaagggtccg

SEQ ID NO: 615890 - DNA, 550 bp, Homo sapiens
gtatcgtcaggctctagtccacgtactagataacagccagaccagcatctcaagatggaatgcgttggtttatgtctaacagaggaaaatggaagatgttcagttacgagctaccagtccagaatctaccagtaggagttctagtaaaactggacgagatactccagcaaaatggagaaactgtcgattggtgctgaaaattcagaaaaaatagatgagaattcagataaagagatggaagtagaagaatctccagagaaaataaaagtacagacaacaccaaaagtagaagaagaacaggatttgaaatttcagattggagaactggcaaataccctgacaagtaaattcgagtttctaggcattaatagacaatccatctccaactttcatgtgctgctcttacagactgagactcgaatagcagactggcgggaaggggctcttaatggaaactaccttaaacgaaaacttcaggatgcagcagaacaactaaaacagtatgacataaacgccactcctaaaggctggtcctgccactgggacaggt

SEQ ID NO: 615891 - DNA, 395 bp, Homo sapiens
  misc_feature (354)..(354): n is a, c, g, or t
  misc_feature (379)..(379): n is a, c, g, or t
  misc_feature (385)..(385): n is a, c, g, or t
agagaataacaaaacctttgggctcatgctgtaatcccagcactttgggaggccaaggagagggggttgcttgagctcaggagtttgagaccagcctgggcaacgtggtgaaaccccatctctacaaaaaatacaaaaatgagccaggtgtggtggcacgcacctgtagttctagctactcaggaggctgaggcgggaggatcacttgagcccaggagacaaaggctgcagtgagccgagattgcaccactgcactcaacctgtgtaacagagcgagactcagcctcaaaacaaaagaaacatctttgtgttcagagttaaggttgctattataaagtaaaatgctaggttgtnggttctgggtacattgcaatctatnattgangatccagtgg

SEQ ID NO: 615892 - DNA, 151 bp, Homo sapiens
agaaccacataccttggatcgtccgctcttcctccagggcactggcttccagaacagctgcactgtcctggggtcagctgcctctgccgccaccatgtgtccagtctgacagtgggggcccgttcggtagttctcagctccagtctctggg

SEQ ID NO: 615893 - DNA, 275 bp, Homo sapiens
gagtgcagtgactgcccgtgtcgtggctcctagctgtcctagctcgtattaaggtagagcttgctgtgtatgttgcctacctatgtcctggctttttctcgtatttttagtagagacagggtttctcctatgttctagaccctcggcttggtctctgaactcctgacctcaggtgatctgcccgcctcagcctcccgatgtgctgggattacaggcagtaagccagctctgccggccctttactaaagaaaatacacgaatacaaagaaagaaca

SEQ ID NO: 615894 - DNA, 940 bp, Homo sapiens
  misc_feature (940)..(940): n is a, c, g, or t
attaattagttatttaatcatattttcaaaggaaactttatatcactactttaagtagaaaacttatgtccactgggcacagtggctcacgcctttaatcctagcccttgggaggcccaggcaggagtatgcttggggccgggagttcaagactgacctagccaacatagcgagaccctgtctcaaaaaaaaaaaaaaaagaaaagaaacactctgatggggcttgggggctcccgcctgtaattccagcatcttggggaggcccaggcggcaattaacctgaggtcaggaattcaagaccagcctggccagtttggtgaacccctattctctgtgaaaatacaaaaattatctggggctaggggggcatcgcacctgggggtccccagagtagctggggataacagggggcctctcaacacaccaccagaaatttgggtgtaaaagtacaagatgtggtttccacccattgtagcctccgggacctcaggtgttgattccattcttggctcggatatccccaaaagtgtggaggataaacaggtgggtccaagaatgcggacgaacggcacattcgttttaagtcatcaggatttggccttcaatgctaaggtacattgcagacgcactcgttttgtggcgttattatcgatagtttgcagcacaaagagcgcaaaccaggttatggcaaatggagcaaccgagacggggaacagcctcagggccacaatgacgactgacggtacactcagaaaaaaattatcattccgttccaggaaaggaaaagaagagtagattcacacaggtaaagggggcagaaagggaatcatgggcactgcgctgtggctgcaacaaactaacgaaaaagagtaggtactgtggggaaaagaaggcgggaaaagccaaaagaggttagcaacgtcctcccggtccctccccn

SEQ ID NO: 615895 - DNA, 1536 bp, Homo sapiens
  misc_feature (988)..(988): n is a, c, g, or t
  misc_feature (1021)..(1021): n is a, c, g, or t
  misc_feature (1123)..(1123): n is a, c, g, or t
tcacacagatccacacaccgctgggtgtgttgggtgccccccctcccaatgtaaggagagaaaccccccggggggcgccgcgaagttcctccactcccctccgcggggaactctttatagcgcccctgtagtggccccgccgggggcctgccgggagaatagcccgacagttcgtgctgagacacaccgcgggggcgaaacacagcggcgtaatttgcaccccaacttactatgagccccctcaattttttataagggggacaccaaccaccataatagagaacaccacaagggtgtgtgggtcgacagcacagaaagaaaggccacacaagggccgctggaggacaaccaccgcgggttccccgggggaatatttccccgcgggcggggattatatttctgctccgggaacccaacaccacaggcgtgtctcccccagaatagagatgtggtttttcctcggtttaagagagcaagtggcgccccctgttgtccaaccattttggaggagggaggttgtaatatccccacagtggttttttcccaggagttcttctctttcctccttcaaggcctttcgggggggggccgttttttgtgaagaaaaaagatttgtggggaagaaaattgctctggagaacacgactgtgtgcgtgtggtggcgccccacgccactaccgcctcgtgtttttggaaaactcggtgttgggagaccctctcggcgtttttttgtcttccttttgtcgtaaagagtgatttcctcggtgcccccctctcttgggcttttccccgcgtaactactgctgtgtttttcgcgccgctctgtgtggagagatttctatttcctcttaaatccccgtgtctcttttggtggtacacactctgttgtgagaatggccataaaaataattgggggccacaggggtgtgagagagagacacactctattctcgtgaggagccaccccctcttgggtgtgagagccaanagccctcgggcctctgtataagagagattgtgnagagaaaagagggctttctggccgacaccacgagaacccctggtctgttctcctccacaggtgtctgtcaacacaccggggtgtgttggcttctttcacagntcaatatacccggagaatctcgagaatcacacaaaaagataatttttagaaataatccacatgagatttcctcccctgttatattgagggcgtatggccctgagatcacatgcctttttggtgccctgtcacaccacgggtttctccacacagggcacactcacatccacgggtcacggtggtcaagaagtgtttaaaggaggagccctataattcacgggagaagttgcggtgagaacacctgcacgtgggggaggaaattgagaaataagtcacggcctaatcacgtttcaccagaaatcaccccctctacctttgataattccaccttagctgtagagtccaatctgtttgtccactctgctgaaatgagaaaagaaaaaatttaacgccctgaattttaaaccaaccca

SEQ ID NO: 615896 - DNA, 116 bp, Homo sapiens
cggggacgatagagtgtgtccagtgaaggggagaaggggcatcagctccctggtgggcccagcccactgcagtctcacgcctctatagaggtgatgggctgtcgggctagtcgggg

SEQ ID NO: 615897 - DNA, 196 bp, Homo sapiens
gctaggtgatctagaggatcccttagtgtcactgtcctgagaataggtgatttaatcaggcaacgaaatatactcgttgaaatttagagtatgtcttggtgcttcatgtgataagcgacgaacaaagtgataatcaggttatgtaatctagaaatgtacaaggggcctttataacctgggggcggggcattgttta

SEQ ID NO: 615898 - DNA, 509 bp, Homo sapiens
taatgggcttgggtgagggaggtagggggtagttggggttaaaaattttaagtggggtgatgaggaatagtgtaaggagtatgggggtaattatggggggccatacggaagtattaagtgggggcattagtggtgtgggtcgccttaattccaagccttacgttttcacacttctagtaagcctctaccgtgcacgacaacacataagtgacccaccaatcacagtgcctatcatatagtaaaacccagcccagtgacccctaacgaggggccctcttcaagccctccataagtgaccctcgcggccatagccatgtggtgatttcactttccagttccattaaggctcctcaatacataggccatacataaccaaacacaccataaccatatattcccaatgtgagtgggcgcgagtgttaaccagcgaggaaaagccaacattaccagggggccaccaaaacaaccacgcgtggtccaaaagaggcctttgcgaaatgcgggggaaa

SEQ ID NO: 615899 - DNA, 886 bp, Homo sapiens
agcggagttttggtccagtatgtcccggcctgaggtgtcgtgtcggatccctccttttcccggcgcctcaagcggaagaccctatccctcaagagatcacgtagtccgaaggaccctcagagagtgggtcacccacagatgagtgcaatgctgatcgactggcatgcagcttgatgctgaagaatcaacgtggccaactgggacggaaaaagcaagacttattaatcaagtgtctggaatgtccatacactagcacagtgaagatcctctctgcgaacgacgtaggactgctgttaacgtgaatgaatacatctgaacgctaacatagtcaggaagaccagaggtatctttgcgagccaatagtataccgagaaagtcgtcagtgtcacgcattcctagctgtcctttgcagacaagctgacaccaggaccagcaaaacgaaacgctaacgggactctgacaacccttcgtgttccatggaagttgctgtctgatcattctcttgtctttaacaagctttggactagattccaacacagcttacagtaccgtcttgtgggccttcattgaaatattctatgagacgataatgctcaggatgttaggacacacaacattaatcgacacatacgcgaggaaagactttccactaaaggttggtgctacttaatgctagaggtcctatgacaagaccggtgcctgcactgtttctttgctagacgaacggttcaatggacttaagaagttgcccataattagtatgaattgaaaacttttaaagacttgaattgtccttgcatcgcaataccgctaggggttacagcacatgcactatcattatagggattcgtaagaatttcccggaacaactacaccgtgttggtga

SEQ ID NO: 615900 - DNA, 647 bp, Homo sapiens
  misc_feature (18)..(18): n is a, c, g, or t
  misc_feature (132)..(132): n is a, c, g, or t
  misc_feature (188)..(188): n is a, c, g, or t
  misc_feature (200)..(200): n is a, c, g, or t
  misc_feature (211)..(211): n is a, c, g, or t
  misc_feature (223)..(223): n is a, c, g, or t
  misc_feature (242)..(243): n is a, c, g, or t
  misc_feature (245)..(245): n is a, c, g, or t
  misc_feature (251)..(251): n is a, c, g, or t
  misc_feature (273)..(273): n is a, c, g, or t
  misc_feature (304)..(306): n is a, c, g, or t
  misc_feature (312)..(312): n is a, c, g, or t
  misc_feature (316)..(316): n is a, c, g, or t
  misc_feature (319)..(319): n is a, c, g, or t
  misc_feature (340)..(340): n is a, c, g, or t
  misc_feature (342)..(342): n is a, c, g, or t
  misc_feature (357)..(357): n is a, c, g, or t
  misc_feature (360)..(360): n is a, c, g, or t
  misc_feature (368)..(371): n is a, c, g, or t
  misc_feature (394)..(394): n is a, c, g, or t
  misc_feature (421)..(421): n is a, c, g, or t
  misc_feature (444)..(444): n is a, c, g, or t
  misc_feature (468)..(468): n is a, c, g, or t
  misc_feature (474)..(474): n is a, c, g, or t
  misc_feature (501)..(501): n is a, c, g, or t
  misc_feature (516)..(516): n is a, c, g, or t
  misc_feature (612)..(612): n is a, c, g, or t
  misc_feature (614)..(614): n is a, c, g, or t
taaccaaacaaccaacanttcttcaacacagaaagtaaagcattatccagggcttggactgtttttcaagaaagccccaaatcccctggcaggaggaagtaacagcagtaaagccccatcccaggcccagtngttcccacgaaaaaaaccaggtggagacccagcatgattgcggattgattacaagnacccaggagggntttattttttnttttcaacatcntgttctgcggcttccttgnntntttttncccgtttgctgaagagccgggngttggcacgggccatagggagactagcgaannntttttntttnttnttttcctcagtgatgattcgngntttctccttcttatngtngttccggnnnngcatgttcggtccggtcagctgngtggcctgtttttgttcttcagcaganctgtctccctgcgggggggccgngggcttgctggggaagaggatgantttggngcggtactccttcagccgctgcacgtnggcctgcagggactncgtggacttgtaccgccttctcggatccacagaaatgccgatggtccgggccaccttcttgtgaatgccggccaccctgagctcctccaggctgangncgcggccggcgcgcaccttcgtgtggtaccgaa

SEQ ID NO: 615901 - DNA, 654 bp, Homo sapiens
  misc_feature (8)..(8): n is a, c, g, or t
  misc_feature (10)..(10): n is a, c, g, or t
  misc_feature (14)..(14): n is a, c, g, or t
  misc_feature (20)..(20): n is a, c, g, or t
  misc_feature (40)..(40): n is a, c, g, or t
  misc_feature (76)..(76): n is a, c, g, or t
  misc_feature (79)..(79): n is a, c, g, or t
ggatgggnangggnataaantccgggttttgaaagcccgntatgaaggcctggggcacggggcgagttttcaaggnagnggggggctgtctgccaacccccaaatgccacacgccgcccctctaccgcatgcgaatctttgcgcctaaccatgtggacggcaagtcccgattctggcactatgtatgtcagataaagaagatgaagaagttttgaggggagattgcctactgggggcaggcgttggagaagtcacccctgcgggtgaagaactcagggatctggctgggctatgactcccggagcgggacccacaacatgtaccgggaagaccgggacctgagcaccgcaggcgatgggacccagagctaccgagacatgggtgcccggcaccgggacgggagccactgcaatcggaacatgaaggtggaggagaacgcggacagcaagtgcaggcgggcgggtggcaagcagttacacgacttcgaggccaaggtccggttgccccactgggaactggggcctgcagtacagggcacgctttaagagcaaagagggccaacaccgttcgtgcgggtgaagggcccctcgaacggggagggccccaagaaagctaaggaagggccccggtagaagaaaccgggcgcaggggcaa

SEQ ID NO: 615902 - DNA, 784 bp, Homo sapiens
gtcacattgaagatacagtatttttgtaggtatttataaactgttctaaatgatagactatagaaaacattgtgtcatatgaaggtaagatcagtccattatttggatcatttaaaactgaacattacaccttctgggctttgatttatgaagtggcacagaatctaactttgcactgaatatcttttcattcacatctcctctggccttagtcgaacaatggcaacagtgacagaagattctatcaaacctcagaatatagtagaaataattaagctgttgaatgagtcgttcctaaattatgactactgtgtaagtggaccaagttggtgaagcagaatgtgacaaaggttgattaaggaaggaacaactcaaggacatcgggaatgataactttgttccacttgagaagctgacttgatgttttactgtaactttttaaagtgttgttagtccgtttttgttatgttgcaaaagaaaatagtatttacaggtggcttcttttaaaatatgcacaatataaagcaggaatgtatatgaaactgtcagatttgtatcgtattgcagagtattagctttgaaatttgaagtaaagaaagctgttgtagttttaaaatgccttatgggtactcagtttagaaatgttcttgctaatactttgatgtacttagagctattgggtgtagaactttaaactggagggatttacccggggtgtacattgcaagtggcttttataaggtggtctataatggtgtaaaaaggtattttcacactgggaaag

SEQ ID NO: 615903 - DNA, 199 bp, Homo sapiens
ctcggtcttcgatgacgtctgctgtagaagctttctaatattttttaattcagttattgtatttctaggatttctatttggtttaaaaaattgtttctatttatttattaaatttagtattttgttcctgggctgtttccataatttcacttaattttctatccatattttttgtgattccctgaactttaagagaatt

SEQ ID NO: 615904 - DNA, 325 bp, Homo sapiens
tcggtccctgtgtgatagacaactagggtcagtttgcaggtggtaagccatttgccaagatagttgtaggcaaagaagggcagatttattagagaaatgtgaaattatgttgcagtgggcagctcagcagagaaggggctacctgcaaagaggcaagggctggaggaaagttttatagggtcctgctgaagggtgctacgtgtggaatgaggtcattgtgcccgcaggttgtttgtgattagctgtttctaacaattgttcatacaataattgttcattattgttctcaacttggggctctccccaacctggggacccttcctta

SEQ ID NO: 615905 - DNA, 648 bp, Homo sapiens
ggcacggttatggagccctgttaccccctcctcggtccccgagagccaggtccgcttctgcagggttcccaggtcgccccgactccaggggccggagcgtgacaccagactcgctggcgcttcatgagagaacttccaaaaggtggaaacagatctggagagggcacgatacggagttgtgtacaaagccagcaaacaagttgacgggagaggtggtggctgcttaggacaatactgcctgtgacactagagacgtgagggtgtgcccagtacgtgccatccgagagatctcgtctgacttaaggagacttaaccaatcctaagtattgtcaagctgactggagtgtcattcacagcagaagagataagaactctaacctgtgttttcgaactttactgcagccaagactctcgaagaaattcggtggactgccgcatgctactcacgtggccattccgtcttgcccgctcaatcaagagcatagtctggttccagacatgggtccagggacttagactttcgtgccattctcatcgggatccatccgagcgagagcttaaaactcagaaatcatgcttaattaacacatgaggggggccatcaagctagcagactttggactagccagagcttttggagtccctgat

SEQ ID NO: 615906 - DNA, 704 bp, Homo sapiens
tatttaatataccatgcaagtatatttactctaaaattccaaagatcttttgatgttttcatctgtttcagtataatttagagaccgattctttgcttttcaataagaaaataaagttaggataaagagtataaatatatagtagaacaaagaaagtgaaaaccagaaataaaatctctcaaaaaaatagcaatacatgtaaatgtataaagcagcataaaaattgaaaatggttttaatacttattgaaaaagataaacaaagtcagaaggttcagacttttttttaaatccaaaaccataaaaaaaaaaactgtgaaaacatataactaatttatttcttgtatctttttgtcttcactttggttgatcctttagcttttgaggtttggggctcaatctctttaactactctttttataagtacacttctagcatcatttgaaataactttaacctcatcagcattttctattatcacattggttccaatctcatcatctccattttctgagctaaccctagagcataacttcttagtagtactcgattgatcagccatattagacaacgctgtcgaaccacgcttagatgaaggagtagactgttcattggtcgtagcatcttgaacagttcttcgttgctattagttaacatcaattgacccctttccataaaaattgagaaatttttattgatctatga

SEQ ID NO: 615907 - DNA, 475 bp, Homo sapiens
gccttccaaagtgctgggattacaggtgtaagccactgtacccagccagagaaagaggcatttttaacagcctcttaaatttattagaatcgtggatattttccttgatattactgaagcaattctcctgcctcagcctcccgagcagctgggactacaggtatgcactgctaagtctggctaattttggtatttttagtagagacgaggtttcaccatgttggccaggctggttttgaactcctgacctcaagtgatctgcccgcctcaacctcccaaagtgctgggattacaagcgtaagccacatgctcagtcccagaagtctgttttatgttctctcctagtcattaccctcctccattccaacaggtagccactattctgacttcctctggtagtattggtgttcacctacaagcttgagacttggtaataattgccacaaacctccttgaagataaagtcatgttggtg

SEQ ID NO: 615908 - DNA, 151 bp, Homo sapiens
gtattcaatttggcaggtatcgcctgcatgtatgtccccactggtgtccgtgcgacggccaaagcccacagcgacagtagcagtggaaagaactgctggaaggaaagcactgcaggtacatgccacatccagtctgcctggcgttcagggt

SEQ ID NO: 615909 - DNA, 109 bp, Homo sapiens
gggggcgggccgcggcgggaaggggccgaagggtctgtagccgggaatgcgctgcgcgcaggggggatcacagaccatttctttctttcggccaggcgaggccctgacg

SEQ ID NO: 615910 - DNA, 823 bp, Homo sapiens
  misc_feature (37)..(37): n is a, c, g, or t
  misc_feature (271)..(273): n is a, c, g, or t
  misc_feature (284)..(284): n is a, c, g, or t
  misc_feature (354)..(354): n is a, c, g, or t
  misc_feature (378)..(378): n is a, c, g, or t
  misc_feature (390)..(390): n is a, c, g, or t
  misc_feature (401)..(401): n is a, c, g, or t
  misc_feature (412)..(412): n is a, c, g, or t
  misc_feature (417)..(417): n is a, c, g, or t
  misc_feature (427)..(429): n is a, c, g, or t
  misc_feature (434)..(435): n is a, c, g, or t
  misc_feature (438)..(438): n is a, c, g, or t
  misc_feature (440)..(440): n is a, c, g, or t
  misc_feature (448)..(448): n is a, c, g, or t
  misc_feature (453)..(453): n is a, c, g, or t
  misc_feature (459)..(460): n is a, c, g, or t
  misc_feature (489)..(489): n is a, c, g, or t
  misc_feature (514)..(514): n is a, c, g, or t
  misc_feature (520)..(520): n is a, c, g, or t
  misc_feature (527)..(527): n is a, c, g, or t
  misc_feature (529)..(529): n is a, c, g, or t
  misc_feature (544)..(544): n is a, c, g, or t
  misc_feature (549)..(549): n is a, c, g, or t
  misc_feature (554)..(554): n is a, c, g, or t
  misc_feature (559)..(559): n is a, c, g, or t
  misc_feature (561)..(562): n is a, c, g, or t
tcagcaggaacaagaagacttagaactggctattgcnctcagcaaatctgagatatcagaagcatgaagaattctcttgttcttggcaacaatatagtattcttcttcctgaatactgaaactatttacaatgtgtatcaaaactacctgtgagcatgggaatacaaaaggtttgagattcctgtaaatgtgacaaaattttaggattttttttttttcttcattacagattcgtctttttttttttccttataaaagccgtaacccagtnnnagacaatttcncctttcatttaggccccggtccgggtttactttacggggagctttggccgtgccgtggtgctatttactngtaaagctagagcacccaagtttntgccttcggganttatagagaantagtttccccntgcantaccctgtcnnntagtnnatncngatgatanccagngaggtnncttaaagttggcagtattctcccctgatnggactggtgagtgagggtacggganagaatntcttatncntctatgatgggcgcnatggnctaangtgcntnnttaaattcctctacttaattggctttcccagcagattagggcacacttttctgcccaggtttttctcctattggaaacggtgcctgtggttgaccatatgcacaaattcgactttccaaataaaatttacaccctgtgtgaaaactttaacaagtcttgggtttcaatttgacacagaccccggtggcgaatacaccgttccaaacttgaacgtccccgcacgggaaatccataccctagtgagttggccttgcgctattg

SEQ ID NO: 615911 - DNA, 184 bp, Homo sapiens
tttatcgtgaaatctatccatgatctgatatgagagtaataatagcaacattaaaaagagtaccttaagattttatacaacagtacaaacgatactcaagtgcaatactacctacgtccaaaatctaaatcaaaatcaaacttacccatcagaagactaagagatgcaatgggagacaactgac

SEQ ID NO: 615912 - DNA, 172 bp, Homo sapiens
ccccacccccatgtccaccatgaccctcttcccacggtgacctgggctccctccccaatcatctttcctgttccagaaaggtggggctgaggtgtctccatttctgcctcaacttcatggtgcactgagctgtaactttttccttccctattaaaattagaacctgagtata

SEQ ID NO: 615913 - DNA, 395 bp, Homo sapiens
acaggttccccgctcagtgcccgagagattgtatggtcagtcccactcctctggaccatccccctgtacctgggagctttcctgtcaacagtgggctgactcctcagaattctactgtggtcttgtggctgcagtcatgaggtgtagtgtgcggataacagaggtagagcttgtctgtgcctcaggacagttattgccataagttcccatgagtaagacggaacaggtgatacattgaacaaaaagcagtccctgctccaagaagtatctatggttctccctgaatatcattctcaaaatggatgggccgccatcggatcctaacaaacttcccagtgtcgaatagaaccaatcattggtgtctcccgctaatagggaagcaccaacatcgttga

SEQ ID NO: 615914 - DNA, 545 bp, Homo sapiens
cctttaaaaacctctttcttggttttttcataaattatttaaaaccccatggatttggggcctttaaagaaagcctagaaattattttttttgggagcccaagcaattgttagcaggccttccaccaccttgtttccaaatttgtcctttttataccaaggtaagagatgcggggcctggcacccgcttccagtaaggattggggcgctgtgcaacgcagtgggcttgggcgctttgcagcagctcttgggcaggcccaaagcgcttcacctgcttgggtgccgtggctcacacctgtaatcccagcactttggaaggccgaggtcggcggatcacttgagctcaggagttcaagaccagcctgtgcaacatggtgaaaccccgtctctactaaaaatacaaaaaaattagccaggtgtggtggcaggcacctgtaatcccagctactcggaaggctaaggcaggagaatcacttaaacccgggaggtggaggtttcattaaacgcagttaaaacctttgcaagccaatagtaagacccaaatag

SEQ ID NO: 615915 - DNA, 775 bp, Homo sapiens
ccctaacagggccctcatccagacctccataatgatctccggctacccatgtgatcacagttccactccataccgctcctcatactaggcctagtaagcaacagcactaaccatataccaatgatggcgcgatgtaacagagaaagcacataccaaggacaccaacaccactgtccaaaaaggccttcgatacgggataatcctatttattacctcagaagttttcgatcttcgcaggattgaatctgagccttttaacacatccagctctagcacctaccccgccaattaggagggcactggccccaagaggcatcagcccgctaaatcgccctagaagtcccactcctaaacacatccgtattactcgcatcaggagtatcaatcacctgagctcaccattagtctaatagaaaacaacgcgaaaacacacaaataattcaggcaatgcttaattaacaagttgtcacctgggtctctatttgtaccccttcctacaagtcctcagcagtacttcgaagatctcccttcagccatttgccgacggaatcctacggctcaagcattgctttgtagccacaggctgtccacggactgcagcgtcattcttggctcaactttgcctcaactgtatctgttccatccggcacctacatactttcacttttacatcccaaagcatcacttttgggtttcgaaaggccgcccgcctgaatactgggatacggacgaatgtgggagaggaatacggaatgtcacacacttaatgctgagg

SEQ ID NO: 615916 - DNA, 235 bp, Homo sapiens
ccctataaaattgtttccttttcttttggccttttacaaatagggtcccataatggggcctctttaacataaaggaaaaaaggcatatgcttatatggatgttttggtagaattggctaaaggttcccccagaaataagttaatgggctgaagtttatagctggggggataactgtcaaatctttttgtaaattcccttttttttagccccccaaataatccaaaccccccctta

SEQ ID NO: 615917 - DNA, 206 bp, Homo sapiens
cctggtcgtcgatagcccgcacctgctgcaaccaacatccgtaccgtgctcggctccatggagctggatgcgatgctcagcacagcgtgacggcatcaacgaaaaactgctgcgcaccgtcacgaagccaccgcaccgtggggcatcaagatcacccggatcgagatcaaggacatcagcccgcctgccgacctgatggccgccat

SEQ ID NO: 615918 - DNA, 242 bp, Homo sapiens
accaccaccgccccggccgccaacagggcgaggtcttcgaccacacccagcagatagccgagggcctcgcgtttttccccgagttgccaagccgcgaatccgtcatagacctccacgaccatcttcaccgccgccgccgccaggatgatctgaccgattaccggcacgaacgataaagccagcgccaacaggctcagaccggcttcgcggtaggcgtccagacgcgcctggcgcacccgggc

SEQ ID NO: 615919 - DNA, 231 bp, Homo sapiens
  misc_feature (58)..(58): n is a, c, g, or t
  misc_feature (87)..(87): n is a, c, g, or t
  misc_feature (93)..(94): n is a, c, g, or t
  misc_feature (141)..(141): n is a, c, g, or t
ccgccgctttccttaaccacaaatcaggccggacaggagagggaggggtggggggacnagtggtgtgggcattcagactgccagcanctttgnnctatctacatgcctgtgggctcccccgatgcggtgcagaacagttcnctgggccactctctggcctggcttggggttttgggcggaaaggccatgggaaacccccggtttgtccccgcccgggccccaaaacccgcc

SEQ ID NO: 615920 - DNA, 488 bp, Homo sapiens
tgcccccccgaggttgaagccccattacgcgccaacttcacatatcgggaaacaattcgggcccggggtccacttgttcccgccgccgtgggaggagttggccctgaacgagttggtaaccttaaggtgcttggcacgtggtttcagccccaaggatgtgttggttcgctggttgcaggggtcacaggaattgccccgcgaaaagtacctgatttgggcttcccggcaggagcccagccagggcccccccccttttgttgtgaccagcatattgggggtggcaaccaaggattggaaaaaggggggacaccttttcttgcagggtgggccacggggccctgccgttggctttcacacaaaagaccttggcccgcttggggggtaaacccccccatgtcaatgggtttgttgtcatggggggggtggggggcccctgttattgagcggcccgccggtccccccccctgaataaactccatgttccccca

SEQ ID NO: 615921 - DNA, 225 bp, Homo sapiens
tctgtatttttagtataggccgggttttgccatgttggccaggtttggtcttgaactcctgacctcaggtgacccacttgcctcaacttcccaaagtgctggcattacaggcacgagccatcatgcccagcccaaaagtggggctttcatttcaacctgctgctctctaagtcaacgttcatgactattcacttggtactctctaccctggcaccaatctttcat

SEQ ID NO: 615922 - DNA, 1096 bp, Homo sapiens
  misc_feature (284)..(284): n is a, c, g, or t
  misc_feature (356)..(356): n is a, c, g, or t
  misc_feature (360)..(360): n is a, c, g, or t
  misc_feature (410)..(410): n is a, c, g, or t
cgaagagttcacaacgtgtagaacgcctggaagccggcgggtgcctgctgtgttggaacagaatgctaaacgcacttccagcacgtcctgtccgtatctcagaggttcggaagacttatcgaccatgtgagcgcagcgtcctgctttgtttggcttgcttgacgtgctgcgcgactgagtgcgacagtcgtctgcagtacacacagcactagaaacacttgatgcagcattgtggacgactggaacgatcttcgcgtgtgcagtcatgcgagacttcatcccgnaaccatctagacccccgacgtcgtggtcgcggaagacacttcccacggtgtgatgctcgtgacaagcctagnaggntggacagtcatcgcgagtgaccgagcgtcgatcattcaaaccctagcagncccgctattccttaaacgcgactggatcgaattgactggggacgtaccgaacacactgcgacgcgagtctaatgcgtgcaccagcgggtcataagtcatcctaccgactgttgcgtgcggtctcaactgttgggggaggccggcaacacgggtatccatgactcaaggctatctggctagtgacgcccttgtcgttgttgcataagcgttactcccgatctcaaatggtaccttgactgctcgcatgtacctaacatgatttacctggcgactctagtgccttccgtcatgtccttctgggtaacgccatcagggtagttagcgacttttcacaggcgtttgctgcccatactccatagcgtgctcggatgggggcgacaagaggactggttctgtgagactctgctccgacgccttgtcatgccatggtgcgctcgaatggcccagggcctctagatgggtaccttgacgccatttggcccaatagcatcgcttcgaccttggcctttgtcctgtcggaaaccaagggtttccggcgcccctttccccgtgacccgttatccaattcccttagaagccctggtactggatcaaatcccttggatcatggggccgaaacgccgggaccttggaatggcggggcttctcttgttccgcaaagggttcccaggacattccacaaatct

SEQ ID NO: 615923 - DNA, 703 bp, Homo sapiens
gggaaacgggacgcgatgttgatctcgggttgctcaaagggaccttcctagctctgtcctgaaccatcggagctcatcctggacagtctcactccgtggcggacgactgtgatgactgctggttggaagccagattgtagccacacatccgcccctgcctagcccagagccctggagcagcaactgtgctgcagatcacagacactgtgaggatatgaatgtacgggtgagcacctcagcccctctttccccaaactcgtgcacaagcgtgtggcagtgtctaccattctccatcatggactatgtggtgttcgtcctgctgctggttctctctcttgccattgggctctaccatgcttgtcgttggctggggccgtgcaatactgtttggtgagctgctagatggcggatcgcaaaatgtgtgctgccattccggtgtgcactgtgccctgactggccatccttaccagatcagccagtgaggccatcctgggtgtgtctgtcagagatctacagattatgggacccaatatttggttcctgtggctgctgctacttatctggcggctgcatgatacctgcaaaatcttcatccccgattaactacgtgctgcaatctcaaccattgcctatgagatacctgtagtttcggattcatgtaaacactgtgccgacctgtgtggaactgtgaacttcattcttt

SEQ ID NO: 615924 - DNA, 151 bp, Homo sapiens
acagttctcagcagggccatggcagagtggtgcggcacagggtggcagcagccacgcaagcaccagcaccagcctgcggcatcacacaccccgtgcacaggcatcgtgcatccatctgccagcacttgcgcgccaagcatcggcagagtgg

SEQ ID NO: 615925 - DNA, 344 bp, Homo sapiens
aataagacaagaagtgtccagattacacctgccccatcacgtactacctcccctgctgacatcaccatcctgactgagacggctccgccagcagtgggcagacacaactttgacaccgccaagcgcttcgccaagcgcctggccgagcgcttcctcacagcgggcaggacggaccccgcccacgacgtgcgggtggcggtggtgcagtacagcggcacgggccagcagcgcccagagcgggcgtcgctgcagttcctgcagaactacacggccctggccagtgccgtcgatgccatggactttatcaacgacgccaccgacgtcaacgatgccctgggctatgt

SEQ ID NO: 615926 - DNA, 83 bp, Homo sapiens
ttgaccccgggcattggcggattgttgcagtaccgctgagatggcaccactgcactccagccaggcgagagtgagactctgtc

SEQ ID NO: 615927 - DNA, 371 bp, Homo sapiens
gggtttcccgtggggggacctttttaaacccccgccccggcccccccgggggggttttggcccatttttaacccggggccctttgggttaaccccccggggggggggcccctttttgggggggggcccgggggccggggtttccaggccccccttttggaaaaaaaaccaagggggggggggcccccccccaaacccccggggggggtttaaggggcccttgggggggggggggggcccccccgggggggggggggggggttttttttttcccccccggggggggggggggaaaccggggggggggggggttttcccccttcccgggggggggaaaaccccccgcccccaaaaaaggggtttttcccttta

SEQ ID NO: 615928 - DNA, 243 bp, Homo sapiens
attcgcgggcgcgtcgacaaacaaattagccggtcgtggtggtgttacatacctttaatcccagctacttgggtggctgaggcgggagaatcgcttgaacccaggaggctgaggttgtagtgagctgcgttcaaaccactggactccagcatgggcgacagagcaagactctgtcctggggaaaaaaaaaatgtgatagacattgccacttctttctaactgtgtacaacttgatcaaataat

SEQ ID NO: 615929 - DNA, 205 bp, Homo sapiens
tgcagccaatagccttgttgttggacacccccttcgaatgatgaaattaatgcagttgctatatggtggaacacatccgcgaaggaatattatgttaatgaggccgcatgattataagtgtcaaactttgttgtgttcatattcatgttagtgggtgtaaaacactgtgtgagccaaatgagttatggttttaagtgggatcaga

SEQ ID NO: 615930 - DNA, 297 bp, Homo sapiens
  misc_feature (268)..(268): n is a, c, g, or t
  misc_feature (293)..(294): n is a, c, g, or t
cctctctgtcttcttcccatcatcctaagcctagtccgtaatcacataagctattccgcccgagcaatctcgaattacaatatatacacgcgagacaaagcaagtgcaaccagtaagtactagctaagtcaagcgcccatgaatcatacgaaggccccgcagcaataggatcctcccgaatcaaccctgaccccgctcctaatcacataacctattcccccgagcaatctcaattacaatatatacaccaacaaacaatgttcaacgncagtaactgactactaatgagatcnnccg

SEQ ID NO: 615931 - DNA, 865 bp, Homo sapiens
  misc_feature (144)..(144): n is a, c, g, or t
gtaccaggaagaacgctacgtaacagcagttggagaagcgctttccgctatgacaaactcctacttgtaagacatctcaacaggagcgcaggaatgctgctttaggcaggttggctaatccacgataagcaaagcagaatcttngcctttctgagatcggcgggcctacctattctggcccatgctgttgactgtgtgggttcctagtgagagagaatatacttggtgggcatcacttgaacaattttcatggctatgttcgacggcagagtctgaatgtcaatacggttgctgcataatcgtctggagtattggtgatttccacgatgaaacgtgagtagatgcccgccgagaggacccttctccgcttgtaaatcctagagtgacatttgaggatcgcccaaaaaagtgatcccgagagcagttggccgagattgggagactctagtgggctagcgtgaagttgcataggtagcacttgcatagtcgcgcaaacgaaaacgcgatcgtacaaatacagtcccctatgtagaaaggagccaggacgcactttgggatcacgtatcggtgggcacaatacccttgtcgaccgacaagcgcatgaacgggtttactacacccgaagagtcccccacagtaggagaatgtgagacagaaagcccgaaggacgccatttcgtgcaaccactgaacatttggtaaagccggaagggcgagatctgggtagactcggaaatggctacatacggtggatatatacttatgggcaaacgtcgagtaaggtttacctaacacctgtcgagttgcaaaatcgcaaagatgtctcccccgaagaggggcacaccattgcctaagtttgaacctaa

SEQ ID NO: 615932 - DNA, 434 bp, Homo sapiens
cctttggcttagtggttttggagtcctggtattattttctttttagaagagattaaatgagatgtgtgtgcaatgcactgcacaccaccttccttagagacagagagggcccggaattcgagtctgtgttttcatagcctcatttaaagaacatgaaaagaaacagatgacattcactgatactcattcatccatttcatctgagacccttcagcttttaggtgtctgtgaaagacaatggagaatctccttagtcagagtcgggagtcctggattccaacactgaccctgagaagcagccagctgtgggacctggcacaggtcacctcccctccatggaaatgaagataaacctcccatcctgtagagttcactgattctctgtccctgtttgctcactgaggcataagttaactgcagtaaactgttcactt

SEQ ID NO: 615933 - DNA, 386 bp, Homo sapiens
  misc_feature (17)..(17): n is a, c, g, or t
atctagaggatccctgncgggtgaggagtgagacacgtcccaaggaaaaaaaaagggtgggggggtagttcttaagcgttgaagatttccttttgggaaagtaataaaggtagaaatattaataattttcctaaaacatctccctaagaagtcactgataactataattagtttaaatttattcttacactacttaagaaaaatttcatttagaaaaggctaccatgagatctttggactatatggagtagactgcatacagatctctttatttctattatgaatattttagcgattataatcagctattccactgagtattagattgggtcactaagtaactcatgtttttctttagtcaatcattcactccttcacccaagcta

SEQ ID NO: 615934 - DNA, 248 bp, Homo sapiens
taccgtgaaaagtggaacataaaagcttccgagtctcttgctcttgctctccctgctcctctctcaccgggcagagaagtttattaccttaaggttgttcttgaacaaaagaggctgcacatattggatggctaagacagaaagatctcaccagtctggccttccgaagctgaaacaggctcacacagttgggaagaagaagaaccaagattttttctcagagtgttttcttttttttttttttgaga

SEQ ID NO: 615935 - DNA, 356 bp, Homo sapiens
gcaacctccgcctgccccacctcgggttcaagtgattctcctgcctcagcctcctgagtacctgggactacaggcatgcaccaccacggccggctaatttttgtatttttagacgagacaaggtttcaccctgttggccaggctggtctcaaactcctaacctcaggtgatccaactgcctcggcctccaaagtgctgggattacaggtattagcaccgtgcccagcagaattttttaactatttggttacgactaatttggatatgtagtccatgcagctttgatttgtgccataagatgggcaactgcttccttttgtgatagtaaaatttcctaacaggtttgacatgcatac

SEQ ID NO: 615936 - DNA, 517 bp, Homo sapiens
  misc_feature (117)..(117): n is a, c, g, or t
  misc_feature (231)..(231): n is a, c, g, or t
tgacctagaggatccccaggcaaagctcctactatattctaatgttctctttaaatttatattccctgtatacagtatataatattcttctcactttcctaagtcatcactcattgnaaaagcatagataccaagctttgatgagcaacaaaattttctgctgctattcaaatgacccattataatgctatggaaatatctttccctttaacaacttaaataacagcctanaattctgcagattccttaatgacttcatttcttccttctcattagttaaggaaatgcatttctaggccagatctacctctgtgctaccattttatggctcagcattcattttcttccctcattctttattacaaagctatccaaaataaaatctgaaaataagggcaaggaagaaagccagtaagaactactcacatcagatttagaggatatattctcctccacatctgaatcatagggatccacaatatcatcaaatggcggtaacgtagatttcttcttctct

SEQ ID NO: 615937 - DNA, 110 bp, Homo sapiens
tcagcccatggtgatctgaaatggctcaagatgagggcctatgtggaaggaacagggagccagtgatgaaagcccagagaatctcccacatcttcagctgaaggaggaag

SEQ ID NO: 615938 - DNA, 124 bp, Homo sapiens
gtgcgacccggagagaataaggttcgccttcaattcagagtcggagttcggctctgaagcctccagcccatattattttggacccccagcaaagaatggggtggcagcagaagtcagcccagcc

SEQ ID NO: 615939 - DNA, 223 bp, Homo sapiens
ccaccagcaaagacatttatccaaacggaaaggacatatggcaagcctgaggaagccaattgtaggagaaaaaaaaaagggaaatcagtatatccaagagaggtcggcactccatatttatgcacccccatatttatggcagcactacttagagtagccaaaataggaaatcaatctcggggtccaacaacagatgaataaagggaaatagggggtatatacg

SEQ ID NO: 615940 - DNA, 199 bp, Homo sapiens
cactactacactgattggtctccaactcctggctcaagcgatcctcctgcctatgcttgccaaattgctagggattacgagggatgagccacaatggctggcctctgctagttccgtattctctagagttgtctttactttgtgctagtgtgtccctcattgtgcagatcctctgtaaaaattaatacctttttttttt

SEQ ID NO: 615941 - DNA, 563 bp, Homo sapiens
gtaggagggtcgcttgaggccaggagttcgatactagcctgggcaatataacaagaccctgtctctacaaaaaaaatttaagaattttagcccaggtgtggtggcttatgcctgtaatcccagcattttgggaggcctgagatcaggagttcaagaccagcctggccgacatggtgagaccccctctctactaaaaatacaaaaaattagccgggcgtggtagtgggtgcctgtagtcccggcataaaaaaagattttagaggttaaaaaaaaaaaaaaaaaaaaaaaaaaaaaatttttggcaggcctagcgcacccacaataaaaggctttctaaaaacacacagtaggggcgccgaggccccccagaatggttaacacaacacagaggcaacaagcgggcggcccaagaaacaccacgggaccagccacaaattcgctcgaaagccacaccaaaaaaaaaaaggcccggggagacaagcaacgcactacgacacaacaccccgtaggagacacatgaggacaagtgagacctacaaacggtcgcagggagcccgatagat

SEQ ID NO: 615942 - DNA, 512 bp, Homo sapiens
  misc_feature (344)..(344): n is a, c, g, or t
  misc_feature (349)..(349): n is a, c, g, or t
ttaagaatgcccaggctggagtgcagtggcacaaactcggctcactgcaacttccgcctcctgggttcaagagattctcctgcctcagcctcccgagtagctgggactacaggcatgtaccaccacacctggctaattttttgtttttttagtagagaaggggtttcaccatagttagccaggatggtctcgatctcctgaccttgtgatccaaccacctcggcctcccaaagtgctgggattacaggcgtgagccactttatacaatactcattcagttcttatcaaagaaataacccagacttaatcttgaatgatacgattatgcccaatattaagtaaanatatnagaaaaatatagagttatcttacgacccagcagtttggctgctaggtatatacccaagcagaatgggaaacgtatgtgtacactaaaacttgtgcaagactgttcattacaataaacaaaaagtggaaagaacccaaatgtccatcaactgataaataaacaa

SEQ ID NO: 615943 - DNA, 1818 bp, Homo sapiens
  misc_feature (831)..(831): n is a, c, g, or t
  misc_feature (999)..(999): n is a, c, g, or t
  misc_feature (1154)..(1154): n is a, c, g, or t
  misc_feature (1170)..(1170): n is a, c, g, or t
  misc_feature (1498)..(1498): n is a, c, g, or t
atccggcttgttagcgcccatactgctctgtggtgaccgtccagctcctggttgtgtcgtcttcctatggatactcccggggggcagtactccgttcttgccgtgtattttgccgtcggcccctcggtgctggctggattaactcgtttttatcatcgagttacctctgtttttcggctcccttgtggcccctactttttgcggcccctcctattggtgaccccgtgttgtgtgctccaccaataaatctgcgcggctgggtgatccccgggttccggtggatttttccccccggggaatttttctcttgctgatgaatctccaacggcgcggctcccggatatgctgaatatattgatgggtgtgatactcccccccacgcggcccgccgatggatgctcctcctatttaaccaggggcggggcccctcttgtttttcagagccctcgccgtcctcttgtgatggtgagcccctctcttctgcgggtccctttatcgcgaccaaatgtgtgtgagaatgtgtttcacaacacgtgtgtgcccgacaagcttcgcccaaatgtcaagccgcgctgctccttcttcttaattattacattgatggcgcctccttctactctgttttcctcgcgctacccgaccaccgcggtgtgtagcccaaatatatttgcccccgcaaattggaagtggggccccccccgatgtttggttttaatacaacccggggatggttgattatggccaaacaccatctaatccccaacaagtggggccacctcacaccaagacgagcaacaaccacgacacctgtgggtgtcccacacaaaaatnggcgcccgcattcttccggaaatgatatcccggcgggggaaatataataactctcctcaatcttttttatgttttaaccgcccttccaagaggagaaggtgtttttttgtggtgttgtctttccgcgccacgggggagatttttttttttttcttagagcagcccccncttgtgtgtgagccccgacgacgttgctcaacagccgccataatagcgcccccggtaatcctccccccccccccacttttttataggggagagggcggcgacaccttggggcgccccgccccaaaaccaacagggcaatttctaacacctcccgncgtatatatgttcccncccttatagagaatgtgcccacacaacgtccctattataacacacacattccgctattgtatactttctggcacattcacagggagtgttatatcacagttcaacaccttgagagctttcacaccacatatagtttctatatatatagagaatacacacacctctgtgatatacccacatatataaatattctaagccacatgcggtttatatcacacaaatatttttacatgggggtctcttttatagtttgacacacttcctccacgaaagcgcgtccgagcagtatacattacagcagatgtatcctcctgtctcaccacatgtnttccgtacgagcaattatttcacggggatgcacacaatatttctatcgtagcaccacaagagcttccactcaggaatatcaaccgtgcgattagatggcgtccaacatttgcgcctcattaatactgagttcagtacgcgcgcaccgacataatcaatattccccatctatcacaatacccaagcaatactcagcaatctctagtgtattcgataaacctcccgcgcatcgattactggcattttgtagaactggtttgacatatttctgtaggtccccaatttattcgatagaagggttcttaaaaaagaaataaaaaa

SEQ ID NO: 615944 - DNA, 428 bp, Homo sapiens
ttaagaatgcccaggctggagtgcagtggcacaaactcggctcactgcaacttccgcctcctgggttcaagagattctcctgcctcagcctcccgagtagctgggactacaggcatgtaccaccacacctggctaattttttgtttttttagtagagaaggggtttcaccatagttagccaggatggtctcgatctcctgaccttgtgatccaaccacctcggcctcccaaagtgctgggattacaggcgtgagccactttatacaatactcattcagttcttatcaaagaaataacccagacttaatcttgaatgatacgattatgcccaatattaagtctgggttatttctttgataagaactgaatgtgccgggcgcactggctcacgcctgtatcccgcactttggagccgagtgggtgtcaca

SEQ ID NO: 615945 - DNA, 205 bp, Homo sapiens
tgacatgcgggaccacttgagccgggcgtacagcatgatagacgagctctgccaggacaggatcttcacccgcgagctctaggatacctaccactacctgcccttgagcctgcccaaccggaggcctcagttcttctttccgaagtaccgcatcgctcgcagcttgatgcccttctctccgaacgagcgcatgaagttgcacgcc

SEQ ID NO: 615946 - DNA, 342 bp, Homo sapiens
gcaaggggcatacctaatgcttaccgaacgaaaaattctaggctatataccactacgcaaaggcccaacgtgtaggcccctacgggctaatacaacctgcgctgacgccataaaactcttcaccaaggagcccctaaaacccgcacatctaccatcaccctctacatcagcgcccgacttagctctcaccatcgctcttctactatgaacccccctccccatgcccaataaatactaccgtatggccaccataattaccccccatatccttacactatcctcatcaccccaataaacaatattaaacaccaaataccactagctccctcacaaagcccataa

SEQ ID NO: 615947 - DNA, 1088 bp, Homo sapiens
gcgccgcatgtgccgctagcggtgccccgcctgctgcggtggtaccagccaggatggcggagtgtgaacgttgaccgtgggagcagggtatatggactagcttgtcagtgttgctgccctgatgcacagctcaggctggggctatatactctgttcgagtgcgtgcgcctggcaggtcacgatctagctggacagttggactacgtccaatgaccgcgtgcagtcgaacgtgctgacgatgaggctgtcttggccgcgcgagatccggcagcgtttcacgctaggatactcgcttgcatgccatgagaccctacatcgaaagcgtagtgggatgaattgcctactcctcatgctacgtgggaagcgggttgtcgaccacgcggggacgccaatgggacaccaagtgtgacaccctgtgcaagcgacgcgtggtgtcaagggactacagcaagcgcgctgatgcgtagactgtggacagattacactgagcgaggcccattactacgcaccattgagctatgatttcctcaacgaacatcgagcctttggcacaacggcgatataagttagcgaagcgcacgcgctcatcgagcgtgcgttcgatagcataggcgcaccaacatcggggacagtcaccacagcggctagagatgagcgcgacattggttcatatgacggtctgtctaaagctcgcagttggcgctttaatagatggaacattgcggcacgaatattgagcagcgaccgcgaagacctaccaacccaaaaggtctggggacacatcgtcgcacaaacgtactccagagacatatcccacttggcccattggactacccacccaaccattgggaaggggagcgcacatagacgtgaggagccaaaagcggaacgcaagcgaaggacgttatcactcaaatggttagcacaatcagcaacttatcagcacgttggagctgctacacaaactacgtacaccggcgagccaaacgtcacggaaaccgttctcttcaacatcgccagggagtttcactaccacaatggggtttggatacaacaaacaggaccttcgccagcaccctcacgatgac

SEQ ID NO: 615948 - DNA, 1166 bp, Homo sapiens
gtgggcgccctatgtttgttcacgggctctcctcagccctctgtgggaattgttccttcttgttcctggtgcctcctcagactatttctcttgtgatgggatatcctggggtggagttttggctggtccacaggctgttccacctcctgggggcccttttctactcggagagtcctctccgtggggggaaatttttctgcggggcgaccccttgtgggtcctcatgtccctcgttcctcctcttggggaagtctccacctgtcgctcagctgcccctaaattgttttcccacatcacccggtgtgttttcttggagaccacgccgcctttgggtctttgagcttcttcgtttagtcttgccaccacggcgttgggtaatcccgcgtcgcacatggcttccaaaggcctctcttcaatgctgaaatttgagtgatccacctcaatgcgcccaaattgtttcaccctgggttacacaaccccatgtgcccacctcgccgttggggtgcccaaacacacttcctcgtgtccctcccaaggtcacatattgttttggcacattgtgttaaaagtgctgttaatttttctttggaaatggagaaaggcaccacctttaggctgtcccccgtgaatttcgcggtgccaactctgaatatggccccccccacaagtcccctgtggcttaatgtttcggttgttcttttgtgaattgccccaattaatgttaaagaggacccctgaatggctagggctccacccaattttgtaattcccacatcgtttgtgtgaagacacgagtttggttttccccctgagaacttggttaagacttgtgctacctgtggaccctgagtcccgcactatggcagtccccctttggtgacactttcctggccactttttgtttcccttgttgtggatggtgggttgtgcccaccttcctggaggtgagagaccacgctccctggggtgtagaatttcccggaggcgtgccgctggggtcacgagtataaacttgaagcacgagttctcgtggcactgtccttttcctctgcacacccattggctcgctttcttcttttttgtgtcttctctttgataaggatcccgtttcctaagggtgccaaaataaaaatacaatttgggccaacaaaagaagaaataaaaaa

SEQ ID NO: 615949 - DNA, 689 bp, Homo sapiens
  misc_feature (237)..(237): n is a, c, g, or t
  misc_feature (689)..(689): n is a, c, g, or t
ggctcatgaaataggtttggaagtaaagtaacaacagaccctcttgctaaagacaaaatgatgaatggaggtcatatacacctactctgagcaatcgtgtggaaacatagacgcgctgattcttacaatgccgggggcctggggaccaggcttcgaggatttgtccgtcttgctacattgtggaagccctgacatggcaaggacggtggctggctcaatgtgaaggctccaccttgnttcttatgagactagtagcagcgaactgcgacgatcacttagagaaacaggccgttaggaatccattctcactgtgttcgctctatacaaaacagtggtaggttaatgtgttcagaacgtcgctgtccttactactcttgcggaagtatggaagtcacaactacacagagatttctcagcctacaaattgtgtctatacatttctaagccttgtttgcagaataaacagggcatttaggcaaagccaacaaaagaacaagacaacagcacaacaacaaaaaaacaagtttgtttggcgcccgccctggggcccctagagaaaagttttgttgcaaaacacttgtgcgttggggcgccgggggcccaattgatgtttcgtgaaaccttggtcatatagcgtgtttccccgaaggaagaaccgggggccagcaaagatggcgggaatttccccn

SEQ ID NO: 615950 - DNA, 928 bp, Homo sapiens
  misc_feature (18)..(18): n is a, c, g, or t
  misc_feature (85)..(85): n is a, c, g, or t
  misc_feature (92)..(92): n is a, c, g, or t
  misc_feature (222)..(222): n is a, c, g, or t
  misc_feature (233)..(233): n is a, c, g, or t
  misc_feature (239)..(239): n is a, c, g, or t
  misc_feature (350)..(350): n is a, c, g, or t
  misc_feature (453)..(453): n is a, c, g, or t
  misc_feature (616)..(616): n is a, c, g, or t
  misc_feature (927)..(927): n is a, c, g, or t
gacctcggtatttttttntgcgtgaccaggccttatctccctttctctcctcatttacatcgtctttaaaccctgcttggcaatnccttacncacctccgttattcccaggtaagacagggcgacctggaattccaactacttccttaagatcatccaactattggattattatcctaaatttttcatttttggatcagacaatttgggctccaagcagatncagcagatccncatttnccttcgcggtaattctttttttctgatgggcaagaacaccattattcgcaaggccatccgagggcacctggaaaacaacccagctcttgagaaacttctgcctcatatccnggggaattttggcttttttttcaccaaggaggacctcacttaaatcagggacatttttcttgccaataattttccatcttcttccctttctttttccatttcnccattttaattcactttgccagcccagaacactggtctcgggcccgagaagacctcctttttccaggctttaggtatcaccactaaaatctccatgggcaccatttaaatcctgatttatgtacagctgatcaagactggagacaaagtgggagccagcgaancaacgctgctgaacatgctcaacatctcccccttctcctttgggctggtcatccagcaggtgttcgacaatggcagcatctacaaccctgaagtgcttgatatcacagaggaaactctgcattctcgcttcctggagggtgtccgcaatgttgccagtgtctgtctgcagattggctacccaactgttgcatcagtaccccattctatcatcaacgggtacaaacgagttctggccttgtctgtggagacggattacacttcccacttgctgaaaagtcaaggccttcttggctgatcatctgcctttgtng

SEQ ID NO: 615951 - DNA, 571 bp, Homo sapiens
acgcgaagggtgcttacatatctgacacacagtagctagacccaaactgggtatagatacccaactttggctagccttaaaccctaaaagttaattaacaaaattggttgccgaaacccttcgggcccaaggtttaaactttaagagccctgggggggggtttttttcccttttaagagggcctttttttttattttaaaaaccccgaaaaacccccacccctttttggtggaattttttttccccctttttttaaaacccccttttggggggttaaaaaagggggcggccccccccaaaaaaatttttggaggggggcccccccagggggggaagaaaaaccttttttttttctcccaaaaaaaaaaaagggctttttaaaataaaagggggggggggggtggttttgtaaaaaaacaaaaaaggggtgttttttttaaaaggggggggggggtcccaccccccccccccccctcccccttttttttttgaagagaaataaaaaaaccccccccccttttttttttaaaggagagacccccccggaggggggggggcgggcggcccccgg

SEQ ID NO: 615952 - DNA, 1719 bp, Homo sapiens
  misc_feature (684)..(684): n is a, c, g, or t
caaggcgccggtgcagccccagcagtctccatgcggcggcccccggcggcacggacgagcaagccgagcggcaaggatgacgagcgggatgccggggatcaaggactgagagtaacaggagctgtcgtgaagcaggcataacaccagtctctcaagatgtaacttggcatcatgctcgctggaacgtacttagtgggcagcaacggcatacatccactgctcatctgacacagtcgcttgagaggtacattgctgcaaggccatgatttccgcttcctttcctaatcagacccttccgaatgcatcgtttcgagcttgtccctaagaccatcttgaagagaattcacctcgtcgcttcactacacattaattgggcacacatctcgtacatggtacacatctacttgaggagaacaatgtggccccccctgtgggtgaatgtagacttaaaggcggttgtttctcgtcgtggacgttgcatccattgcaattcttcgccggtatttctaggggcccgaagttggacccccagttgtaagttgcgcgggacgtcggttgaaggtagaccataccacatgatcactacggcgttctcaggctggggggccatccccactaggggcaatgggcacatttcggggcgaatcgaatgcgggtggtacagttgacgggtaagttggttcnacgcgacaagttcctcgcgtccaatggggaaggcacagggttgcgtcctcacacgggcaccgttgcgctaggggtcaggacttgggcattggagccggcaagcgaatgcacacgagctcccaacgtcgggtgtaggccctttgctgattccttcgaactcctgggttggaaaggcccaccccattcccgttgccgctcgttattcaaacatcgggggtgccacaaccaaataggccaggctagctcattggaagggccctcttgtgcgggaaacgcctgggcctgataatcgggcacaacatctcggcagggccaatgtgttgggcaaccagttggccctgtggacaggaaaatgggagccactttcgtgcatttggacacggccatttggccttgtacatttgtcgagaacaagggttccgtggcccgtgtttaattctttccatcccaaggtatggggtggtcggcaacgtttcacctggttgccccttggcaagggccgttggacaagaaaaccttcggagccctcgtaccctgggccggttggttggccccactggggcgctgttcgtttcgcggacaaacagggtctagaggccgagccatctcccccttgcacatgtcgtcccgggaaagcgttgggccaatgtgtaaatggccccccagttggaccggtgggtcagatcgggtgttcgcacacgacgcattctttcagcccttacctggcaacaggggactgcttggtataccttatacagtgaaacccagagactggtgctgttgagaggacataaggccccgagcattgcagggtgtgttcccgtcgtacgctgtacgacgatagcgctgccaggacgtcatacatcggcacccttacaacaagacttgctcttcccaggcagcaggcacaacagtgacgacactgtagtcgatgatccggccgtgcggcgccaactatgacacacgacgcgctgtaatcataacgacccagcacgacacacatcgtcagtaagcaaacaacgatacccacacgaa

SEQ ID NO: 615953 - DNA, 289 bp, Homo sapiens
  misc_feature (16)..(16): n is a, c, g, or t
  misc_feature (176)..(176): n is a, c, g, or t
  misc_feature (245)..(245): n is a, c, g, or t
tgctacaggacccggnattgtgtggtgttatgcaaacaattatttatagaaatttaaaattagaacccttacataaaatgaattacaacaaaatctactatgcacaaatatatacaagatcactgaacattacctgattggtagctggaggtttagacagtgttctgacctcatcnacattacctagctgttgttgtgcgagatttcttaatgcaacaagatttgggtgcacgggcgtgttgggncaaaatctctcttaccataacaccacacaattccgggtaccgag

SEQ ID NO: 615954 - DNA, 109 bp, Homo sapiens
atattgttgcctgatttcagagggatattccactaataaatgtatgatgtataccaaaaaaaaataatgatgcactacttggtcaagcagaactagcaactttcatttt

SEQ ID NO: 615955 - DNA, 966 bp, Homo sapiens
  misc_feature (381)..(381): n is a, c, g, or t
  misc_feature (457)..(457): n is a, c, g, or t
  misc_feature (567)..(567): n is a, c, g, or t
  misc_feature (573)..(573): n is a, c, g, or t
ggcactgtgcctatgttgtgaactactacgtgcgagccatctctgtgtgtctgttaagctagtcacgcgtgctcaaactacagggcacaggcatgcgagcgcagattgctcacacatggtcgctcacactatgtcgcgttgatatagaccttctgttgatctagtcctgcttcgatcggtaccttggccgttgactcggcctgcgtagagcacgagttggcacatgaccactgagactgcgtgtgagtaaggtgccatgaaggccgcgtgtggctctaagaccgaacctctcctggtgcagttgtcttacttaggtacgaagttcgggtgagtcctccattatatccgatcgtggtgcccgttccggagcgtatgccatcnttgcgacgcatcctttgtctcgcacaacgtatccttgcgcaccgagcggaacgatttcgcgtggcattccccacanatacgagagttctatgctggccacgctggatacggatctgcagatagcactgacctcgcaccgcgtacatgttggaacgagtacggaagacttggctccttgaactttcntgcgcnaaatgttacgcgcgctactcgtattgcaaccaaaggccgggccttgtcagcgagtgaacacgagttctgttgctccgtcttccccccgtattgggacccatcgaggtcgggaaagtaccttgtctcaattcaaaggggtcgatcgagttggtcctagttcctcgattcgacagggagcgtctactacagccgagtttgggtccgccaagacttacctcgttgagctcggagggaaacgctatctcgaagattagtgcgactcgtagcgcctttgtatatgcccacgagccaccagatttcttcgaggtttgctctctcgagagcgccttcgaagggcgaaattcgggaggcacgcaagaatagatcatcctctagcgcaagattcggagtcag

SEQ ID NO: 615956 - DNA, 338 bp, Homo sapiens
caggacaaatttctttcctcttgccagttgtagaagaaacccatgaggaggccgggcacggtggctcacgccctataatcccagcactttgggaagccaaggcgggtgaatcacctgaggtcaggagttcgagaccagcctggccaacatggtaaaaccccatctctactgaaaatacaaaaattagccagacatggtggcaggcacctgtaatcccagctcctcgggaggccgaggcagaagaatcacctgaacctgggaggtggaagttgcagtgagccaagactgcaccactgcagggtgacagagtaagactcttgtctcggaaaaaaaaaaaa

SEQ ID NO: 615957 - DNA, 1157 bp, Homo sapiens
  misc_feature (32)..(32): n is a, c, g, or t
  misc_feature (48)..(48): n is a, c, g, or t
  misc_feature (160)..(160): n is a, c, g, or t
  misc_feature (162)..(162): n is a, c, g, or t
  misc_feature (172)..(172): n is a, c, g, or t
  misc_feature (291)..(291): n is a, c, g, or t
  misc_feature (308)..(308): n is a, c, g, or t
  misc_feature (310)..(310): n is a, c, g, or t
  misc_feature (326)..(326): n is a, c, g, or t
  misc_feature (329)..(329): n is a, c, g, or t
  misc_feature (336)..(338): n is a, c, g, or t
  misc_feature (358)..(358): n is a, c, g, or t
  misc_feature (360)..(360): n is a, c, g, or t
  misc_feature (375)..(375): n is a, c, g, or t
  misc_feature (377)..(377): n is a, c, g, or t
  misc_feature (390)..(390): n is a, c, g, or t
  misc_feature (392)..(393): n is a, c, g, or t
  misc_feature (1157)..(1157): n is a, c, g, or t
tgggaagccccggcacacgggccagatcgggngggcccggagcagggngccttcgtccacgaatccctccaggggcacagttcaccacagcgcacccccttctggcacggggcaaagggtgtggtcattcagcaagccgggtcggtggagggcaggagangnaggtggtgcncaggtggagtgaaatcacagaagagaggccgagaatcttccctccgaggggggcagctgtgggtgaaccacccaagagggaggccgagaacctcgtggggaaaagtgagtggggttcantacccttaatagtcttnantcccaagaggacgtgncantcgcggnnntagcatacctcttcttccanantcgcgtggcccgagngnccaagaaatttcncnnagggggctcttatacacatttacagactctctgtgtgttctccacatgtggacaccctctcttatcgcggactacccaaatttgggcgcgagtcacgtttaccactcagaaacgaccagtatcagccccgtgcggggaacactcgtggcccgtgggacgcgagggcccccagtgtactccaatctcccaccaaagcgtgaacgatcccagtgcggggaccacgtgaagcgacgtgataccaccactggggggggggtggtccatataacccacacggagcgcccccatcatcacgtgggagaggagaggggcacatcaacagaaaatcccacctattgggcccgcaacgcaccctggtgggcccaagaccccgttgcgccccaccccaacacggggcaagataacacctacacgcctcggacactggactcgaacacatccaggggggtgaccaaccctcggggtgtcggcccaacaagcggcacacccacacaccaggggcccttcaacacccatcggcccctgggcagcagctcccccagcaaacattaccacggctcccctaccattgagagaacaacacgcggtccccgagtctttcccccaccaaactctggtgagagaccgcctcaaatctcttgcaccagaaaacaccttccccgcgggcagacaacagcgcgccacaacgcggcgagcgacaaggaacaggacaccactgtccgcggaaacgtgctggcaaacacacccctattgggtcgtcggan

SEQ ID NO: 615958 - DNA, 221 bp, Homo sapiens
gtacaacaaccccgcgtgacacgtttgactgtgtaacaaacattcacatgtaccaccaaacccaaatttcctcctgcaatgggatgtggtctgtcttcaggggttgaacaatccctagacttccgttcaataactccacataatgtcagttcacatggctgggagactcagaagcgtcaatatggcgagggacagtcactctcattagtacttcgtcgatc

SEQ ID NO: 615959 - DNA, 114 bp, Homo sapiens
tgattatagaggatcccccgaaggcagatgcctgttctgcaaatcctggctctgcattttacaagctgcacaaccttaagtaaattagttggttctatgtgcctcagtcccttc

SEQ ID NO: 615960 - DNA, 153 bp, Homo sapiens
gggaaaaaaccccccttttttttcccccttttttgggggggggaaaaaatcccccggggggaaaaaaaggtttttttttttccgggggaaaaaaaaaaggttttttttttttttttttttccccttggggggaaaaaaaatttttttggggga

SEQ ID NO: 615961 - DNA, 1185 bp, Homo sapiens
  misc_feature (236)..(236): n is a, c, g, or t
  misc_feature (246)..(246): n is a, c, g, or t
  misc_feature (258)..(258): n is a, c, g, or t
  misc_feature (328)..(328): n is a, c, g, or t
  misc_feature (337)..(337): n is a, c, g, or t
  misc_feature (368)..(368): n is a, c, g, or t
  misc_feature (380)..(381): n is a, c, g, or t
  misc_feature (453)..(453): n is a, c, g, or t
  misc_feature (455)..(455): n is a, c, g, or t
  misc_feature (478)..(478): n is a, c, g, or t
  misc_feature (500)..(500): n is a, c, g, or t
  misc_feature (549)..(549): n is a, c, g, or t
  misc_feature (593)..(593): n is a, c, g, or t
  misc_feature (601)..(601): n is a, c, g, or t
  misc_feature (610)..(611): n is a, c, g, or t
  misc_feature (618)..(618): n is a, c, g, or t
  misc_feature (624)..(624): n is a, c, g, or t
  misc_feature (635)..(635): n is a, c, g, or t
  misc_feature (644)..(644): n is a, c, g, or t
ggaagatgaggaagataacaatttgggaaggtacgatgaaaccaaatattgatagggtaaaagtggcgagattcgttcacaggtcaagtctcccagataggtcttgatccatgggggcgcaaggagtttcaggtcattgatggaaacaggtctagcagcccatgtgtgcgttgcattccgtgagtccaagcccagagtcacccaggtcatgagtataaccatgttgtggtggcgtngtctagatgnggtgagacccantgatatgtcatacttgctcgccgtgatcgcgaagcggcaatgcacaacgtaacacctatggcagtgtgtngacacgctntggcacctctgcgcgacatactagtggcganagacgccttagnnacctcaagactgtggggccaacccctgcagcgtccgcgtcgtggagaggaacctgtactggtgatgtagtgngngtgccgttctcaaggaggagtgntgtcccctggcgcatactgagnatctaggggaatgacctgtgtgtgaaaggtagcgatgctatgatggaancgaagcgagacccgctgtgtacctatgatccgagtcagctcagnacagtgancgcccgagnntcagttntgaagnttactctcaanctggggtgntgaaatagttggactgcgtggaacgaacaactggtgggaagcttaaagcgacacgaaggtagctggtcgcgttgacacggggcgcgtttactgcacggcgtgatgattgactcagaggacaggcccagagtcagtggaagtatcgctccaatcctgttgcgttttagggacccatgccgttccgtggctagctggccaaggaatgtttcattaccggggcatcgagattcggcaagtgtttgctatcagccagctccttatttcggatgaagtctgtagagatggaaatccggtctcggttccatctcttgggcggggtggaagaaccaattacatcggttggtacaaacttccaaggctatgagttcctctataatttggggtgaccaggtattccctggaaaatgagggttgtgggacactggtgttctgatgacacacgctgaataatcgtctgactggggaagactaatccggcgaaaggacaacaactgtaatgaatatctcctataaatagcaggcccaataacgtaaaccactg

SEQ ID NO: 615962 - DNA, 484 bp, Homo sapiens
  misc_feature (35)..(35): n is a, c, g, or t
  misc_feature (68)..(68): n is a, c, g, or t
  misc_feature (73)..(73): n is a, c, g, or t
  misc_feature (80)..(80): n is a, c, g, or t
  misc_feature (90)..(90): n is a, c, g, or t
  misc_feature (97)..(97): n is a, c, g, or t
  misc_feature (99)..(100): n is a, c, g, or t
  misc_feature (110)..(110): n is a, c, g, or t
  misc_feature (113)..(113): n is a, c, g, or t
  misc_feature (115)..(115): n is a, c, g, or t
  misc_feature (120)..(120): n is a, c, g, or t
  misc_feature (122)..(122): n is a, c, g, or t
  misc_feature (126)..(126): n is a, c, g, or t
  misc_feature (130)..(130): n is a, c, g, or t
  misc_feature (134)..(134): n is a, c, g, or t
  misc_feature (139)..(139): n is a, c, g, or t
  misc_feature (157)..(157): n is a, c, g, or t
  misc_feature (182)..(182): n is a, c, g, or t
  misc_feature (192)..(192): n is a, c, g, or t
  misc_feature (195)..(195): n is a, c, g, or t
  misc_feature (197)..(197): n is a, c, g, or t
  misc_feature (204)..(204): n is a, c, g, or t
  misc_feature (210)..(210): n is a, c, g, or t
  misc_feature (213)..(213): n is a, c, g, or t
  misc_feature (217)..(217): n is a, c, g, or t
  misc_feature (219)..(219): n is a, c, g, or t
  misc_feature (237)..(237): n is a, c, g, or t
  misc_feature (244)..(244): n is a, c, g, or t
  misc_feature (275)..(275): n is a, c, g, or t
  misc_feature (284)..(284): n is a, c, g, or t
  misc_feature (352)..(352): n is a, c, g, or t
  misc_feature (366)..(366): n is a, c, g, or t
  misc_feature (375)..(375): n is a, c, g, or t
  misc_feature (389)..(389): n is a, c, g, or t
  misc_feature (483)..(483): n is a, c, g, or t
tgaggtgcctgccggcaaacttagccttgctgccnagctcctcttcaattctgaggagctggttgtanttggncaagcgntaagatcggnaaggggnannagttttgatntgncnagtgnanagcnccanaacnaggtnagcgatgagggtatattnagtttcccccgaacgatgagaaaanatgacgcccngancnattggantggganagnttgnangactgaggagactcggtnacggagncaatctggttgaatttgagaaggaggaagtngaaggaatnatagttaaaggaattggagataatatttgggttggtaaatgtaagaaaataaaaaaataaatggattnatgaaatggatgtnaaattatgnaaagataaaaagtnataatggtaaaagggatattagatagaaaaaaatgggtagtaattgatgaaggaattgtaaaggtaagaaagaaggtaaggagagaggtaaatna

SEQ ID NO: 615963 - DNA, 151 bp, Homo sapiens
ccaaggaatcgttactccgtttaatgatcgggatgtttatctagggagtggccgtccttttacggctgtgagaatgcggacttcctgtcgcatacacatcttagtcggcatgcacgatatctccctttcgagacatgtcgtccccagggac

SEQ ID NO: 615964 - DNA, 495 bp, Homo sapiens
agagcagatcaagtatgcgatgattatgaacacccaccctctgtggcagatgtcgcactgttctatggagcacaacagtcttcccagatcagtggagcacctaggtacagacgctgagctgaagcagcagatgcttgtcttcagtatgtccaggtgctgaaaaagagagctattcctgcctcattataaagactgacacggttgtaacgtccgcggagtgatcctatatatgggaacatcgatctggatgtgcagaatgtcaagctcgccttgtttagagctctgaagtctcgctggagccttggagtgccattttcatgggctgaagtaacgagctgattaattataaaaccaaaccacaggtatactctaggtatatctgattctgaagtgcgccacacaaggtgagtcggggtattggtcagtagacagggctgaaaggaaaccttgctttccaaatgggcagacttcttgcactctgagtccactgctgta

SEQ ID NO: 615965 - DNA, 1089 bp, Homo sapiens
tgttacttcaggcacgagggcctgggctaccttggaaatgcttctgagcgctgggttctagctgcaaatgaacgagaagaagcccacctggatgtgccccgtgtgcgacaatgccagccccctacgaccagctcatcatctgacgtggctcctctcgaagatcctgagctgagtgtgagtgacgcctgacgagatcgagtacctggtggactggctcgtggtgccctgatccgctgcctgaaaaggagctgcagctgcatgccctgcagggcggccatcctcgtgctgggcccctcggactgccaatgggctcctgcccgcccccagcgtcaacgtggagcggtgccctgggcagcacgggtgtgtggggccctggtgggcagcatggaggactgggaagccgggcgccgatgtggtggacctcacgctggacagctcatcgtcctcggaggattgaggaggaggaggaagaggcaggaggaagacgaggactgaagagtgtgccccgggcccaaagcgcctgtctgacccattccagactgggcctgggtgcctggccttggtgagcccggcctgacactcgacttatcctggtggctacaccaacgcaagaaggggccacggggcccaggccatcgagggcgcaagagggagggaagtgagcctttcctatataacgttagaaagtgggtccgaccggaatgggacattccacccctttaaggcctggatccctggagaggctggaacctcttggactctcctaatcggggggactacaccaaaacaaaggtacacacttgccacaagacacgggataccaaaggcacacatattgaaccacaaagctcagacgtcttaacacacagggccggcgaacccaacaaaaggccggcatcccccgggggaggaaagaccccgaagccggcggcaggggcaaacggggacgcctgatcgtgacccaggcaaggaccccccgcgggagccagcccccacagcgaatgacacgaggtgcgacgagctcacacttggcgacagcaacgcactcaaacgcagtgactcggagagacacccgaggccgcgccaaac

SEQ ID NO: 615966 - DNA, 575 bp, Homo sapiens
  misc_feature (396)..(396): n is a, c, g, or t
  misc_feature (448)..(448): n is a, c, g, or t
  misc_feature (466)..(466): n is a, c, g, or t
  misc_feature (497)..(497): n is a, c, g, or t
  misc_feature (500)..(500): n is a, c, g, or t
  misc_feature (506)..(506): n is a, c, g, or t
  misc_feature (537)..(537): n is a, c, g, or t
  misc_feature (544)..(544): n is a, c, g, or t
ccaaccaatggctatccacgatcatatatggcatttgctccgcacgggcgagcgtcagcccgacttcatcagccagttgagggtccagcatacaagtggacaccgccatcaccttatcgcagtactgaccctgaatcaggaagtgccctcgacggctccatcgttctggatttgcgttacctctgacccactcatttcgcctaatggaaaacccatcatgacgatgacatgctcaaacaccgcgttcggccttattgccctgctgctgatattcggcaaccaagcaaaggctgacggcatggtcccggacacatccgtggtgatcgtccacgaggccgatggtgaagcttccgtttcggtgaccaactccgacagccagctctcgttgttgcatgngaccttgcaggatattccggaagacaccgaacccctgctggtggtgacgccnccgctgtcccgagtcgangcgtccaatcccagttggtgcgctttattcngcnaaaccnaaaaccgttgctcacccagcggctcaacgcnccgtgtncgaaggcatgccccaggaccgcgcagagttt

SEQ ID NO: 615967 - DNA, 220 bp, Homo sapiens
tcaatagtgcgatagtatttattctggaaacggtcatactagtcattcagcatattagcggtgagctgtactcctaagcgctaacatacatgcaggccactactcatgcacctgattggaagcgccagcctaacaatatcaaccattaaccttccctctacacttatcatcttcacaattctaattctactgactatcctagaaatgtgcttttgtgggt

SEQ ID NO: 615968 - DNA, 240 bp, Homo sapiens
cttggacatttccttagcctgaaacgttctgaagtatttgggcgattgggcgggttgagacacacaaagcttcactgccgcccagtatgggcctgcacacacctgctttcttcctcttcttgtaactggatcgggtttttcatcttcttggcggctcctacataatctcccggagccgcaagaggaatctcctgttcgtcctggttcttgggcttgcagttcactttccccgcttaaact

SEQ ID NO: 615969 - DNA, 1659 bp, Homo sapiens
gtcttgggcctgccaggacactccatacaactccctaggacggcacggtgagcaatcgtcagagctcgcgaagcaatcagtggctgtttccgttctcgttgaagagcttagctatgatcatcatcggaagaacaatcaccgcgagcagcagcctctgagcgcttactgcaggcacagcagcggatggtattgtcggtgcgagctgctagtgattgggtctcatagtaccgacggtactcgtcacaatatgggacttggaggtgcgactacaacgctgtgcgcacacgacaagtcaccgccttgtcatgtgtaccaacacagcgtcagtagaaatgcgctgtggtgcatgctgagattgctattgaagtcgcgtacacatacaaacgctattgtgtgactagcggcaacgcaacacgtaactgcacaagatcgtgtgacactcttcttcatctgcatcgtgcccacgcccgttaccacacgtctggagagacgaacccctcgatgcgagcaacaggacggtgacgccagaccgtcaccaagggagggcgacgcggaagcacacaggcagcgggaaccaccagcgaacgtggcctgcacaccgaagagaacaacggaggtacacagacggaaccgacagtggcaccctgccaacactgaggatagggcccacagacacaaatgcggatgtggattagcccacaggcgaacacagggttcagcaagaccacaaaattaatcgcagagacgcatcacgtgggaaggacagcctagatactaggacgagagcaacgacagcgaactcaccattgtggacgcaaccagccacacatatgacccactagaaggagggaaaccacgggcactgacacacacacagagagactacggggggcaccagacacgcccaggcgccagagcaggcgaacaatcacgcagataagggggacaccagggacacagtcacgaaccacccccagggaggcaagcaccacgaaccaaaacgaaggatgaaactaccagaaagcacacgcctcacctactgaggctactaataaccgtagggggagaacatatggacaaaggcacacaacagacaagcacggcgacgcacagagacgggcaacacatgacacacaaggcaaccaccagaccagccgtacaaaaacaacatgaacccaagcaaatgatcgacatgggccacaaccaccggaaacacggagacccacaggcacaggcaaagatccagcgacagcgaacaaggagcgacagcacagaatggaaggacgacaaaacacatgagacagataacgtcgaaaacacgactcagtaacaggaacaccaagcatagaacggacaggctcagctatcgacactcgagtacaaacaaccgttcgggcgaacacaaaaagcgtgtcacaacccagaaagaagacgacaccagcgggatagacgctataacacacacagacagacaggacacgaaacactcaaactggaaagagcgggacgacacccaccaatatacgtaaccatgacgaacaacgtggaacgaccggaactgacaacaccacaccagacacaatagatccaggcatagaatcagccctagaagtggtcgccaatgcgtgcagcagtagtggacaatagtccacccatggg

SEQ ID NO: 615970 - DNA, 714 bp, Homo sapiens
cttactcttctttctgatatagagaaatgttcatgattctgtccaatactctggcacacagagtcagtctgctcacatactgctgcctaacttaagattcttcaaaaaaaacagactgataggatatatatatacatacatatatatatatacaattattttttaatagagataccgatatatagatacacacacacatatactctctactcctgtcttgcagttctgctgtcctatgggcctaggggccacatttaaagcttgtgactgagggtttacccacactaggccagcaactttatcagccaccaacagggcaacataattcaggtaggcgaaagggcatagatcagcctgatatttgagaacataccgttctttgtgacctcatttgatatcctttttttacaaaaccacttgctatcaaaggtctcaatcggtggaactgaacgcatctctgtcaactctagtccacaactgctaagtcactaaaaacctggctcatttgttccgtatgttcccatccaggtcaggagacatagggaatggtacatatagtatctccataccccatgttaccaattcttgttaccacatagtacttgttgacatgccacatattaataatactaagacagggtttaacatcgactactccactagatcaggaataccttgccgacagacgggactatcacacatagtagtcactcg

SEQ ID NO: 615971 - DNA, 271 bp, Homo sapiens
  misc_feature (6)..(6): n is a, c, g, or t
gtcgancgctcatggaatcactgcattcaatcaggatgcattttaataagctgcatggaatccattcagtcatcacgctgcatggactccactgcatacagtcgggatccatttatcacgctgcatggaatacactgggttcaatcgggatgcattttaccatgagcggtcgacggacgcgtccgtcgaccgagggcccaggaggagcgggatagagctggctgacgagatcgccaacagcagcggcaaaggagccctggctgttagagga

SEQ ID NO: 615972 - DNA, 155 bp, Homo sapiens
ttttttttttttaaaaaaaaggttccagtgggtgtttttgtgtgtgacttaattaaaaaacaacgtggctgctttcctggccaatttgcaggctttcttttttttcaggcccccccttttcttgtcccctcaataaagtcccctgtgttccccca

SEQ ID NO: 615973 - DNA, 116 bp, Homo sapiens
gttcacggttggtgctaagacattcaaaatgaggaaacaccggcatttgcccttagtggccctctttagcctcctcctctcaggcattgccatgactcatgcccaacaacaatcag

SEQ ID NO: 615974 - DNA, 196 bp, Homo sapiens
  misc_feature (41)..(41): n is a, c, g, or t
  misc_feature (186)..(186): n is a, c, g, or t
  misc_feature (191)..(191): n is a, c, g, or t
tcggcacagggactggagaagggaggcggcgggcgacgcancgtcgagcgggggagcggcgtgcctgtggagatccgcggaggccgacagattcgttggctgccgtccccgctgctgtgcattgggttaaaaacgacaaccaacatcagccatgaaagatccaagtcgcagcagtactagcccaancatcntcaat

SEQ ID NO: 615975 - DNA, 399 bp, Homo sapiens
tccaaaaggaagcactgatgcattctacaacatggttgagcctagaaaacatgctaagtgaaagaagccagacacaaaagaccaatgtatgactccactgatgtgaaatctccagaatggaccaatccctacagaggggagcagatcagtggctgcccagagcttggaggaggggaatagggagtcactgcttcctgggcaccaggtttcggtttggggtgatgaaatgttctataaccagacagtggtgatggttgcataacattgtaaatatgcttaatgccactggattgcacaatttaaaatggttatgatggtaaattttatgttatgtgtgttttaccacgtacacacataaaacttattttgtgccattaaaaagaaaaagctctatgaagc

SEQ ID NO: 615976 - DNA, 102 bp, Homo sapiens
gccagcaccaaccagacatctatgtacctctgtgccagcagtgctctggcgtggcgggaggacggggagctgttttttggagaaggctctaggctgaccgta

SEQ ID NO: 615977 - DNA, 130 bp, Homo sapiens
tagagcctacgatctctctctgatcttctctgaacacagagtgcagctggcaggagagatcaagcagagtggaccacccctcagctgagaaggcgctgagcaggcaagggcccgaactgctccgagaaag

SEQ ID NO: 615978 - DNA, 219 bp, Homo sapiens
tgggttaataagcaaaatggaagaagactatcaaaagggtgtgtgcggaggtggggggatgtgtgtgtgaaatagatgttaaataggagtgacatattatgaatcacatctgaacgagttcacatgaaagggtacaattatggttacgacatactatcacaggccaatggatgaacaacctgttcaatttacctatgtcccatgaaactgcacgccaca

SEQ ID NO: 615979 - DNA, 871 bp, Homo sapiens
  misc_feature (379)..(379): n is a, c, g, or t
gagcaaagggaatacaatggagcaagatattctttttaacaaatggttctagaacaaagaaataattgatgagctgtacttcattaaaattgaaaccttctgctctgcaaaagactctgccaagagaatgagaagacaagacacagactggaaggaagtatttgcaaaagacatatctgataaaggactgttatccaaaatatacaaaaaattatttcaactttataataagtaaaccaacaacccaattgaaaaataaacaaaagatctgaataaatactaagatacacagatgggaaataagcataagaaaggatgcaaaacactttaagtcatgaaggaaatgtaaattaaaataagataccagtacatacatatntagagtggtcaaaatccagaacactaacaccaccaaatgctggtggggtgtggagcaaaagggactctcattcattgctgatggggaatgcaaaatggtgcagtgactttagaattccgcttgaccgtttcttaaagaaaatgaaacatacccttactaacatgatccagcagtcataacctacttgggtatttacccaaagaaagttgaaaacgtttattcaccaacaatctgtctggatgttcatagcaggttattaattaatggccaactgggggcacaagaaatcttcgtagctgaatgttacaccgacctggatccaatggtgaaatagccgggtcaaggaaaggcgttagccaaaaaatggggctcaagtttttagttaagaccgtgaagcctcggggtccttcaacttgagaccgggcgaaaagtccgcgggggaagaagccctgtcgtgggactacaagtacagcccacattaactcatggtcc

SEQ ID NO: 615980 - DNA, 287 bp, Homo sapiens
  misc_feature (154)..(154): n is a, c, g, or t
  misc_feature (210)..(210): n is a, c, g, or t
  misc_feature (263)..(263): n is a, c, g, or t
ctgaggtgattagaggatcccgtagcagcgcagcacatatgaggagcatgacgttgacgtggaggggagaaagtgggtcgtggggggaagagcggaggggtaagcgtgaggaggcggtggggaaggtggaagtgtatcgcgtggagagtcaggngagggcaatgggaggctggaagtggaggccggtggtggggggtgtgagaggggttntgtggtgtcggtcttccgcagttcgggcggggttcgaactcggatggggcccntctcactcccgaccggataatctt

SEQ ID NO: 615981 - DNA, 160 bp, Homo sapiens
  misc_feature (2)..(2): n is a, c, g, or t
  misc_feature (129)..(129): n is a, c, g, or t
tnataagcgcagggtgcacacgtgctgggcacactggcctctgacacctgagagctgacagcctgcacagagactcagagtgcagagaatctatactgtgtccttagttcacacagtcagggctccctngaatctgcctctctctgtcattatgcttggc

SEQ ID NO: 615982 - DNA, 281 bp, Homo sapiens
gctctagagtatccacccgcggcgagttcatgcaccttgttgtgaatctttctgttgctggcatgaaccatgtatgaaataagaacagtcaggccaggtgcggtggctcatgcctgagatcctagcattttgtgaggcagaggtggttgagtcacttgagggcaggagttcgcaaccagcctgtgcaacatggcgaaaccccatatctacaaaaaatgcaaaaattagccggatgtggtggtgcatgcctgtggtcccagctactcgggaggctgaggtgg

SEQ ID NO: 615983 - DNA, 402 bp, Homo sapiens
  misc_feature (322)..(322): n is a, c, g, or t
atacatccatgtgctaggagggtgatgcatcctgacttcacagggagaaggcactggaagctttgtgttgggaccctcccagaccttgtcctacacatgttttctttggccggacctgatttttatgttttttgccacaataaaattgtaaacctaagtataggggttttctgagctctgtgaatcattctagtgaattactgaactcaggaggtagtaagaaacctcaaatttgtatccattttgtcagaagtatgggtgacctggggaacccccaaacttctgcttggtgtataaagtgaggggcagttttgtaggcagnccggggcccttgttaaagtttgggcctaatttggggatagttagtgttcagaagttcattgttaccagcaaaaaaaaatt

SEQ ID NO: 615984 - DNA, 230 bp, Homo sapiens
  misc_feature (211)..(211): n is a, c, g, or t
acatgaccccttggactgaaggcgctcagtagtaaaggagtgtcatgcaggtcaacacatgtcgcacatggaccacaaagcctgccaccagcaggatgcacggggacttctgggagggggtggacaggatacttatctgtgactggaatgcaggcgagaggcggagaagagagtgaaggataactcatagagggggcagcatttgtttcgngttgaaagaggcagaaaat

SEQ ID NO: 615985 - DNA, 106 bp, Homo sapiens
  misc_feature (77)..(78): n is a, c, g, or t
gcttaattataacattcacagccacagaactaatcatattttatatcttcttcggaaacacacttattccccacctnngttttctatacacccgttggggacaacc

SEQ ID NO: 615986 - DNA, 815 bp, Homo sapiens
tcacccgcgtttattcgatttctgcgcttatcttcgagatgaggcaagacctagcagaggcccaagcccgtccctccctgaccaggagcagcctcatggcgcgaccgagaccgactgtgcggggcatcccctcctgctggtgcccggcgaccccctactctgatgagtggttctgcatgcagggctacgcgagagccagagaggtgtgggcgatgccgtgcgcgccgacaggcatccgatgaccctggatcctacacccagacccggggcccaggactccagccaccgagagatcccacgcgacgggagtggaggcagcagaggccgccctggacgggagcgcggacccgtggccccatcctggtaggacaccggagggcccctggagctcgtgagagggcgcatgccatgcggggacgactggccggggcagggcgatggacccgggaaggacgtgacgctacagtggatgggggacccacaggagcacatcggatcacaatcgggaaaacatatgcgggcatgtcccccaggcgcaggcatcttggcatggtactcgcaccgacattctgccattcccgggaggccagatacactgcaccccacgggcatgggtgcaggggcaagccccctgcgcccagggccccggggctcgaaggctgtgcgaccaacgccgggaccacggcgcgaccaggcaccgacgtcagcgtgggggtggcgggacggctctgggcaccgcggtggtgccggcgaagtcgacgacacaaggcgccagatcgcgccgcacgcggaaaccgcaccagacgcacgcaacc

SEQ ID NO: 615987 - DNA, 90 bp, Homo sapiens
acggccgtgtattactgtgcgaaaggttcccctcatatagcagcagctggtatcgggccgttcgacccctggggccagggaaccctggtc

SEQ ID NO: 615988 - DNA, 749 bp, Homo sapiens
ggactggttccggcggagcatgtgtgaggaatggagccggtagtggtgctgcagtgtgagtgccgcggcctcctccgtagaaccgtggagcaccttcgtgtttgagtaaccgtggtcggaggtggtggagcggtgtgctcagcattcctgctcctgctcgaatggcgttgctgcagtggtggcctgtcgtgtgccgcgttatggagggagtgtgtgcggcagagtattgcggacaccatcgggagcgtaacctggatctccggaggcctggcggaggccggccatctggaggggcattggttggattcggcagtggtagcaagaggacgcttcgagaatcgttcgcatcttacacacatacaggttgctttacactggctgattcagaaactttcattagtctggaagagtgtcgtgggcattacgagagcagggtaaatacgacactaggatggaaacggcacttgccccttggagaagctattgcccaaagacaatgacaagtgcttgggattgtgagcccgaggaatggtatgtggactccgaatgggaatcaaggtaggcaagtcgatcgtcagggaaatacgagatcggatgaagtcgtggctcacgggtacctcaatcacaccttcagagattgagaggacgtacgactctaacaaatccctttcataatattgaagggatccacgtcgaatctgaagataaccgcaagtgacagtcacatcaatgaagtaggtcacggagag

SEQ ID NO: 615989 - DNA, 426 bp, Homo sapiens
gctcatacctgtaatcccagcactttcggaggctgaggcgggcggatcacctgaggctcaggagttcaagaacagcctggccaacatggcaaaaccccatctcttctaaaaatacaaaaattagctgggcatggtgcgggcgcctataatcccagctactcgggagacctgagaatcgcttgaatccaggaggcagaggttgcagtgaaccaagattgtgccaactgcactccagcctggagacagagcaagactctgtctctaaaaaaaaaaagaaaaggaaagaaaagaaaaagaagtaagtgtcttgctgttgcccaggctggtctcaaacttctaggatcaactgatccaccagcctcagcgtccaaaagttctgggactacaagagtgagcgccacagtgcccggcccctgtctctttaaa

SEQ ID NO: 615990 - DNA, 332 bp, Homo sapiens
tgttgagacagagttttttgctcttgttgcccaggctggagtgcaatggcgtgatctcggctcaccgcaacctccgcctcccaggttcaagcgattctcgtgcctcagcctctggagtagctgggattacaggcatgcgccaccacacccggctaatttttgtgtttttagtagatatggggtttatgttggccaggctgatctcaaactcctgacctcgggtgatctacccacctcagcctcccaaagtgctgggattataggcatgagccatcacccctggtcgcaaatatgtttttaatcatccagcaatatctacaatcaataacata

SEQ ID NO: 615991 - DNA, 88 bp, Homo sapiens
gctccattcgggcaccctcggatctccgccctgctacgactccccgaggcgtttcgccgccagcacgcgcccttctgtcgtcttctcg

SEQ ID NO: 615992 - DNA, 175 bp, Homo sapiens
gttgatattgcagaattcggcttagagcggtcgcatcagtttaatgaagtgcacagaatagcaatcaatcagatcatgtcaataaaaataaacacacttatttttacatcaagtgtgctattattatcctccacatggtatacgtgttaagataagagcaccattaactatacta

SEQ ID NO: 615993 - DNA, 747 bp, Homo sapiens
gggtttcacaccaagatctcgctgctcgcccttcttagtggcgtacagctctcttccgtcttggggaaatctcttttctttcggatgacatcgtagacagccgcccaatgttctccggaacaacgacgtggtagccgggtatattgtccccaagagtgtgtcctcgaattaatcgtggctctagtatcgacccttccctcttcaggagtaatattctgtcccccccggccccaccgtgcgaaatttaatcctggggccccacaagaacatggcgtgacaccacagttgctcctctccgtcttaccgacgcatttaactcgcttagtcatgtcttcttgggcgcccaaacgcacccactttgcggcggacacttcgccctttcgactcaccccccttgataggaagggaggttgttctaatcccggcagcacacccgtggagagaacatatcatgggttccgcgcacactaatcttttcgttaataatatctggaggctggtattcgcgaatgatgatgaatgtttgaggatatagaagactctgtcggcccacacatctatgtaccgcaagcaaatattttctccgtattctcctctatgtctttcatcttattatatttatacaaaaaacattttaaccgtgcatcttctttctttaagagcaaatacgtggcgccccacactaattgttttgtcccccacggatcttaataatagagaccctttccccccatcaataaccaaaaa

SEQ ID NO: 615994 - DNA, 929 bp, Homo sapiens
  misc_feature (724)..(725): n is a, c, g, or t
  misc_feature (769)..(769): n is a, c, g, or t
tggatggaggcgggtgggtgagaataagtttctggattttagtctatatattgaataaagcctacaggtcaaagaatagtagggacttctgaagattcaggagtggctttagagaggtagcagggacatcatgatgtttttcagctctttaaaaagataggagtgggccggatgctgtggctcacgcctgtaatcccagcactttgggaggccgaggtgggtggatcacttgaggtcaggagatcgagaccagcctggctaacacagtgaaaccctgtctctactaaaaatacaaaaattagccgggcatggtggcagatgtctgtaatcccagctactcgggaggatgaggcaggagaatttcttgaacccggaaggtggaggttgcagggagccaagatcatgccactgcacttcagcctgggcaacagagtgagactccatcacaaaagaataaaaaaaaggcatggaccttaattcatcctaattcagtttttgtaatcatgtgcagaaacaagtaacatatatataaaaaggcaggagagaatgtaaacttggactttatttattcacagtcaccaagcagtttggttgataatgtctctgaaagcatggacaagtgaaatatgtaagagcagagctcttgggggccaggtgcagtggctcatgcctgtaatcccagccttcgggaggctaaggcaggtggattgcttgagcctaggannttgagaccagttgacaacatgattagacctcatctctacaaaanatacaagaattagctgggtgtggtggcacatgcctgttaatctcactggtcaggaggatcgagaccggagaatggattcgagctggagttgaggtgcaataagctggattaccccatgtatcccagctggttgacaattgagtccggctcaaaaaacaaa

SEQ ID NO: 615995 - DNA, 174 bp, Homo sapiens
cgctacacaatacacatggtttttgggagtgactcaagaagtgaataatgcacaagaatggatcacaagatggaatttatcaaaccctatccttgcttgttaaattttttttttttttttttttaagaatatctgtaatggtactgactttgcttgcttagaagttagcctcct

SEQ ID NO: 615996 - DNA, 407 bp, Homo sapiens
acgagcaattctgaatacaccttcccagtgtctgcagtccagccccttctgtccatcccacagttcctgcctcgggtcagtgttctgggtggtttctctggaatcatccaaccctctcctacctcactgccctcagcccatcctctgagctgcctcagggaaatctccttaaaacttcagattgggtcaccttcctgcttaacaagcttcagtctccatccccatgcccaggtggtcagggtcagaggaaagcagctggacgtttcaactgctcagaccgagggtcagccctggctctctgcttacccactgaacgcctttagacaagtcacccaacttgccaaaccttcatttcttcagctgtgaaatggagataacttgccttactgagggatgagtgagtaaaa

SEQ ID NO: 615997 - DNA, 520 bp, Homo sapiens
aatattagcatggttcactaatacctatatgaggcgatgccctgcgtcgagtgatattgcacagtgtcatcaaaatcatacattcgaactaaatcctctgtaaatataatcatgttctcataatagcattcaccgtacatcttataaatagatgcataggctgtgtagtcacctgcaataaagtctaaaagcattgcccatgtcgtagtggaaatgaatgcgagagtcggccgtcctttgtcgtaattatctctagaagtcacatggagactcgcatgacataaggttactctcaaactactcgtacatggcagaggaaagcttttatctatgcctatctcatgctagtctactaagtcttcagtacttacctcgtacaaatcttaagctgattaaaatcacgttaaaaagttaatgctgaggcatatcttagtaatctatttgactatatatgttaaggtacctgtattaatctctatctttcagagagaaagagacttatctgcggatcgtcaatgct

SEQ ID NO: 615998 - DNA, 951 bp, Homo sapiens
gctcctactcctcattggacccattctaatcggcaatggcattgctaatgcttactcgaacgaaaaattctagagcatatatacaaactacgcaaaggccccaagcgttgtaggcccctacgggtctactacaacctcttcgctgacgccataaaactcttcaccaagagaggcgccctaaaagcccgctcaggatctaccatcactcgctctacatcaaactgaccccgaccataacgcatctcgacacgaatctcgctctttcttactcatgaacacgccccgcttcctcactaaatcaccaaatctcccactggagtttagacatacgacctcttagggtcatcacatgatgatataacttacgcacaatacgtatgagaccataagcctgcataaatcccatggcatgctggattacggaggaggatccaaactctaacaaagatcctaatcgagccgccgtagacgatcagattctaccacaacaaatcggaatagtgatacgacaccctacgacacagtctagtgtctacatagtcatcactcatggataaccaggatctcttttcacctctccaaccttatcacaaacacaagaacacctctgattactcctgccatcatgaccctgagcgcataatatgatttatctccacgactagcagagaccaacggaaccccccttcgactcttggccgaaggggagtccgaaagctagtctcaggcttcaaccatcgaatacgccgcaaggcccctttcgcctattcttcaatagcccgaatacgcgaacattattgataattaaaacaaccctcaagcgaagacaatcttccgaggaacacatattgaagcaatctcccctggagtctaaacaaatatttggccccagaacctgtttgactccctgtctgtgaatccgaaagtaacccggtccgtaagcaatctaag

SEQ ID NO: 615999 - DNA, 174 bp, Homo sapiens
gggagcgaaatcaccagcgatatccgcatggcaactatttgtactatagccatcctgggaatatcctactgcttggcttcataatagcagcatgcagagtcaccacagcctctagccatgctggaaccatgtggacacagtgcacagggggctatggttgaatcccaacgtgtg

SEQ ID NO: 616000 - DNA, 177 bp, Homo sapiens
aatgtgagcacttggcctctttaaagctttaggtacctcagttccaatcagtgaagaagtcatttctttcttcattaaccaacacataaagtaacaaataagatttatggatctggcgttgctgtgagctgtggtgtaggccagaggctacagctccaattcgacccctagcctggg

SEQ ID NO: 616001 - DNA, 283 bp, Homo sapiens
cgagcgcggctgtgttcgaatatgatcctaaagtacagcaatcgcgatgacagatactctccttgacacaattttatagcgctcaaataactacatgaaataagactctaggtcttcagaaatttttcacttaatgtctcactacaggaggatagatcacattttgcagaatgtgtgcatgaaagaataacacagggctttagtatctccacacagtctgcccatgccattagaaaccaacatgatgcactattatcttgttgcttactttccctatctcatc

SEQ ID NO: 616002 - DNA, 1320 bp, Homo sapiens
ggcctctgagaagacagaagtgtctgacattttgaaaatgtctttgcatggaagctcagattgcataccaaatgctcagcaaccataatgcatagtaggatcccccaaaagacaggctcttgccactaagcatgctcactggtgcaagcaggatcattaccctccacccacatggtggtggcaggcatggcgcaacttccactccccagcaaacacgaaccctgtaccacatctcctgctccaactccatccacatgataaggctctctccctacaccgacaagggccacacaatctcgccatcccaaccagcccagctgccctgccgaccccggcccacgctccacctgccgccttactctcagcaactgctaccggcccaaaaagaacaagcctgaaccagcagctccatcacacgacaactctatcactcccacccccctatatccctccagcccacctgccctacctccccatctgactccaaccatcccacgccaatccccaacaatgcactgaactagacctgacgaacacccaccaccaatgcacacaatatcactttcgaaccccttacaccaacaccacccacacacctaccgcatccacacccacgcccctcgcccccctgcccacccgcagccgcaagcacacccaggcccccaccgctgcagccacgaaccccccgccaaccaatctggcgaaccaccggccaacacccacaccgccccccccgccccgtgcctcacaccctccttcccacaaccaccccacacaaccccccccactcatccatcccaccctcacacgccactcataatgcccaacctacacacacccctgacaccccactctacctccctacactccctacacgacaccccccacaacaacactatacaactgccccatccacattccccacactccacccacccccccttagaccacattccatgtatactattcaaacaccaccacaccacactctccctttcccaacaccactgtgcaccactaaaacacacacacacataacacccaaaaccaacattatacaaccaactcacctcaccatcatcaacccacctacataccctcccacaccacatccacaccctctttctccccttactaatccccatactctcatgctcccactctccccccaagcctcccactttctcccccacccccccccccccccacacaccactccccaacctacctccacacctcactacatcactctttccaccacccccaccccaccccaccctcaccccccacttcacctccactctccaaactaccccacat

SEQ ID NO: 616003 - DNA, 709 bp, Homo sapiens
  misc_feature (72)..(72): n is a, c, g, or t
  misc_feature (155)..(155): n is a, c, g, or t
  misc_feature (357)..(358): n is a, c, g, or t
  misc_feature (378)..(378): n is a, c, g, or t
  misc_feature (401)..(401): n is a, c, g, or t
agattcggccattatgtgccgggggcgaagcatttatacggtttttgttctgacaaacctaaccgagccctngggtgatagcgtggtgtgtctccaagaaatagaatcgttagtctcacactcttgaaatttcgcgccacccagaacccttcttnaaatcccctttgtaaactttaacctggttggttccaaaagagggaaccagcttcttttggaccactacggaaacaacacctttgtagcagaggagctaaaaacatttaacacctcactagtaggctctaaagagcacgccacccatattaagaaaggcgttcaaggctcaaccacccacttacctaaaaaatcccaaacatnnataactgaactcctcacacnccaattggacccaatctatcacnccttatagaagaactaattgttagtataacgtaacaatgaaaacacttctcctccgcataagcctgcgtcagattaaaacactgaactgacaattaacagcccaatatctacaatcaaccaacaagtcattattaccctcactgtcaacccaacacaggcatgctcataaggaaaggttaaaaaaagtaaaaggaactcggcaaatcttacccccgctgtttaccaatgtttaacgggcgcggtaccctaaccgggcaaagtagcataatcatttggtccttacttagggacctgtatgaatggctct

SEQ ID NO: 616004 - DNA, 1370 bp, Homo sapiens
agccgataggtaattacataaaacgttctgtaagacgctcaaaggatgacatagctcaattgccgtgtagctggtcaagtgaagcccatgatgaagaacctattatcactctccctcgacagagatcgaagtccttacataccgtcggaataattctatagaacgcgcattgcagtcatcatatgtatctacacgtatactcaggcaatacgcgaataggactaccattgtgatggcttggaccctttgtagtgcttatcaagaacctctacatcacttgactatacacgctttcatttgcatagacatgcgatacgcaaacacaaacacaagattctttctataacaattgtccagagacccggtggttattgcttagagccactcagtgcctaagtaatgtctagcgctaagggcatgagtaaagagcgcgcatcgagtgaacgtgctcaagtctaggattccatgcgttcgagcacgaaagcacatgcaatgcgtcccacacattgtgccaggagtcatacatactcacaagtcacgggatcatactaaatactcacacacgctttaaacagactcgattcaatttggcaccgggcacccaaggccattctgagactctaaggggttcattggatggcccaattgctggttaactccccacgttcttttacactgtctgccctagtccctagcgacgccatatttcagggcctacggttcccgaatttttcccaattgtctcctgatgcgcagacttcaaatcctaaccgtggtaggattatgcagatgggaatccgcggggcaaaacccaatccttgtgaacccatgggagccatgggcacttctctcgaatgttgacggcgtgatttttgctaggtcagctgcgatgtcaactttcgttccgaaccataggtcgcgcctaaaacacgacgacaacatgggaccacgcggtggcccataagcgcattccataagaacaggctccgtttcaagacattcgggacgtaaaagccctcgcccaacaaactgtcatcgcgacaaaaaacgtggacccggtgtgcccagactgagatcactgtcgttactaagcaccggcacagcatttgtcgcagcagcaaaacgtccctgttttaccgcaattagggtcaaccaatgtacagttaaaaagcgttaacacgtagacctcaacacagccgggcatttggtggaccgctttgagcacacccctcccaggacattgtccgtgtgttggccccacagaccaaataacccctcttaacacaggcgggcacagcgacttcacctagcgtacactttgggtgtgccacaaccgatgcgagtcatcctcacggcagctgcgcgtgcac

SEQ ID NO: 616005 - DNA, 460 bp, Homo sapiens
  misc_feature (429)..(429): n is a, c, g, or t
cttctttacactgccggtttacactgtttctccaagacatcacagctgatatctcctggtgctatccccaaactgccactctaaactcttgaagtaaataaataatctttgctggcaggactctgctgaatctccttaggcactctctaatcagatatcctaggtcctcccaattcttagaccttttatacctgtttttctccttctgttattccatttagtttctcaattcatccaaaaccgtatccaggccatcaccaatcattctatatgacaaatgtttcttcttacatccccacaatatcaccctttaccacaagacctcccttcagcttaatctctcccactctaggttcccacgctgcccctaatcccacttgaagcagccctgagaaacatcgcccattctctctccctaccacccctcanaaattttcaccaccccaacacttcaacacta

SEQ ID NO: 616006 - DNA, 820 bp, Homo sapiens
aaatgttttacaacctgaacctcagaactgtgatcctccaaggagcgcgctacttgaagaaaagaaaaaaaaaaaaaaaagtcgaatggcttctcagggatttggtttcccgtgcacatttaagccatagttacagtacaggtggcagtatttaaagcactcagaattacggttctgttaattgtgaaagagggatcgacgtgacgtttcattggcgtgtcccataactaggtgtaaaatatgttttattgtttatatcttatatttttataattatgcaaattacattttaaattttatacagttgtgaagcttctagcggttagttcacacgtgggttgcaatattctgcattgagaaactgtgccaagatggggctgatttcttatttagtataagacttttttggttttttctttattctttaatcctcttcacatttaaaaaaaaaaaattctctctgttaggcccatgggatttacaggtggtcggcgtccatatgaggattgggccaatattcagaaaagaaccttaaatggtcgcttttaaagaccaggtgtcccttccctttctttccaatagaagggctccctggccttattattaaattcaattctgggcacgctgtggtgggggaaaactccttttggctctttcccaaccggtgtttataaagtgcgctggggccaaagatgtgtcgggcacacttcggggccaaaagaaggaccaaaaaggtccattgcaaacatttggagtcttaaaggggtaaagatatcagggagcaagtctgaactttacaaagtgctctgtaaataagact

SEQ ID NO: 616007 - DNA, 1276 bp, Homo sapiens
ggtcgttagttctttctcgtggttccatctgtggtatatcccctccctctattgtctcttgtctttcttattactggttcttctcattcttccttaatccttttgtatttgctctccctatctcttgtatttgtctttggtgttacttctttgtggcttcgtaacctacattgtatgtgtaccgtggtcgcttctcccattgctgtcttgtgctctctcctaggttcggttgtctggatggcatctgttattcctagtgtattctacctatctgttgggttggtgggtcgtttttgtctcgccaagtgttcgtcgctcggttttgagtcgacacgcggatcttctctgtgtctctgcgtcgtcatgggttgttttctgccgtacttgtcttcgttacgtgcttaatgatagtattttttcgaaactgtgtactttgctcgttgttatgctggcttcatttcgtttgtcgcgcattcttgattcaatctggctgtgtctgttttatctgtggtgttttcttctatgctgcttccctcaatcttccatgcctccgtctgtgtgtatctcattagggtgtctttgttctgatgatgtgtttctcctttttgtttatctatcggtgtcttctctactctgttttggacatctttctaggactgtcctctattattggtgtgtgttgtttctgcttcgtcttagccgtcttaggaaatcctcctttttgttgctaattatcgattacttgtctgccgacatatacgcttactacttcgtctcgcggatagattttacttgagattagacgactttcacagataggagcattgccctttctggtgcatcgcgtttcatctctctcgcgcgcgtcgtctcgtctcctctgtctcgtctctctctctcatctcttttctgtctctctctctctcctgctcgtttgctctctgctgccctgcatctcgtgatgaagatcctgttgcgggagtttcccacagccgtttgtagtatctagtatgttagagttgggaggggacacatagttatgtagcccagccccctcattgcccagaggcacccagagggcacagcacgtccagccgtgacgcccagagcagaagccaggaacaccaggttggggccctggtgctgccacactcctctgctggtcgggctgggacccttagcccctaggagaggtgttggtcacagatgttacctcagtatatgtcactgtcgaagatacaaaaaataataacccgggggacactaacaaagaagt

SEQ ID NO: 616008 - DNA, 495 bp, Homo sapiens
tcgacggggtacagcggatgacggggcgacactggtggaggcggcaagtaagaggagcagtaagatgacagtagtctaggagaggcaaggtggtggtgggaaaagtggtaaccaagacgagtcatagagaaacgccacactttgagactaatccaggagtcctttattagccggcgaccgagagacaggctagcgctcaaaattctctcggccccgaagaaggggctagattttcttttatacttgggtttagagaggggagggggaccctagctgtagcaatcttacagaagtaacacaggcaaaaaagttaaaaagacaaacggttacaggaaaacaaacagttccaggtgcaggggctttaaattcatcacaaggtgataggtgtgggggctctgggtgatatctgctggacacaaacgcgggggctttagagtactatcacctgagcaaattcctgggcactgtggacatagcttgcttgccacagtacct

SEQ ID NO: 616009 - DNA, 128 bp, Homo sapiens
acgcgggtaacatcacttatttaccaaagttggctctaataataaaagactcataacaacaacatgctggataagcaacgccagagaatctgaaaccctcatacatctgcttggtggtgacaagtcaa

SEQ ID NO: 616010 - DNA, 446 bp, Homo sapiens
ctttctatgagtttggtatggtgcgaggaaaatcttacagtttgaattatgacctaaaaatttttcattcccatgtctacctaagaaggaagcagtaaatccataatttaccttttgggcaatgctttgtgagcaaaacaaagtcacttttgccataacatcttgaatttaaccatatatgccagattactttatatgcatcaacaagatcaccagtgaagtttaatttagctaaacactggtcctgcttctgagaggggatcctatttgtttggaaaacgtgatatgcacaccaagattaatggctttgtatccgccacagaggtggctgtccaaatttcacatgcacaagaaattgcctggggatcttgggaaactggacactctgcttcaagttaatctggggctggccctgaaattttgcatttttaaagaattttaagggg

SEQ ID NO: 616011 - DNA, 473 bp, Homo sapiens
  misc_feature (4)..(4): n is a, c, g, or t
  misc_feature (324)..(324): n is a, c, g, or t
tacngcggctgtcgccccggtttccgggctttcctttcctgcagttaagcactaaaggaagctattctttgtctcatgtttatacaccagatgactgtccgtatggtgatggaactatgccagattacgaggaattcgagtcctgccagaatttgagtacccctgggcatagcactaatcttgggagaaaaaggtcagaaatagactctcactgacctccaagtgttttacaagttaagaacaaaagaacaaaggtttggggaactcctattctcttggggaccccttattaaaaacacccttaaagctttccttttgaaaaanaattaagccgaaaaccgaaagataaacctattgcgcctttttcccccgtttttaaagcgtataaaccaaggttttaattttttccaataaaaaataggggacaaataagaaaatttgttcagggatttggggaacagggggaatggctt

SEQ ID NO: 616012 - DNA, 711 bp, Homo sapiens
gaacatgaaggcggactaggagcgtgaccactgaagcacagcatcacagggagttggttaggcctccggataactgtgggcgagcctgactaatgttaggctccacaagaagtggaggagtagagtcttctctaaaccacccccaccccgcggggaaagggagactcccattcccggtctgctaagtagccggtgtttttccttgacactgaggctaccgctagaccacggtccgctggcaacgggcatcttcccagacgatggcgttaccgctagaccaaggagccctctggtggccctgtctgggcataacagaagcctcgcactcttgtcttctggtcactcctcactatgtcccctcagctcctatctctgtatggccttttttttcctaggttatgattatagagtgaggattattataatactggaataaagagtaattgctacaaactaatgattaatgatattcatatataatcatatctaagatctatatttggtataactattcttgttttatgttttattatactggaacagcttgtgtccttggtctcttgcctcggcacctgggtggcttgctgcccacatacaacaatgttcatatcctaaatccagaatctgtgaatatcttaggtaatgtgaccaaaggaaacttaagatatagcatagtgtcaggttacaagcagtgacttcatgatcaattac

SEQ ID NO: 616013 - DNA, 162 bp, Homo sapiens
cgttttccaaaatgacttctgaggaaagggaattggatgcatcaatgatcaactggattacattggtagaatttggagataatggtcctaatggtgacttagggatcaagtttttcagctccttgttaaccggcctgaaattcttcagtacactggcaaaat

SEQ ID NO: 616014 - DNA, 685 bp, Homo sapiens
  misc_feature (424)..(424): n is a, c, g, or t
  misc_feature (453)..(453): n is a, c, g, or t
  misc_feature (494)..(494): n is a, c, g, or t
  misc_feature (526)..(526): n is a, c, g, or t
  misc_feature (550)..(550): n is a, c, g, or t
  misc_feature (552)..(552): n is a, c, g, or t
  misc_feature (560)..(560): n is a, c, g, or t
  misc_feature (565)..(566): n is a, c, g, or t
  misc_feature (570)..(570): n is a, c, g, or t
  misc_feature (575)..(575): n is a, c, g, or t
  misc_feature (676)..(676): n is a, c, g, or t
gctccctttagtatatttctagcaaaacagtggcggtgtttcaatcaagtctcattaacaacggcagcaattaggaatgagtcccacctagcttccacatgcgtggccagcagctgtcacacgggcctgtcgtggcactcagcccatggcacagacatatgtggctcagggcaagaaccagtggatggggctctgcacaggaacgctggcctcgggatgggagacccggcctgcccaacactgctcagagcccctcccaactctgacaacaggctcgggtcaggactccccgaaatcaggcaccctcctgccccactgctgagaatccccaacgggccagacctagcttggaaactttcttccacctggctggccaggaaggcagcaaacagagatgatgactcggaatgatgggctattcggnaaatggctagggaaacaactgtttccctnctgtcctggcgggacccaccctgggctaacgggcttccccngagtccagtggctctggggtcctgagtccccnaatggaccctaggctgcgagaagncnggctgtgngggcnntccnaaggnctgcctcaggttttgttcctgtgaaagaaacggtggccccgggggctccaggcgtgctcaagtggggcccagggccaccagcatggggagtgggcaggggntgccacctg

SEQ ID NO: 616015 - DNA, 739 bp, Homo sapiens
ttttttttattatattggcaggtcaaaggctgtttcttaataacaaaggcaaacaaaatgaacacctcagcatgctgctgcagtccatgggggcccatcccaccgtttctggggagaggaatcggggtgggggcgcccgcaagcaggggaagagacacttacacaggccgtgggaccgccaagcaccaccacgctgcaagcctccgtgaagggcagacacatgtggacacacggacacgtgaaaccacaagcacggaaacagccacagggagagacgtggtgaagctggggacaagacattcgagcagctacgtgccaactgctgccctcttctgccacgaagttccctatggcgaagggagccattgctccgtgtttcactaaagaagccacggtaacttaactctgatggcagaaacgtctcgacttctctgaatctgataagctgggccagttaccaccgataacctccacagggactgccgatgagttccagattgtacacttgaaacagggagcattcgatcaaagatacccaaaccaaagaagacctgagcacttaaacagcgtgtccaaatacgtacctcttgtgtcagcgagacctcataagcggaggaccttcacaaggccaagtagacatgacttccctaaaaaatcctactcagggcttgggaccctgaaggaactccttgaagcctgcacccctgtgtgtgccaggcccagaatacccgtgccaggc

SEQ ID NO: 616016 - DNA, 490 bp, Homo sapiens
  misc_feature (185)..(185): n is a, c, g, or t
  misc_feature (240)..(240): n is a, c, g, or t
  misc_feature (312)..(312): n is a, c, g, or t
  misc_feature (360)..(360): n is a, c, g, or t
  misc_feature (396)..(396): n is a, c, g, or t
ggggcaaggggtcaaagactggagagtagtagtgctaagctttggagctgacaaaaaatacactagtagaggaactacggcacagttttcttgcgatctctctccctatccttttctgtccttgctccttcttgatcaaaaataataatttagctgattttttcctgtggctttacctgaatctnaatacagtaaagtcagcattctcttgaactaacaggaaaacctggcaagtgcctnaaagacaaccctgaaagctagaaagggaggagaaaatattctctctgggggttgcctggggacctctagganaggcttaaaaggctgacagatcagggcaatagaacagaaaattaggtnaaatataaaagcccagggatgacaaatttaagtttnaagaatgccacgttatctcccgttgcccactcctagtgggcttataacactttttcagagcaatatggctgggagatattctgtgtatttagcc

SEQ ID NO: 616017 - DNA, 273 bp, Homo sapiens
gctgaatcgatccacatcgtaatatgttattgtctcgtactgtattgggccagctgtaatctaactcagctaggattccggttgtaaattcaagtggaatatgagttggtcttatttgtgcccgttgatatctgagggctgtgaggaagatggccagtaggtcaaagggaatagtgttgaaaagctgaccagtactgggcaggtggccggctgtccctcaggcaccacaacgccgagccacggtaaggggcatgagccacatttgcagaatat

SEQ ID NO: 616018 - DNA, 493 bp, Homo sapiens
tgttctagatttgccaatgtcagggtggggcaaatgtcactgctcagattaggcttgtccaggaagcccggagttctccagctgaatgaggcattcccttcatcttgggtcctgggtgcattctttgcagaatttcaacaatggcactctggacactgtgcttactattaacttatgtttactttcctggcttgcttcacaagaatggaaattccatcaggaaaagagtctctctttacgcccagcactgtgcttggtaactgtggatggatggctgattgcctggaggccacaaatgcccaatccccagcaccaccagctgctggactccctcctccagcccttctggttacttccttcttttcccacctaagcatggttggtcttcatcttgctccttccccactgtcccaacattcactttcattgcacctgttctccaaggctctccatttagatgttctgggttgaccaatctaaccacaaacacctg

SEQ ID NO: 616019 - DNA, 464 bp, Homo sapiens
cttgccagcgagcataatcggcactttccgttatatcgctatcaatgctcgcatcactgcgtgtgtccgtcagtaacgtatcaaatttagcatgcgcttgggtcacaggttcttcttccacaaccgcattgagatagctgcggtcaggaccaatgctcgtttcgccagcgaccgtgtcatctaagtctggctggtcgatgagattgcgctcatgacgcggtatgatgggaataccgtttttatcataattgaccgctgcagcttcagcgtctttacggcgcttaaaactacgaatgaccataaatagccctgcaagcacaataaatgcagcaacggcaattaatataaactgaatagcggtcatgagaaacacatcctaatatatgacaaaagggaatacacaagagaggataaatggcaatagtctagcatggcaaattcatatcgtcaccatatagtcatcg

SEQ ID NO: 616020 - DNA, 674 bp, Homo sapiens
aagaaatatatcttcatggagctttaccattgtcttacaagagcagttaaaaactcattcttacccttgcttgctatcaagggttatgatggctgcctccttatgagactgttagtggagctctagtaagtttccttaagcaccacagaagatcatcatgtgcttggtcccacttttataggaaagaatccaagtttcacccagatagtgtcatcacttagctctcttgaagaagaccagtttagttggatcaatgtctaattacacatatagtaatacaagacaaactttgaatctttacatattaaatgcccactttataccagggtgtaatggttggaattatgggttgagttgtcacagtatagaagaatgtagaatgccactagaatatatctataattcacaaataggtgctcttagggctaccaatattcttgggctgacttaaatgcctggtggcttgcactcttagaaaagagactaacatctgaacaatggccccactattatggtcaatcttaacacagagcttgtgcggaaggtccctatactgctgactgtcaggatctccaggtcccacgatatgtactctgtggtcctgataatgacttcacggagcaccaggcattgcacttacaggacttgtatgtcgtaaaggtagaaactctcca

SEQ ID NO: 616021 - DNA, 724 bp, Homo sapiens
  misc_feature (206)..(206): n is a, c, g, or t
  misc_feature (217)..(217): n is a, c, g, or t
  misc_feature (503)..(503): n is a, c, g, or t
  misc_feature (618)..(618): n is a, c, g, or t
gtgaactacatgattggacagaagtggtaccggcagggagaatatggccagatgatgagctgcacatgtcttgtgaacggataaggagaatccaagtgtgaccctcatgaggcatcgcgttatgatgatgggaagacataccacgtgcgagacatgtgcagaagtatatctcagtgccatatgctactgccatgctttggagccancggggctggcnctgtgccaactgcagatacctgggggtgaccccatgtccgaaggccacttggcagtccttaacaaaattctaggagtgcctgttgaaccaaccctaacgttttttgccaaaaggggctcttgccttaaataaaaggccggccaaaattttcccgaaattaatttttttaacacaggaaaaagggttttttttgcaatatcatataaatggggaaagtgttccaacccccataaaagtttcttttttttttaaagccttttttttgagaaatttttccacttttttnccaaaaaatttttttaaaaaccaccggggggtttgcgggggtgtttaaaaaaagggcggcctttttctttcttttttaaaaaaaaacaccccgcccctttttaaaaaaggggggnatttgtttttgttttaaaaatttttcccacctccggtgtttttttttttttctttttttttgggggggcccccccccccttccttcttttttgtgggggcgggggg

SEQ ID NO: 616022 - DNA, 138 bp, Homo sapiens
  misc_feature (22)..(22): n is a, c, g, or t
cacatgcagccttaaactcctngcctcaagcaatcctcttgcctcagcctcccaagtaggtgggactacaggtgcatgcaattgtgcccacctagaaattcttttctaattcttcaaggtagataaatgaagaaaaaa

SEQ ID NO: 616023 - DNA, 414 bp, Homo sapiens
cattgatacaggtgtcgccatcacgcccagctaattgtatttttagtagagacggggtttctctatgttggccaggctggtctcgaaatctgcctctttatgagagacaaggtttcactctgctgcctggtgggagcgcagtggtgagatcctagctcactgctgcctccaactccttggctcaggtgatcctcccacctcagactcccgagtaactgggactataggtgtgcaccggtacacctggctaattaaaaaatgtcctttttatttgagatggaatctcactacgttgctccggctggtcttgaacttctgggctcaggtaatcctccccagccttggactcccaaagctttggattcacaggcatgagccacctcgcccagccagcacccgtatatggtgagaacc

SEQ ID NO: 616024 - DNA, 946 bp, Homo sapiens
  misc_feature (93)..(93): n is a, c, g, or t
cctgatgtgtggtgtccttgttacttgctgcgtagccattagtttgtgccacggcgtggtcgcacagctgctaattccctggcccattgtgtntgcacgctgatgacgcatccgtgggtcatatagagttggcactgcaagttgtgtactccggacccagtggtattgcgcagtcccacgggggtccactgtgggtgctccccactcttcggtggggggtcgcccactgttgcgcgcgaatcgttgtccccctcgtcaggaggcaaatctttgctcccgaggaagcccccctccacgtggtgtccccctccatgccagtgggtccactgcacgggtcggtggcctgtctttgttcccccccgctgttattaggcgcctgttatgcttcacttttcgtcccaacgaatggggcctttagagtagtatggggcgattaacccctgcgtgtttgttctatcgccactcacctgtcgtctgggctttatctagtggaatgctccccacagctcgcgtgccaaagtctcccgattcgttgcttgtttataacaacgacctctctgattgagggtcccgactcttttgccctcgccctgtgccgaaatattaccgcccccgctcgctcgcgtactctcagccccccccgttggtgtcgctcaacaccgtttctcgcgggagtaccactcagctgcgcctccttctttgttacttggcagcccccccgtcacctagttcactcttctgtggcttactctcgcgggtatcgttttcgcgttgtttgcatgtagcgcccgccttcgattgatctctggttgtcatttgctgtcggtgtgtgccctcttgattcttatgactgccagcgctggttcttatactgagtgatgccttctgtcccgctaacgattgtgtttgctcgttccgggttacaacccccacgcccaacaaaaca

SEQ ID NO: 616025 - DNA, 192 bp, Homo sapiens
aggctcaatagattctcccactttagtctcatgagtagctgggatacaggcatggtggagcatgcctgtggtcccagctactcaggaggctgaggcagaagaatcgcttgaacccgggaggcagaggttgcagtgagccgagatcataccactgcactccagccagggtgacagagcaagacatcatctcaa

SEQ ID NO: 616026 - DNA, 664 bp, Homo sapiens
cgctgcggctgcacacagtaccgcctgtcggagtaactgcgatggatgctgtccgtcggcgtcgctgcggccgtggtccgcgcccttcctcgccgggccggactggtctccagaaatgcttggggttcatctttcattgcttgccaatggaacttccatgcctcctaacactcatcttgcaaaaagactggcgactgctgagatgtcctctattcttgaagacgcgtattcttgtgcagctgatacctctgtgtgactcttgaatgatactgggcgtgtcttaagtattggtgatggtattgcccgcgtacatgggctgacggcacatgttcaagcagcacagaatatggtattagttctcttcaggcttaaagggtatgtccttggaactctggaacctgacccatgttggtgttgtcgctagttcggacatgatcaactagttcaggcacacggcagatatactgcacgaggacaggcacgccatcgtggtacgttccagttcgcgggcatggcatgctgttgcgctcgtgtggttcgatgcccttggtaatgctatggatggccagggtccacttggttccaagacgcgtagcgacttggctgagacgcccggtatcatcctcgattccgtgcggaaccctgcgtactggcttaggctggg

SEQ ID NO: 616027 - DNA, 698 bp, Homo sapiens
ctgccaatgatgccggcttaccacatcttctctcatggatccgtgataccaaactcatcggaacactagtggcgctgcttgccctatcacgacagtcaattctcaacacggacgcgtgcccccgagcacgagacgcgcaactgagcttggcgatgcaagactacacctggaactttgcacgcagcttgtgcacacgccctgtcacagcgcactgtagccttggcactgtgcatgcttgctgccgcacgaaccgcttagacacgctcgcataggaccaaggaacgtactacacgctacagctggatcctcacgcaccctgccttgaataaccatagcctgctcaagatctactcacagaccccctgtgcgactcccggagcccctatgtctcacaaccacttgcgcacacgcaacgaacaagacctacacactgaacttcgcgcaaaaccagaactttgtggtccacatgaacgactcgtgctcctttcgggctcaagcgaaccacgctacttctcctgggccctttcctggcttcccggctccctaagaaacggccttaacccgttaccaaaccaacgacactgcgggtaccacacggcatagttactgggctcaaaacgcctccaaatacggatatcttccagttacctacctcgcgccccaccgactggatgactcctcggtggaaaccccttcat

SEQ ID NO: 616028 - DNA, 343 bp, Homo sapiens
aattgattggtttccttggcaaaaaacatgtttgaaaattgcaaaagttccgccgggcgcggtggctcatgcctgtaatcccagcactttgggaggccgagacgggcggatcacgaggtcaggagatcgagaccatcttggctaacacggtgaaaccccgtttctactaaaaatacaaaaaattagccaggcgtgttggcgggcgcctgtagtcccagctacctgggcggctgaggcaggagcatggcgtgaacccaggaggcggagcttgcagtgagctgagatcatgccactgcactccaacctgggggacacagcaagactccgtctcaaaaaaaaaaaa

SEQ ID NO: 616029 - DNA, 139 bp, Homo sapiens
gaggccgcggggggtctcccagtggccaggtagagagcgcgcctaggtccgcggaaccatcgctcctgccgcggcgagcgggccgggagtctacggtcggtcatagccgcccgggaagccgcgcgaggacggcggccgc

SEQ ID NO: 616030 - DNA, 213 bp, Homo sapiens
cctgacttctcctgcgcacttggtttggggcatcggggtttgctatagccgaggccactttgatagaacaaagaaagggacttcgagtaagaaggtgatttacatgccagcctcagtgcccgagagtgaaggagaattcaaatcaaacctcgatcattcctgtgtgtgagcctgggtcggctcacgcgcctagtcatatgcaattggccttta

SEQ ID NO: 616031 - DNA, 488 bp, Homo sapiens
gagcggggtcgggtggccatcattgtggcggcggcgcgggcggctgttactgcggagacccatcccctcccccttctcgcacccctggcagatctgtcagtcggtaaaaagtcccgcagcctgtcaggtgaggccccggcctcgtgccgacgctcattcccgaacgacactgggcggccaggccgatccctgcacgggactcgactgacggcagcatgtcctccttctctgagtcggcgcgggcgacgacgctctgcggagctgagcacctctcagcagagcgtgcagacacctgatcactataggcatcatacaccaacagcaagcacgcgggaaccagtcgtctcacgtgatggaaaacgagaagcatccgtcaacagacaaaagtcaagatagaaagcattagcgtgaagctgatatattaagaagacatgatgtaagtcacaaaaatagtaaacaggaacaggagctgtaattccactacgaga

SEQ ID NO: 616032 - DNA, 130 bp, Homo sapiens
gagtctcaacaatacctgaagtttctcatactcatcatcccaagtctgaaaaacttcaaagcatgctaccataactttttcaaattcttcataagcaacatgcatcaatttcctagtgcccaatactgtg

SEQ ID NO: 616033 - DNA, 1201 bp, Homo sapiens
tgtggaggtgggggcaaccttattatggtggcgggtgggtggaaggggggtctcccagttgagcccgtggtgctataaaaagccggccgtcctccaggggttagactggggaggcttctgggggttctgggagtcccggcgatggcgcacagttccccagaaaaccccctcacagagtctgcccccggatgcacatgacataggaggggcgcttggagagtagacttgagcgctgtagaccggggtcgccctcggtgtggcgccaaggtgcgaattccctcgtggtggcccaagagaggttcagaagttcgtccccgtgagaggcctgaagtctcgaacactagacacccgtgtgggccctcaatacaagtttaaacctatacacaggcccaaaaagtgtgggggcacaccaagaacgagccatggggcctctcagaacaaggccaggaacacgggggggccccctttgtgtgtgtgcaccgtggtgacttttcccaccaacaggggcgcaagagggcacccgtgggcaactgtgacttcccgggcccaggtgtgacaaaagtgtgtgatgccagccacaccccggggccattgacctcgaaaacccaaaaagggcttagaaaccccccacagcacggggccccaggaaggggccaagcaaggctccccggggggctcatcggagagaaacccatcttccacgagcggggaaaaaacccctaagggggcccaagacacccctagacttgcgacgaaaacccccaacgtttctccaaacacaacacacggcgccgtcgaacaacggccgaaactccccgggggcggcgcggacaacacaccccaccgcacacgcgacccaaacctcgcgcacaccacagaaacagccacagagcaagacccaacacccaccgcagacacaccaaacactaaccagcaaggaaccacactccaaggcacacaccacccacacacaaacaatcacctcgcgcccagcaaccgcaccactcaataccgtgatagcccacgtaactaactaagtataacaaacacagatataccaacacaccaccaactccccggaccacctaccattcccacactaaaaacatagttacaaacaacaccccaccccacacccaccacactctaaactccacacatgaatcaccacaccacacaaacccaacacccttattctccc

SEQ ID NO: 616034 - DNA, 300 bp, Homo sapiens
  misc_feature (45)..(45): n is a, c, g, or t
tgatttatctggtaccagtagttaaggagatgtggccagactcantggttcacacctgtgatcccagcactttgggaggctagggttaggaggatcactggaggccaggagttcaaagccagctcaggcaatgtacaagatcctgcctctacaaaaaatacattagccaggcatagtagcggggggctgtggtcccagctacttgggatgctgaggtgagagaattgcttgagcccaggagttggaaggtgcacaaatctactgcactccagactgagtgacagagcgagacactgtccc

SEQ ID NO: 616035 - DNA, 577 bp, Homo sapiens
aaactttgcctgccgattaagctctctgttcaaagggaaccttcaataactggttttccgccactagagaaaagtacagtgttgtcgatgaccgcttctacggccaccacagcctcggccgtggatacccccccgtcccgttatgagccccccgcgcgtaggtatcaacgccctccgtggggggaaaacctcttggcctttgtgcgataagaaacgaacaccgcgcttattgatccggggttgtacggatagacaagtacgctcttttcgcattcttcactcagaggcccactccacgcatacatgttagtgggcacaacgcctcagtaataagtacgctgggtaagaataggttttgctcccccccgactcaacatctggtgggggggctacacaccacacctcgccgcctcgtcttacgaccatacaaataaccgtccctgtttaccaccttgaggaataaacacatacctaacttgtctgttcgaccgccctcttctcccgccgacttctgacccgtccgtatgccttccgcagcccccgcttcatatcccggtgtttcccccccaacatgaca

SEQ ID NO: 616036 - DNA, 407 bp, Homo sapiens
  misc_feature (1)..(1): n is a, c, g, or t
  misc_feature (11)..(11): n is a, c, g, or t
  misc_feature (21)..(21): n is a, c, g, or t
ngagaaggagnctcgttctgnctttcaggctggagtgcagaggcgctatctcggctcactgcaacctccacctgctgggttcaagcaattctctgcctcagcctcccgagcagctgggattacagggcctgccaccatgcccagtatttttgatttagtaagacgggttaccattggcgctggtctaaactctgcctagggaccacccgctagctccaaaggtggatacagggagccaccggcccgccggtagactgctagtcactctaaggcctgcaatattcttgcttaagatttaaggcactttgaaaaatcttagcaaaactcgggttgttgacaattgtgcgcgagataagaattttttggacatcagctagttatggattatgctcagacgcgctgttacc

SEQ ID NO: 616037 - DNA, 148 bp, Homo sapiens
cgcattggggctgacgccgtacctggtgggtgacgaattgactggcgcggatatccagatgagcttcatcggcgaaatcgcccgggcccagggcaagttgcaggcgtacccgaatgtggcggcgtgggtgcaacgctttcaggcaaga

SEQ ID NO: 616038 - DNA, 172 bp, Homo sapiens
aatcgagctcggtccccgcgtgcactcgtgcagtgtagaggcttactagaagtgtgaaaacgtggcttggattaaggcgacagcgatttctaggtagtcagtaaaattataattgtgatgatcatcagtgtaaactgaaggttaaatggtcgatattgcatcttctgccgtg

SEQ ID NO: 616039 - DNA, 366 bp, Homo sapiens
aaaaacttttttggaaaaaaaaaatttttattgctttaaagttttggaaaaggggggttttcttttccgggtttggtggaaagaaatttaaaaactttaaggttgtctttttaaccgcgggccaaatgttgattttttaatattagataaaacggggaaccgaaattccccccaaatttgtagaaaaggggggtctttgggggttgggaagaagttttaatgtaaaaaaccatttacaaaaaagtctgtttaatttcaaaggggtttgtgaaaaaaaacccctggggaaaaagaaacaaaaacatggttaatttggaacttacgtttttaaaccaaaaaaagggcccccaaaacatgttttttcca

SEQ ID NO: 616040 - DNA, 240 bp, Homo sapiens
tagagtgatcccgttgaggcattaggtagtactacatgctggcgtggagagctggatagtcagtgtccatgcccgggttggtcatcagtgtgcatgcagagccgcgggaaccgtcctctctctgtggggtggactggtgtcagcctgggctctgtggaggactctgcgcttagcctgtcgcctcctgtacacacctcccgtcgtgctgtagagtcccacgcgggtgggtaccgatgctcg

SEQ ID NO: 616041 - DNA, 779 bp, Homo sapiens
aagaagctgaagacgacaccgcacacaaaagcaaagaagaaagcacaaataccgacagtacacaacacataaccaatgagcaaggcatgaaaatccgcaaaaaatacaaaccacaacacaaccacgaacagcgcattgtttctatcgcagcaacgaacaaacgcaacacgaagcgccaaaacgagctatgtagtacagaagaactggacgagcgacaccagtctcagagtacaaagagataacacaaaagaatacgcgacaaagtaacttgaactagaacacgactgtaacagacagtgatatagaaaagggaggcaggagagcacactggagtgaggagcggaaagcagaaagcagtgtgcaacacgaacaacgagcaggacaggagaacaggctagggcggaaaaagaaagcattcaagcagagcaggaacagccggggcagaggaggtagctcgacgcgacgcgaccggactaaaggacaaggacgacgagcaaaacagaggcaacgtacaggtaaaggggaaagtacggagaagagtgacgagatacaatgaaaacaatagcaacgacctactgacagagaggcagagcggatagaggagacaagactggcagaaggcaacgggccagaagaaagaccgagagcacaagacggcagcggcgcaagattggcagggaccgggggggaaagacaaagcggggcaagcccgtagcggaaaagagcagaggagcggagcgcgcacagagagggaaggctgacgcgggcgcagcgagaga

SEQ ID NO: 616042 - DNA, 100 bp, Homo sapiens
gagagaactagtctcgagtttttcttttttttttctgaattttccgttggagaccgaaattttcccaatttttttcattctttttttaaaaaaaaggttt

SEQ ID NO: 616043 - DNA, 308 bp, Homo sapiens
gtggtcatagctgctcttgagtaccctagtactgtgagactcctttactactgagtcccttcgttgtgcaggttggggaagcctgcaatccaaatgcctgctgggccagtggccgaggcctacaacccaaaggcgtcctgtatcctgggagaccacagatttcaaggttgacaccaacagctgcaggaagtggggagctcggtgtacccattgacagggtcctaatgggtctgtgaggagctgtgtgaatgcagaaatgactttcttggataggggtctactgcattctgagtattacacccatgcac

SEQ ID NO: 616044 - DNA, 222 bp, Homo sapiens
  misc_feature (211)..(211): n is a, c, g, or t
acacgacgtacgatgtcgagccggtacgagatgatgcagagagacccgcccgtggtgagtcgtgcatgatgccgtgaggatgagaggaggagagaaggaaggaagagcagggtggaaagggatggggagagaattccaggccaagagggacacggtatgagcagatggatcacggaaggggtcgcaatatggaggattcactttcatacanggaatattatt

SEQ ID NO: 616045 - DNA, 1474 bp, Homo sapiens
ggtggttccaaatatttgccaccccacagaaagccgcagcaaagaaagttggccgccccgtctggctgttcttcccttgttgtggccggcgcctctaagaagaagatagaaggacggccccccacccgccgttgtgatgtggggagggaagatccccacggggttggtgaaaccagggagacgaccaacccgtagttgggccccccggagggagaaaagcctgtggggaaacttgggggggcctccccgctccgaagaagaaggggcctcttttgtgaagccccccacccccacaggggttaacacaccctggttggggagaacacacaacaaagagtggtttgtggggccccacgcgaaattatggagaagaattgtggaatctggaacacgttcctcatttaccggggggggtggacacccacaaagagcggcccctaaaaaggggccgtgtgaccaccaaaaggaggggggttctcacccccgagagtctcgttgtgggccgcacccaccgcccgcaagaaaaagacctctgtccccccccccgccgcatgagagacacctctccacccccgtaaggggcacctctttgcggcgcaaaacaggtgttgtgggcccctctggtatattttttggggggcgcacaatatgggcactctccctcgtgcgttcctcgtgttgttatacgccccgtctgatctctgctctttgtgggcacaacacggcgcctctctgtggcgccacacaaaaagagggccgttacacacactatgtcaccctccgccctctctgagaggagtccccaccccacacagagagaagatatcttataaaaagagtttttggcgccacacagggggcttacccctctgtatcttcacacaggacctcgcgcacacagtctgttgagtctcacacagagagccatagtggcgctctccactctctgagctcatttgagcccctcatttcttggagacacacagagagcactctcacaacccctctctctggggtggtgcgctctttttgtgtcccacactcattttgtgtgtgaaaagtggagacccactaggaggctcttttgtgatcacacagttctgagaaaggtgctctgtgtgtgggttggggagaaccacacagagaagccggggtggctctcaccccctccgcgacacaagtgtcctcttgctttggtggcacagagacgagaagtcggccggctctctctcggagagagaagagtttacgcctctaaagtgttcactttgagcacccaccgctccacagtgttgtgccacatggccgccttccacgagaccactggagaggaagaaagaaagcacattcacatgggagaccacctgagaagaaagagccgagaattgccaaaggaaagaaaggaggcttaaatgccacaggagaccagattttgcagttggtggggtttccaataaaagttattttcccctga

SEQ ID NO: 616046 - DNA, 1815 bp, Homo sapiens
  misc_feature (879)..(879): n is a, c, g, or t
  misc_feature (1300)..(1300): n is a, c, g, or t
  misc_feature (1428)..(1428): n is a, c, g, or t
  misc_feature (1625)..(1625): n is a, c, g, or t
cataccttcttcgaagagtgtctgtcatttgatttctgtatctgtttgagttgagcacgccatctccccctacgcggggtgttttttccctcaatggaggagcccacctactaggtttctgagatatgaagtaaatagatggggggcgccctatcaaaatcttggttgtcgcaggacgacagcacacatcacagtggtggggtgggaaatcccacgggcacaaattattccgtcctcctccctaggatggagggatagttactctttcctaattctgtagacaaacaatatatatcgcgaaccgcgtcctcacttgtggcgcgaaacatatcgacccctccctttaataagttggttgggttggtagccatagttatcactgttatactcggggcccttttttatttggtagtcgcgggagttgtttcctccccacgcgacccttatggtggtcgtgtgttcgcacaatagtgtgatttttgctctcgcggggaggaccccacccaccggctgggtggtggcccacctacctcgtcgtctgatgagaacaccaccctggggggcgtgttttttttcttctggaggggaccaccccacctccttcaaggaggagagtttgtgcatccacctcctggccgcgtggtggtggtgaagcaccacaaagctaggaggcccaccacccaccaagggggttgttctacttccttcttcctcctggggaggagggagactaacaggaagggtctccactaatgtggggagtgaagaaattctgtggggggcatgcatgatgagaatgaatgataccgacgccgcgctggtgggtacactgcctccacgaattgtggggggagagcgctacacacacttctcacaggnggaggagtacttctcgtcctctacaagcagtagtggaagagagcgtctctatataatatagagagtagcgctcgagagtagctcaacctcgagaggagagttatctcatctcgtccagagaaagagatgagaggatgctcgagaggggtgatcatcacagcacacacacactactcttctagagcgacgagatggctcttctcgacgaccaccactccttctgtgtgcgccgccgcccctagatggagagacacacacagtcatcagagagagtctctcacacaagaaagttgtttggtctcacaacacaacagagagacccttctgagacgacacacactacacgacacactctctctgctctctactctaataatttagagattatatctctcacacacagccactgtgggacacccanctctatggtgaaggggggcacacacaaaaggtgctcacgcactttcacacagcgcaacacgcagaacacacacgttctacactctcacatcttttgctctctcacacacagcggtcgcacacgcgcgnggagcacactctctcgcgagtactgtgtctcatctctagtagtaataaggtgggaaagagggccacagcagtgttttctcaacactctcgcacagcggttcatcagagaacatcgatgtagaaagagctacgtgtgtatctcacgccctccaggctttgtgggagaccacacaagagacactcggtgtgtcctgcgngtggagagaccccctcagagaggacacacacagagagctgagagtataaacacctctctaggcgtcacacagacattgtcatttactgtgaagagcattctattgtggttaaaagaagagaccactcaagatccctgggggaagactttagacacacaaacaagaagattttttggttgggaggaaaaaa

SEQ ID NO: 616047 - DNA, 412 bp, Homo sapiens
gagctgactctagaggataaacggctgtggaagacggcatgtggccatttcgggccgtgctctgagagccagacgtgggttgggtatgggaggacaggggaatggcattgacttgaccctgagcactttgtcctggggtgcaggcccggctgtcactcccctggagctgggaatggcattgggcggtggctcagggtcccttgccccagcggcaccatctctgcatttggccagcaaggctgatgggacttgtgtggacatttctgggacgtagaccaggcagcatgacacacagggaggggtaggcagagaagggcggcccctgggtcttgggttccaagtcaggctttgcaagcctgctgtgtcaagccctctctcggcaccaggccaggtgggccagggtcagccctgg

SEQ ID NO: 616048 - DNA, 150 bp, Homo sapiens
actgtattcaagtcgtgcagtctgcctgggaaacttttactgcggttgagtccggcctccagcctaatctgtttaaccactttcttcatatcggtgacgctgtaggagccagagatggcacgcgagatcgccattgttacctaagctcta

SEQ ID NO: 616049 - DNA, 726 bp, Homo sapiens
  misc_feature (264)..(264): n is a, c, g, or t
ccagcactttcttctcctgaggcgccttgaacccacccgcgttctttccccccgtcgcgccgctccaccgattgaacctcgggggatacaagatccgcccgctctcgctcaccctcgcaaccgcgcccccggcgcccgctcggttttttgtctcgctgtggcgtgcaaacaacaacctgggggtgtgacacagcaaacagacctcgtgggggggctatacaacatccacccgacgtgtcgtatcgacacaaatacgaagagggntctttcttttctctttgtggggaaagggtttataacggacagagcccactcttggtgggcgccccctctgggagatgggcggaacccgcctctgtcacagggaggatttttcccgaagagcacccggctcttctgtccgccgatgacgatatgttgcctggataccgctccactactactgtctggacgcgtcttgagaagagatcgcgacacacagatggatggcgcccccccgagtgtttgcgttgggcgcgcacaacacccctgtcgagattccccagtaccttggggggggctaggggacacggaggacctattgttaatacccgcggattgagtcccaaaggatatcagctgtgtgagcactgcggagtatacaggcgtctgccactcactctgcgcctctctgggctagacataagagaacgagaaattcctctgtccttcaatagaacaagaaaa

SEQ ID NO: 616050 - DNA, 368 bp, Homo sapiens
tagtctcatcattgttgcgcattgcgttggttcacgtctttggctattgtgatgtaggtgccacgaatcaagcatatgtgtgcgtgtgtcgtttatagcagtctgctttctagtcctttggggtatatacccagtaatgggtctggctgggtctgatggtatttctagttctagatccctgtaggaatcggcagactgacttccacaatggtggaagtatgtttacagtgccaccaacagtgtaaaagtgttcctatttctccacatcctctccagcacctgttgtttcctgactttttaatgattggcattctaactggtgtgagatggtatctcattgtgcttttgatttgcatttctctgatggc

SEQ ID NO: 616051 - DNA, 100 bp, Homo sapiens
ttgctccaatcagccagcgtcattgtgtacacgtcgtactgctgtttttgataaccaacaaggggtcaatgtatagaaatccctgatgggagcaagatgc

SEQ ID NO: 616052 - DNA, 199 bp, Homo sapiens
  misc_feature (63)..(63): n is a, c, g, or t
aaaattaacccctgaaaaatgttccttaatgttttaacccttttactgtgtttttattcctcnaacttccctaatgatcaatcaaaaaaagtaccccccctcctttttcctgacagttctttcagctttacagaactgtattataagtttctatgtataactttttacctgtccaaataaaatacctttttttcaaata

SEQ ID NO: 616053 - DNA, 141 bp, Homo sapiens
ggattaccgatacaccgccaaacggcgaagtaaatggaaatgctacagagcaagatactcttctaaaaaatccaacaaggctgggcgtgatggctcacacttgtaataccagcactttgagaggctgaggtggtatagcct

SEQ ID NO: 616054 - DNA, 500 bp, Homo sapiens
  misc_feature (209)..(209): n is a, c, g, or t
  misc_feature (224)..(224): n is a, c, g, or t
  misc_feature (276)..(276): n is a, c, g, or t
  misc_feature (307)..(307): n is a, c, g, or t
  misc_feature (325)..(325): n is a, c, g, or t
  misc_feature (338)..(338): n is a, c, g, or t
  misc_feature (356)..(356): n is a, c, g, or t
  misc_feature (364)..(364): n is a, c, g, or t
  misc_feature (380)..(380): n is a, c, g, or t
  misc_feature (386)..(386): n is a, c, g, or t
  misc_feature (418)..(418): n is a, c, g, or t
  misc_feature (424)..(424): n is a, c, g, or t
  misc_feature (455)..(455): n is a, c, g, or t
  misc_feature (479)..(479): n is a, c, g, or t
tgatagaatcttgctctgtcgcccaggctggagtgcagtggtgagatctcagctcactgcaacctccacctcctgggttgaaagtgattctcgtgcctcagcctcctgagtagctgggactgcaggcacgcgccaccacgcccagctaatttttgtatttgagtagagacggggtttcaccatgttggccaggctggtctcgaactccngcatctcaggtgatntgctcgcctcggcctcccaaagtgatgggattacaggcatgagcaccgtgcncggcttcacacccatttctttaaaaaggatnccgtagcaggcagaaaangccccttccatcntgctcctctgatactgtngccccttngaagataatttccgtnctccancccacgtgtctgtgggttgggaacttgcccangcttgnttcctgggcccccctggaaagccttccccanagctgggtaaatcttgaacttaanggattgcctggggcaacggct

SEQ ID NO: 616055 - DNA, 518 bp, Homo sapiens
aggccggggtatttgacgatctggaaacggttcgcttgcgagcggtgccaacgactgaagagagatgccaaatcacagaagcttttcctatttgcaaaaggagatgactataacacaaagaatggaactgaatgagactctgggcaaaccccagaagagagctacaggacagacaacgaagatagctgaggaacggcaaatggctccctgattctgacatgatggcagaaactgaatgacccagccggaaaagaaatagagaactttcgcgggttgaaaggacggaacggctttataatgttgaaaacttcccatgtgatacaaaccttgggagaagtaacaatgaagaagtgatgaaaggtcaggaagcaaattttgtggtgagggcaagtaacatgaagagttgtccaatgataccagaaagggaaaccttgacagatggggtaattcttgtacaaatgggcatttgcctttcttggttgcaacttaaccgaaaaaggttttccctacggcaaaaa

SEQ ID NO: 616056 - DNA, 744 bp, Homo sapiens
tggtgacaggtgcctcacagaaaaagaaaaaaaaacaacccggcgccacggaaaagccagggcctggttcccccacgatgaaatatgctcttcccatcagtctccgtgcctctgggccctgtgtgtggcaccctgtggagaccctgtggttcaagccacgggtgtgggcctcgagcccgcttagggggtcacccccggtgcgcctctcttgcgccttgcgcgggcgccctgtgcctttgtgcgagggcggagcttgcccttctccctcgagcacagaacccccgtgaaaaaggctttttgctcaggggcggagacgcgatagaagttcctcccttcgtgcaacaagaacttctcgggaaaaataccaggcagaaacgcagaaacgacaattgttctctcctttcaaggcaacaaagaccccctgagggcgggggcggggcccaatggggggccacccggaaaaaggggcgaccagaaaaaccatggcgagtatacagggaccctacgaggaacaaacacaccgcgcgggggaaaaaaacccccgcgacagaaaaggggcaagaaagcaagcggccttttttctcgacaagaggagacaaaccacatcttctggtggggcgccaacttagtgaccatcacgcgactcattagggagggaacacacaacacatcaggaagaaaaccaccgaaacatatacaagcggggcgagtgaacatattaacaagatcacctccatcatcgcg

SEQ ID NO: 616057 - DNA, 246 bp, Homo sapiens
agattagctttcatttggggaatgaagttctgaaatatctaaagcagtttactcatcaattgaaaagtcctccaaaaagagaactattgggaagccccccccagagtggtggaaaagaaaagctcacacagtttttaaaagggaataacttaaaaaaatacttaaatggctaagtttacttggtgcagttaagaattaaacttgtcaattttaacattgctgaaacatctgaaataaacttatgtg

SEQ ID NO: 616058 - DNA, 189 bp, Homo sapiens
ggttaagaccccacacatgcccccagtttgggaaacagtttgttatggggttcccaccttgccaggcatcaacaaacacacacttggggagagaccctacagctgcctcaagttttagaagacctttggccgaggcatcacctcatcaggcaccagaaacccactacatgacagaccagcaggtgctct

SEQ ID NO: 616059 - DNA, 521 bp, Homo sapiens
  misc_feature (490)..(490): n is a, c, g, or t
  misc_feature (506)..(506): n is a, c, g, or t
  misc_feature (509)..(509): n is a, c, g, or t
cttctgttttaagcatgtaacattttattaaggcagtcatttaaacttggtgtagtgggaaattttagacataaattgtttgttttgatggcaagaagactgcataacacggagtgagtctgtgctaactgtacgacactcatggccaaggaacaaagctgggagtgatccaaggctttaaatttgaatatatttaacaccccatactttgctgagtttagagggcagactgtctgctatctttacaatttgcacttgcatttccccctatctttacacagaacctttaagctaagatttagttccctgaaagaatggaaagagatgtattaagattatggggttctcagcagagctggttggcccctttaatattaactgacttatggtaaatgtgattcatctatgaaaatagtggctataaatagatgttaatagcgctcagttgcagaacagccaggttgtgctcacatggccagattaggggaanaaatcctgttgggtanttnatgtggtctttc

SEQ ID NO: 616060 - DNA, 450 bp, Homo sapiens
tataagtagtcatcttcacagatctatcgctatctcatctgacccatacttgaggctaattgacttctaataactaagtcaggcaataaataacccagctggccaggaaactgatgccctgatgtagcagatggaggctctgatgcagtacactccagacaggtcatccattggagactcaggtttcaatgttgccattgatgagggctcatatcccccggtgacgatacaggcacctctcactagccttttgacagcctatttgacacctgggactgtagacggctcatttgcatgacctctccgtctggttataactcacagcaaatctcgagggatccccagatatgctcaacactcaaggtctagtgcacaacgccaataacacctgaatcaagaatcgtacttctacacaaagacaaataacaacactgcacagagaaatataaa

SEQ ID NO: 616061 - DNA, 199 bp, Homo sapiens
ggtagtccaagtaacgttgggcattccggataggccgagaaagtgttggggaagaaagttaaatttacgcgctgaatatgatagtgaaatggattttggcgtaggtttggtatatggtgtttcccccgtgtagaataggggaaatcagtgaatgaagcctcctatgatggcaaattcagctcctattgataggacatag

SEQ ID NO: 616062 - DNA, 850 bp, Homo sapiens
  misc_feature (41)..(41): n is a, c, g, or t
  misc_feature (64)..(64): n is a, c, g, or t
  misc_feature (69)..(69): n is a, c, g, or t
  misc_feature (72)..(74): n is a, c, g, or t
  misc_feature (78)..(78): n is a, c, g, or t
  misc_feature (81)..(81): n is a, c, g, or t
  misc_feature (85)..(85): n is a, c, g, or t
  misc_feature (91)..(93): n is a, c, g, or t
  misc_feature (96)..(96): n is a, c, g, or t
  misc_feature (104)..(104): n is a, c, g, or t
  misc_feature (106)..(106): n is a, c, g, or t
  misc_feature (112)..(112): n is a, c, g, or t
  misc_feature (127)..(127): n is a, c, g, or t
  misc_feature (175)..(177): n is a, c, g, or t
  misc_feature (179)..(179): n is a, c, g, or t
  misc_feature (186)..(187): n is a, c, g, or t
  misc_feature (189)..(189): n is a, c, g, or t
  misc_feature (199)..(199): n is a, c, g, or t
  misc_feature (203)..(204): n is a, c, g, or t
  misc_feature (209)..(209): n is a, c, g, or t
  misc_feature (212)..(212): n is a, c, g, or t
  misc_feature (218)..(219): n is a, c, g, or t
  misc_feature (241)..(241): n is a, c, g, or t
  misc_feature (244)..(245): n is a, c, g, or t
  misc_feature (257)..(258): n is a, c, g, or t
  misc_feature (265)..(267): n is a, c, g, or t
  misc_feature (273)..(275): n is a, c, g, or t
  misc_feature (289)..(289): n is a, c, g, or t
  misc_feature (296)..(296): n is a, c, g, or t
  misc_feature (525)..(525): n is a, c, g, or t
  misc_feature (532)..(532): n is a, c, g, or t
  misc_feature (535)..(535): n is a, c, g, or t
  misc_feature (542)..(542): n is a, c, g, or t
  misc_feature (552)..(552): n is a, c, g, or t
  misc_feature (646)..(646): n is a, c, g, or t
  misc_feature (707)..(707): n is a, c, g, or t
  misc_feature (787)..(787): n is a, c, g, or t
  misc_feature (789)..(789): n is a, c, g, or t
  misc_feature (838)..(838): n is a, c, g, or t
ttttaataaaatagattaatttcatattacatagagagcangtacatccattcatccgtgatanaattntannnatanttnccanaaaacnnntancctttccntngcaatncatccagtataacangccttccacagatacagcattcccatcctcactcccattcctattttnnnanattttannantccacacaantccnnaaccnccnccccgnnatccctataccacaatccagantcnntcagtttcttcnnatatttnnntggggnnntttggggggggggngggtgtntatgtaaaaggctgaagtcccctttaaccaatacccatcccacctcccacactcattattttcccttctccactcttcacaggtgaccactatcaagagtttggtctgtatccttccaatccgtttcaaaaacatgtacatacatatatgcatccattaccaatagatagtactgagttttatgaggaaacttttaattcaaatttacaaaaaagtcattgtactatcngtatcantcngcaactngatccccccncaacaattctggggtctttctgttaattcatgtggatttcatttgttgcgttttacagatatatagtattacataagaatttcccatattgttngtgatgggctttctcagttgtttctaatttttggctactacaaatcaagccacagtaaatntcctagtgcgtatttcctgagcattcatactcataagtagaaccgctaagtatttctcaaattgttccaaggaatgtttncntattcacaaggtcatatgcattttagtacatagcttttccatatttctntttttaatctct

SEQ ID NO: 616063 - DNA, 244 bp, Homo sapiens
ggtcgaacagcggcaggctcgagaccacggcgatcgccttctcgtgcagatggcccgccagcgtcgtcgacagcgcataggcgtcgccttcgaccacagtagcgcgcgggaagcgcttgcgcagcagcgtgcagaaatccgggctgtactcgaccaggatcagacggtcttcgctgatcccacgctcaatcaaggcctcggtcaccgggcctgtgcccgggccgatctcgatcaccggacccgg

SEQ ID NO: 616064 - DNA, 396 bp, Homo sapiens
cggttttatttggtaaatctttcaaggcacacattttaaagagaataaatgagtcttggaaatcttgtaggtaagggtaaatattaggatgcatccagttacatttacacacacatacagttacatttacacacacatacacgcatacagactgagtcacgtgtgtgtatatatatatatgaatttaccaattgatgttaactaatatttataagagccagttggattgatatatattgttgaacctgaaaaatatttattatatacatgtttaaaatacagaaataaatagcaattgcactaggcatttgaaactgtactaaaatataagctgtgaacattttgtgatcattacaaattcttacactgaataaatatttttatttttacaatatt

SEQ ID NO: 616065 - DNA, 410 bp, Homo sapiens
ccttccccacagttaaggataagagacaggtgtaaaggtgagaaagaggccgggcatggtggctcacgcctgtatcccagcactgtgggaggccaaggcagatggatcatctgaagtcaagagttcgagaccagcctggccaacatggcaaaaccccgtctctactaaaaatacaaaattagccgggcgtggtggcacatgcctgtaatcccaggtactcgggaggctgatgcagcagaattgcttgaacccaagaggcggaggttgcagtgagctgagaacgtgccattgcactccagcctgggcaagagagcgagactccatctcaaaaaaaaggtgagacagataggtgtgacctgaggtggcaggtgtgaagataggaaaggcaggctcatgtgggggaagggggg

SEQ ID NO: 616066 - DNA, 514 bp, Homo sapiens
tcacttagaggtaggccatgtatccatccttatcacacttcactttttccaagaactacgactggcttgtcttctatggctttttaagaatctaacttcattgtgtaatcagcttatttcctctccattattaatgccctaattggcaggttttctgacccattttcttttctgtgatgctcttctagatgtctaaacttttcatatcacaacatggatttaggtagtttttcagtaataaaagttggtgtgaatatgcagtagtatgtggattaattaacatacatttaacaaatgtttattgaaggcctactgcaccctagacatgtaataaataaataaacaaataaattagtaaggtagcttcagatagtgataaattctattaagaaaatcaggagccggacatgatggctcgtgcctataatctcagcgacttgggaggctgaagcgggaggattgattgaggccaggagttcaagaccaacctgggcaacttagcagtacctcgttt

SEQ ID NO: 616067 - DNA, 432 bp, Homo sapiens
ttgttggctgggtgttgtggaggcagatcctcattccacctgatgatggctgtgggaatgctccttgccagtcctcagatatatatgatgaggctcctgcacaggcatttagcacaaggggtccagcattgtcttctctccaggcagatattcttagaaactttgatttgcagttgtgagcccgtgaacctgaacggagtgtgtgtgtgtgtgtgtgtgtgattttccatcttgtgggccatggccgctgggtatttatagctagatcttcagggccattctcacgtggctaaagaaaatgaaaacctcatgtggatgttgttttgttttctctctctgcctccggcattgcgagcactccagttgttacacccttattgttgtaactagagccaccctgagcatccctgcgatggagcggttatgtacatt

SEQ ID NO: 616068 - DNA, 580 bp, Homo sapiens
tatcagaatggaccgattgtaatcatgatcgatggagtggaatggaatcatcaaatggagtcaaatggaataatcattgaatagaatttaatggaatcaccgaaatgaatcgaatggaatgatcatcaaatggaatcgaagggaatgatcaaatgggatagaacggagtcatcgaatgaaatcaagtggaatcatcaaatggattcgaatgaaatcatcatcaaatggaatcgaatggaatcatcgaatggactcaaatggaatcatcattgaatggaatgaaatggaatcatcgaatgttatcaaatggaatcatcattgaatgaacatcgacatggaaacatccaatggacccgaatgcaaaaatcatcgaatggaatcgaatgcaatcattgaatggactcgaatggaatcatcatgggatgggatcaaacggactcattgaatggaccagaatggaatcatcatggaattggatcaaacggaatcattgaatggaccagaatggaatcatcgactggacttgaatggaatcatcaaatggactcgaatggaatcatcactgaatggaatcaactgc

SEQ ID NO: 616069 - DNA, 1125 bp, Homo sapiens
  misc_feature (324)..(324): n is a, c, g, or t
  misc_feature (338)..(339): n is a, c, g, or t
  misc_feature (371)..(371): n is a, c, g, or t
  misc_feature (375)..(375): n is a, c, g, or t
agcggattggtttaccctcaagccgatgactccatggctactgatattagttagttgtaggatgtttaaaaagcatatcagacccccagatttcacggaattgagtataaatattgcttcttgtcaccctgggacagtaatgccttatagtggcactagtcaccttaagtagattacacatggttgaggtgaataaagctgcatgggaatttgctttcgtgatatatttcatttgcaaacttctacataatcaagttttatgtttaaaaccatcggttctatatatctagctttaggaagttgcccttacaggtgggacctttngtgttaatctgttnnctccccagtcatcttatttggctatgttaaanaaanaaaaaaaaaaaaagcgaaagaaaaaaatggtgtcatcactgtgttgcccaggcgtggtctcggaacttccgtggcctcaagatgacttttcccacctcagattttcccaaagtgctggaatcacaggcatgtacccacagatgccgttggtctaagctgtgttttaaaattatgccatgcatttaaacataacaccgggccatcttccttatcccttccttatcccatatgtttactgacaaccattattttactgtgctacaattaggttataattttccccaggagatttagcttaaggtgtatttaacactatagaaaaatacccctattagcaaccaatgtgtccagctgccccccaaggtttacagcagaggatagccggggaaacaccaacattaacctcttggctatactggtgaaaccccatccctctccgtgccctcctaatggtactgcttacacatttaatttccgttatttatcaccaattgtttaggtggttcataaaccgcggtatttatttaacacctgaaaagggcatgaagcttacaaggggaacgtcatgttgacctttgagcaagaatgataggactcattccccactgtgtaatcgggtacatcacccatcattaggggggaacacttgtgtattggcagagggcttccgcaacttccttactttggaccacaggtccccagaaaagtttaggcacacactttgggtattcccttctcaatctccggata

SEQ ID NO: 616070 - DNA, 774 bp, Homo sapiens
  misc_feature (324)..(324): n is a, c, g, or t
  misc_feature (338)..(339): n is a, c, g, or t
  misc_feature (371)..(371): n is a, c, g, or t
  misc_feature (375)..(375): n is a, c, g, or t
  misc_feature (658)..(658): n is a, c, g, or t
agcggattggtttaccctcaagccgatgactccatggctactgatattagttagttgtaggatgtttaaaaagcatatcagacccccagatttcacggaattgagtataaatattgcttcttgtcaccctgggacagtaatgccttatagtggcactagtcaccttaagtagattacacatggttgaggtgaataaagctgcatgggaatttgctttcgtgatatatttcatttgcaaacttctacataatcaagttttatgtttaaaaccatcggttctatatatctagctttaggaagttgcccttacaggtgggacctttngtgttaatctgttnnctccccagtcatcttatttggctatgttaaanaaanaaagagaacaagacaggaagagcgacaagaggacgagatgggtggtcccactggggtagcccaggcgggactcgagctcgcgggcctcaagtcgacttcccacgcactcagagttcccagagggcgggaatcgacagggcctagagccatgagtggccggggcactaaggccggggttcacaacttattcgccagtgcattcgaacataaccccggggccatcttcatatccgtttcctatcccagtattgtcgggtgaaaccatctagtttaagtgtgcatnacattcaggtaaacttgtaccaggagactttagccttacgggtttgtaacacgttatggaacatgtcgcactactagaaccaagtgtccgaggtgaccccaaaggcttaacatgag

SEQ ID NO: 616071 - DNA, 503 bp, Homo sapiens
  misc_feature (87)..(87): n is a, c, g, or t
  misc_feature (333)..(333): n is a, c, g, or t
  misc_feature (430)..(430): n is a, c, g, or t
  misc_feature (486)..(486): n is a, c, g, or t
  misc_feature (488)..(488): n is a, c, g, or t
  misc_feature (491)..(491): n is a, c, g, or t
tatgtcgcgggcgcggagccacctgcgcgccgctctattcctggcagcggcgtctgcgcgcggcgtaacgactccagtgttcggggnctgcggcggtggggctttttggaaagggaccctgggccctgggtttttggggggaccccccctgggttgtgttttgtgtcccctggcacaaagggggttaaatggcccccccaggaacgggcccacgttgggacggtttagccccaacggcggaactttgtcccaggatgggctggcatattgcccttcaaatgttaaccccctttgtccaatgaaacacagagtagctctggtcttactcttgtngagcaagggttgaaagtcggcccaagtctgtggggttgatccccttcaagaaccagcagttttggaatgcccaatggggacacttgttacctttggncgaccggaatgttgtgggctttgcaagtgtagggacgtgaacttggggatcctggncntangaatcattcagt

SEQ ID NO: 616072 - DNA, 157 bp, Homo sapiens
gaaacttccagggtgctgtattaaatgcagattcccagagggaatcccacaagctggcaaactttcctgtcaaggtacatctttcattgtgtgccaatcttgcatctgacctccttcctatttctggggacttcctcattgccacacggtctctcaa

SEQ ID NO: 616073 - DNA, 968 bp, Homo sapiens
tccctttttaatttttatttgtattaataactggttacacgggggattcataattaggcatcaccagtagtattgggcacagtttggtaatataaagctcagggtacaagtcctagtaacacattatgggtcgtacccaaagtacaaaaagaaaaaaaaaaatacaagaggtctattatcatcctcccagtgggtgattcttctatgaatatacagttattggtctataggaaaacaagttatgttccaggatgaaacacagatggcctcctgcacccactacctgtctgtcttctaggaaaaataaggggcgggggggcccgacatggacagacagggggtttcaaagtggcggcccgtgcgtgattgtggaaacctccgaatgccgtgcccctcttgagcgtatgaagaggggttgttaaacctgtgaggaaaaacacgccatgggatctgtgcgcgattggggagaggggcccttcaacatatacgaggacatgctccgtggaatagttgcttgccacgacatgaggtttgtagtggcccaccaagattattctggcgccctactaagggggatggattccaatatcaaggccataactacctatagtgtggggcaacggcaagaaatccccttcacaaagggcgaggtctatcgaacggaacgtgtacatggtatcgagacgataacacatcctggcatcacaaaactcccgtagcctctactacgcggaatggtcccctaaaatacctacgagagtagaagaccccgggggagtctcgcatcgtggatccccccaaaaagcctcctcgtgggacccaggggctcggtaacctcccggagggatgacacaacgggccagaacacctgcaaagaaggcacccagcatttgcgggataaaccggacactgagcaccccctcgcggaagtgggcaacaaagcaacagcggactaggaagtgaccccc

SEQ ID NO: 616074 - DNA, 210 bp, Homo sapiens
ggacttatatacacctatacatatacagctgtgacacagtgagtcctgtattaaaaaaaaaaaagaggaagaagaagaaagaaagaagaaagaagaatgaagaaagaaagaaagaaggagacaattaattaaaattctaataatcagaatttctacggggactacaatcttttctcaaggtcccatactggactcaacatggcagtggta

SEQ ID NO: 616075 - DNA, 168 bp, Homo sapiens
aacgggtgatgcgtttggaagtatgcgtttgagaatgttttcctgtttcttatactaacattagttcttctatagggtgatagatatgttccacttgggtgttgaggagttcagttatatctttgggatttaatagtgtcgtgtgtgttgagcttgaacgctttctta

SEQ ID NO: 616076 - DNA, 105 bp, Homo sapiens
cagaattacaggcacccgccaattatgcctgtggcataattttttggtattttaagaagaaggcgggtttcggcctttgctgggccaaggcttgatcaatgaaac

SEQ ID NO: 616077 - DNA, 465 bp, Homo sapiens
ccgtcccctcagtcccagctctcaccaatgccaaggagttcgtgtacaacggtggtggctcagcgagccttttctttgatacggccgatggccagggcagcggcactcagagcccgtttggagtcagtggggctggcacatgcaacaacagcagctttgacatggcccaggtatttggaggtggtgccaacagcctcttcctggagaagacaccctttgtggaaggcctcagctacaacctgaacaccatgcagtatcccagccagcagttccagaccgtggtgctggccaactgaccatctacctgtagaagacaccctttgtggaaggcctcagctacaacctgaaccccatgcagtatcccagccagcagttccagcccgtggtgctggccaactgaccatctacctgcccgtggggccaggagcacccaagaccacagaaaagagaaaggaaaggccaaaa

SEQ ID NO: 616078 - DNA, 236 bp, Homo sapiens
  misc_feature (116)..(116): n is a, c, g, or t
  misc_feature (125)..(125): n is a, c, g, or t
  misc_feature (166)..(166): n is a, c, g, or t
  misc_feature (176)..(176): n is a, c, g, or t
  misc_feature (214)..(214): n is a, c, g, or t
atatatccaaacaacaagcataatatttcgcccactaagccaatcactttattgactcctagccgcagacctcctcattctaacctggaatcggaggacaaccagataagctaccncttttaccnatacatgtggacaagatagcatccgtacatatacttcacanacaatcctanatcctaattaccaatctatctcctctaattgaaaacanaaatactcgatatgggccccac

SEQ ID NO: 616079 - DNA, 638 bp, Homo sapiens
aattagcacgaatgtggagatcgacagatgctccgcggcacggcctacatggccttcctcatacaccgcgacgaaataacgcagttgcttgaaatccataaggttttgcttatcgaaaaagctggaaaatcgaaatggccgctggcccccgaggcgcctagtctagcgcctattcgcagggcttacagggccggatcggacaatgaacagcgtttttggttgatagcgtttacataggcaaggcaaaaaatctgaaggccttattggcaggcggcatcgaccaaggtcaggttgccaacggagggtgaagtgtgaacttgttccgtcgctggcgcgccgagtcctggatgacctggttgtgcatgccccgcgtgcagatgtttccagccagtgcctgattgcccactgttggcgcgcccgccccaggtgtttgtacagggggcagggttcctggctttcggacgcctgacgaccgcgcttatcttggatttccagtcaaggcggcggggcccaacagcctgggtcacagtccccaggccgtacgcgaagccatttgccaacagattcacaccgggatcaaccctgggctgggtttgcacaaccgcgcgcaactggatcttgtcgatcgtctgtgccac

SEQ ID NO: 616080 - DNA, 388 bp, Homo sapiens
cggaccagcgcacgagcctcatcccccacactacggccggctagataggtccgatggtgggatttcacggctgacggcgggctgccggtcgaatgaaatacagatccccaggtcgctagccgggtgtcgatggaactctccacttggtaattccaattttggtttccttatccaacgggatgtcttagattccaacctttggaatttcttactctcaaaaggcaccccaggtgtcctctctgtgccttggacgaggtttggtttttttttctttctttcttcctttttttccatcgggggtacttctcccttctctcggcttttaagactccggccggttctccagggtcttctcatgccggtagcttctcggtggcaattacccttc

SEQ ID NO: 616081 - DNA, 451 bp, Homo sapiens
ccctagaggatccaagcgttaacggatattgtacctcacagtaatccactaacagtggcagtcctgtccttggggaaagcctcatatagattacagattccctcattcttcctaccacttgaggaagagcaagctgatgagccagaagatgtgtgatcatgctctcatgcccttttctcccagaggtaaggtatatttagtgacattctgttgttattactatagtaagaaatctcttcgcaaagtatttgataatttaaaattgttaactaataccacttcatattcattgtcttaatcaccataagaatctcaagatgaagatgtggcaagtaaaactatcagaggttaaataacatacaagctcataatcttcataaagaaagctgagagtaaaacccatgtcagctgaccactaacccaagttttcttttcacagcggttaaagctt

SEQ ID NO: 616082 - DNA, 232 bp, Homo sapiens
  misc_feature (211)..(211): n is a, c, g, or t
  misc_feature (219)..(219): n is a, c, g, or t
cgagggttcatcatattggccaggctggtcttgaactcctgatctcaggtgatccacctacctcagcctctcaaagtgctgggattacaggcgtgagcaccggtgcccagcctaattttttttgacagagtcttggtcttgtcgctcagactggagtagtgtgatcttggctaactgcaacttccacctcctggattcaagagattctccngcttcagnctccagagtagct

SEQ ID NO: 616083 - DNA, 437 bp, Homo sapiens
  misc_feature (52)..(52): n is a, c, g, or t
  misc_feature (67)..(67): n is a, c, g, or t
  misc_feature (109)..(109): n is a, c, g, or t
  misc_feature (124)..(124): n is a, c, g, or t
  misc_feature (137)..(137): n is a, c, g, or t
  misc_feature (161)..(161): n is a, c, g, or t
  misc_feature (190)..(190): n is a, c, g, or t
  misc_feature (222)..(222): n is a, c, g, or t
  misc_feature (335)..(335): n is a, c, g, or t
  misc_feature (436)..(436): n is a, c, g, or t
cagttgttgcactgtcttctgttaaaaatacggaccaagggcatagaaagtntgctcttcagggggncgcgggttcagaggatgtgtgggcggttgtgccggacacggnttcgagccttggtcngggctttgaaggnagcagcattgtacaggtgcttctnaaagcgtgggccttggaggccttcagggnagtggcatccagcaacagcacagggcccaggncaaagatgtcacggagtagctcattgttctggagatggtggtgcatgcccgaacccagcacttccttgaaggcagcgtagatccggtgccgagcccagctgtccatgtagagncctcaaagccgaagcgcactatctcttcttcgcattcaccgccctccacggagtgcagcacggcgcggaaagtagagcgctggcgccgacgatcagccttng

SEQ ID NO: 616084 - DNA, 217 bp, Homo sapiens
tactctgactattgaattacttaagttacgaaagtccttcacatttttcacactaagctactatatttaaggacttccaaattcttctaactcttccaaaagccttccgccttagttttgtgtaaattacaccagtccttttagtagctttgtgatgtgattgaataaccaactatcccctatctagctacaagtattcttctaaataggtactggt

SEQ ID NO: 616085 - DNA, 146 bp, Homo sapiens
agatcagccttccctgccgtcaagtggcgtgtactcgggatttctgctgtgttgtggccttggtcaaggcctcccctgagaagccaggactggcctgctgacaggctgagtctaccttggcgagtaccaagatatttttcccgggc

SEQ ID NO: 616086 - DNA, 923 bp, Homo sapiens
  misc_feature (155)..(155): n is a, c, g, or t
  misc_feature (160)..(160): n is a, c, g, or t
  misc_feature (172)..(172): n is a, c, g, or t
  misc_feature (182)..(182): n is a, c, g, or t
  misc_feature (186)..(186): n is a, c, g, or t
  misc_feature (193)..(193): n is a, c, g, or t
  misc_feature (207)..(207): n is a, c, g, or t
  misc_feature (230)..(230): n is a, c, g, or t
  misc_feature (232)..(232): n is a, c, g, or t
  misc_feature (234)..(234): n is a, c, g, or t
  misc_feature (240)..(240): n is a, c, g, or t
  misc_feature (250)..(250): n is a, c, g, or t
  misc_feature (252)..(252): n is a, c, g, or t
  misc_feature (255)..(255): n is a, c, g, or t
  misc_feature (259)..(259): n is a, c, g, or t
  misc_feature (272)..(272): n is a, c, g, or t
  misc_feature (282)..(282): n is a, c, g, or t
  misc_feature (289)..(289): n is a, c, g, or t
  misc_feature (304)..(304): n is a, c, g, or t
  misc_feature (385)..(385): n is a, c, g, or t
  misc_feature (485)..(485): n is a, c, g, or t
  misc_feature (508)..(508): n is a, c, g, or t
  misc_feature (522)..(522): n is a, c, g, or t
  misc_feature (528)..(529): n is a, c, g, or t
  misc_feature (538)..(538): n is a, c, g, or t
  misc_feature (541)..(541): n is a, c, g, or t
  misc_feature (545)..(547): n is a, c, g, or t
  misc_feature (551)..(551): n is a, c, g, or t
  misc_feature (561)..(562): n is a, c, g, or t
  misc_feature (572)..(574): n is a, c, g, or t
  misc_feature (584)..(585): n is a, c, g, or t
  misc_feature (594)..(594): n is a, c, g, or t
  misc_feature (610)..(610): n is a, c, g, or t
  misc_feature (631)..(631): n is a, c, g, or t
  misc_feature (633)..(633): n is a, c, g, or t
  misc_feature (642)..(642): n is a, c, g, or t
  misc_feature (644)..(644): n is a, c, g, or t
  misc_feature (684)..(685): n is a, c, g, or t
  misc_feature (687)..(687): n is a, c, g, or t
  misc_feature (690)..(690): n is a, c, g, or t
  misc_feature (813)..(813): n is a, c, g, or t
  misc_feature (816)..(816): n is a, c, g, or t
  misc_feature (819)..(820): n is a, c, g, or t
  misc_feature (822)..(822): n is a, c, g, or t
  misc_feature (826)..(826): n is a, c, g, or t
  misc_feature (862)..(863): n is a, c, g, or t
  misc_feature (896)..(896): n is a, c, g, or t
gacggaccagagcaggtatggcgggtgcagtggcggcccggcaggttacggggctgggtgcggaggagcgtgatctgagtggagagcgggccggggcaggagcgtcgggtgggtcggaggtgcctggaccagtccatgctggacgctgcctgcgnccggntctgctgtgtcngcgccgcccncggngcgtccnggcccggctgggcnccgcccccgcggcccccgcggcntncnccccgnccccgccggncnccncccnccccggccccccngcccgccccnccccgcncccccccccctcccnccccgcccccccccgccccccccccccccccctcccccccccccccccccccccccccccccccccccccccccccccccncccccctccccccccccccccccccccccccccccccccccccgcccgccccgccccccccccctcctccccccccccggcccccccccgggcccccccncccccccgccccccccccccccncccccccccccccngtccannctttttctnctncgcnnngctncctggtgtcnngccttattcnnngtgccctgcnngtggctttnccccctcggatgtttnccctccccccccccccccccncngtgtcttcngntggagctggaggaggggaaggcagggagcggactccgccnntnttntctgtccaagattgaagaactccagctgattgtgaatgataagagccaaaacctccggaggctgcaggcacagaggaacgaactaaatgctaaagttcgcctattgcgggaggagctacagcngcngcnngngcanggcccccccccccccccccccccccccccccccccnnagaagaaagtgttggtcaaggtacatcctgaangtaaatttgttgtagacgtggacaaaa

SEQ ID NO: 616087 - DNA, 374 bp, Homo sapiens
actgtcttcgaataatctcctgcacatgggcccagtatgtagagatgagtccagtgaggctagagccaagggacagcatgccctccttcccacaggccttggggatagctctggactgagcagggcttctgggagcttgtgggtagactcactggattacaccacgtgtctgtatggactcccagggtaagagctgagctctaccagtttttatcactatggcatatatagcacttggctattctagcctttaccgctgggagctccccaagtttgcccaagtagggcctgcttccctagagagctgagctcaggggtccttgggaagaatcacaagagttaggggtggcctaacttgggccttctactctcaa

SEQ ID NO: 616088 - DNA, 1027 bp, Homo sapiens
  misc_feature (127)..(127): n is a, c, g, or t
  misc_feature (806)..(806): n is a, c, g, or t
gttagtctcactatagctgattgattgctgggcgacatagatcgtgccaagtcctgagagcgaacgagaggtaacctagatgccctaccgtattcggatcgcgagcatgtgcctagccatagctggncttcctaatggtaacgcatgacaatgttaaaaatgggtgatcgttctcaacgcccacagtgagtattgtaagtaattctatcatttcaaaggtatttatccaatttgaatgaatcggacgagcatttcggacaaacctgaaataagatatccacacctaatgaagatcggctgacccactgaatatagagccggtatatacccacggcattacacataaaacaataaatgctatctgtaatctttatccctcacgcattatctaaacgtaggtctctgctcgtccttcattgcgaagtaaggtgtgaaggcccgaaatgcctcgagatcgtgggttgaaaccggttctgactcctcttcgtgagacagggctagactcaaatcaccaacacgctgaaaggactctcgcggttaagaatcttataatccgatgcatgtcctgcgctgtaaaacgattccctcaaagacaagggggcttgtttctttcccatacctaaattactttttaagagagagacactattcgaggtgtgtataataccaaaagaccaatgttttaatcaaaatttgactatatagaatgccccccggacatgaacaaataatatactgcgctaaactaacaccgatagaggaaggcgcaccccgatccgtaaccgggtgctgagaggtccggcaanaggttctccggtaagagtgccgagcggaccgcgaggtgccgccataagctttttaccttttcccataaagatttctttggtgtaccccccaatggtttccccattaaaggccattggtctgagcgacaagttccacctaaataaacttaacttttagaaccgagggcaattcgccgggaaaaagtccctttcggaaaagtataaccaaactcggtttgcct

SEQ ID NO: 616089 - DNA, 259 bp, Homo sapiens
tgttcactacgtgcagatcgccatgcgcgccagtgtggcgcccagcgagcttggcgacggaatcgccattggagacgtcagcttgtactaaatgcgcattgccgccgggcacgcgagtggcgctggctacacgctcaccggcctccgcattcaagttgttgacgaggacgcgtgtgccttcgcgggcaaaggtgttggcgataccctcgccaaagcctgaacccgcgcccgtgacgatggcaatcttgccgggtaccga

SEQ ID NO: 616090 - DNA, 257 bp, Homo sapiens
  misc_feature (43)..(43): n is a, c, g, or t
gtatgctgctgagtcagccatcacaaccaaatcccattagtanaaagacgaagaagtgaaaaaacaccatcctcttgctttaaggccgttttcagatattgacacgctatttctgcttacaacctgatatggtttgaatatttagcccctccaaatctcatgttgaaatgtaatctccattgttagaggtgggcctagtggaggtattggatcatgaggacagatccctcgtgaatggcttagcgccatggggatcc

SEQ ID NO: 616091 - DNA, 1019 bp, Homo sapiens
tcacttgttccttaattagggacctgtatgaatggctccactggtaaaagtaagagacagtgaaccctcgtggagccaacatacaggtccctaataaggaacgagtgatatgtaccttgcaggagggaccgggcgtacatgtgtatgagaggcgggccatatgggatttaaggagaagataccggaaaacacgcgcggctacgcatcagccgacgtaccaacacacatagagaaaacccaataccaaaatgaacataccagcgcaacggcatagcacaagacgagggaacaaaacagaccgtcaggccgcaaagcacgatactcgcgaaagcaacaagtcacatcacaaacccaagcaacaaaccacacacacaaaccacaacacacacacacaaaacaacacacaacaaacacaacagcaccacccacaaccaaaacagaacaagcaaaacaaaggccacaagaagacagaaagcacgatagaacataacaaagcatgcaacacaacaaagacagaccaccacaagaaacaagcgacagagacgcacaacaaaaggctgaatgaagcagaacacccaagcaacgaggacagaataagcagacagagaaagagcaaacagacaagacgaaacgagacgacaacagaaacaaacacatgaaaaaagaccaaagaaagaaaagaaacgaacaacgcagcacgaagggaagcgacagacgcacaaacacaagcggctgtgacagcaaaacggaaagagatcgagaagaagaaaaaacaaggaagaggaggccgcggacgcagcgcaggaagaccagagcgaggagacggcagagcacgaagcagcagccagaggaacgaaagaagcaaaacacatagagagagacaggacgagcagtacacagtagcacacagacacacgaatggagagagaagagcagagagcgaaggagagacacgacggacgacaagagcacgcagacagagagcgcagcatggaacacaaaacacgacaaaagagcga

SEQ ID NO: 616092 - DNA, 428 bp, Homo sapiens
ggccgggggacagattttgtgggtacccggtttacggggatctcgccgggtgtacgtttacctgggcgtgtgctgcaccctccgcttcctgtactaggcgacgagacccagaggctagaagttgaccatgtctattctcaagatccatgccagggagatctttgactatcgcgggaatcccactgtcgaggttgatctcttcacctcaaaaggtctcttcagagctggtgagcccagtggcgcttcaactggtatctatgaggccctagaactacggggcaatgattagactcgctatatcgggaagggtgactcaaaggctgaagagcacatgaagacaactattgcacctgccctgggtagctagaaactgaacctgacagaacgagagaagattgacacactgatgatcgagatggatggcgtct

SEQ ID NO: 616093 - DNA, 366 bp, Homo sapiens
gctggacgacaggtgcatgccaccatgcctggctcatttttctactttaggtagagatggaggggcgccatgtagctcaagctggtatcaacactcctggcctcaagcagtctgcttcccttggcctccccaagtgctgggaattacaggcgtgagcccctgcgccaggcgtatccccttcaattttgctgaaactatcagccattctccattttcggcatcatcatatttgctgcttccacctcctgggctgctatgcatgacagattcacagttggcagcctcagttgagctctcagtgttgactggaaattctttaaccttgttgtgatcccctttttttttccccacccatgcctccatctt

SEQ ID NO: 616094 - DNA, 93 bp, Homo sapiens
  misc_feature (44)..(44): n is a, c, g, or t
cagtgtcctgaacggtggactgtagactagatactatattaaanctgtactgttatttacagatgtaataaagcagtttgacatgacaaacac

SEQ ID NO: 616095 - DNA, 156 bp, Homo sapiens
agccaaccgaggaggggaggctctcttgtgctcacataatctgtgtcttgtgtcacacaatcatcattaccattagctatattgcagctcacacatatgtatgtatgcacttgaaacgacgttagttgacgcctgtcttggcagtttactgtatgt

SEQ ID NO: 616096 - DNA, 1363 bp, Homo sapiens
  misc_feature (665)..(665): n is a, c, g, or t
ttgtatgactcctattggtcagatgtctatctgtgtttagtcatgtagtgcaccctgtctttgtgtcgtacatctccctttcgtctgccacgattttgcttcactggtgggctctttttacgctgtttatgttgtcatttgaggtgtccctccaagtacaacgggcacaaaattggttgtgtatgaagctcacttgctcgtaccagttctgatggcccctctgttatgatggtgggtacaaccacacaaatctccccccccgagaattggttttagtatccccccttgttgacaaccccactgttctcccctctcagtaatcttttccaaattaggggctttttgtggtaccccctaaaccccgaaataatgttttgtacttctcttctattgtgaaaaatcccccaggggtctctaaagacctggagccgtttttaggagggggcctttctcgacaaaatttggaggtatacagcttggggcgttcacaaaattggtcccctggcctcttctcacgcgttaaattatttttttaaagggacccaactggggaaaccttctgggactttgtttgcgaattggcgtcacataaccctgttgaatcccccgccaccttttgggaaggctttaccggtggggcaagaatcaacattcttgaaggccancctgagtgttttgaaagaccctttgccttggccccaacacatggcgcacaacccccccgtcttctttatattaaaaaatactattaaaattatacccctggcaattggtatgcacatgcgcgccgtatataagtcccccaccttgcgtcacaggagaggctatataggcacttgagaggatttccgcttgggaccctcaaggagggttgcgagaggttgcactatttcacacctcgaggattcacttatccccctttcacttgtccacgccctcgggtggaacacgaggcccaagaaacttcttgtttctccacaaaaaaaaatataaagggaaaactttgctgaatggacactttgtgttaatataatcccctctcacgtagtttattccctccctctttccccaccacgcacgctgtttctttcctcgtcaaactaagaaaaggaggcacggacagtaaataaaaacacttttggtcgtgaactaaggccaccacccacaactcttaatcactctcccacttttcctctagacactttaaatcttcaaggcacggtaccctctgtgtaactcacgagaaatttgaagagagttaatttggttttcccaaaagcaccctgcgggttattgatttgttctttaccactattgttctcatatttctcaccactataataaatctctatgagagcttcca

SEQ ID NO: 616097 - DNA, 182 bp, Homo sapiens
tgtgactgctatatgtgtgtgtgtaccctctgggggacggcacgctctctgaccacttcccaaggctacatcttctggcatatatcagtgactacatctcatgcttctatcatcagtatcccaatttccaccctatattagggcgcgagcgtcacatgttgatgaccgtgatctgctgtgtg

SEQ ID NO: 616098 - DNA, 1041 bp, Homo sapiens
  misc_feature (151)..(151): n is a, c, g, or t
  misc_feature (670)..(670): n is a, c, g, or t
  misc_feature (672)..(672): n is a, c, g, or t
  misc_feature (680)..(680): n is a, c, g, or t
  misc_feature (697)..(697): n is a, c, g, or t
  misc_feature (797)..(797): n is a, c, g, or t
  misc_feature (811)..(811): n is a, c, g, or t
  misc_feature (834)..(834): n is a, c, g, or t
atcagtctgatcatcctcattggacgccacaggggcgagagggtggttcacctgaagcagctggctagtggcttattacttgtgagtgtggacccttctggatccttcgagatccgaggttgcctcgtacgaatgaacatcacccatgaanatttgtcgattgcctacgttcaagcctcaatagatcgatagtcgacgcagatgtagaataagtcccagaaatagtccttactggatggcttacattctaagaagcgaatcaatgctagcgcgaacggcctcagacacgcagagaagtggtgatgactccttcagaacgcacatttacacatatcaagcaacaacattatttatatagcccatatacaacgctagtgtgtgcgagctgcgcgcgccctatgtgagcagccactcgcaaggaaaaaggacgcttaattttggaatgacaacaccgctctgtttatgtatgagaggtcgcacgacgacaagttgtcgcgacttctcgaaggaaaaaggagtcatggttgagtacatccgctgttgaagaccaagaaagtgtaggctgaaaccccctatggggcggaatgggactcagtgtaggcgtgaacgtgtgccaaaaccgagaagtggtggagtgaaaccccaccgctctcaatggttgaataaacantnacttaccncatggtcgtgggagganccgccctccgccggggcactttcttcttcaacagtacgcctctttcacaacaagagagtgggctcacagtgccctcgcacgcaaagtacgggcgcgcgtntgtctaagcgaacntccgaagagaagacgcgcgcaanacgcgtgtgtcgccgcgggaactgtgggaaatgtaacgccctccgcgggggcgggtaggaataggcaactttacaacgggccaattttgccaactggtattccatcctcttggtaagacaattttcggtccaatcccaacttcccttaacacgccttgcccctttcaacaaacggtttataagttaaccaccttacaacgaactgag

SEQ ID NO: 616099 - DNA, 369 bp, Homo sapiens
  misc_feature (190)..(190): n is a, c, g, or t
aaggtttcgcaggttaggggggcgccgccttttttacccacaccagcaagggaggccactttgccaatttgtagggcacttcgccttttaagttaaggggccagccaggcccattccactccactcaggttatttagggccaaggcccctgccccctgtttgggttggtgagctgggagttcaggtgggntgttcccagcctccttcaggggcccccccaattttttggacctttttcagtgtgtggaagttcatgtgggcccctgagggctcatgcctgggaagtgttgtggtgggggctcccaggaggattggcccagagagccctgagatagcggggatcctgaaatggactgaataaaaaggggt

SEQ ID NO: 616100 - DNA, 944 bp, Homo sapiens
  misc_feature (18)..(18): n is a, c, g, or t
  misc_feature (207)..(207): n is a, c, g, or t
  misc_feature (217)..(217): n is a, c, g, or t
  misc_feature (239)..(239): n is a, c, g, or t
  misc_feature (260)..(260): n is a, c, g, or t
  misc_feature (272)..(272): n is a, c, g, or t
  misc_feature (306)..(306): n is a, c, g, or t
  misc_feature (391)..(391): n is a, c, g, or t
  misc_feature (399)..(399): n is a, c, g, or t
  misc_feature (468)..(468): n is a, c, g, or t
  misc_feature (471)..(471): n is a, c, g, or t
  misc_feature (490)..(490): n is a, c, g, or t
  misc_feature (498)..(498): n is a, c, g, or t
  misc_feature (501)..(502): n is a, c, g, or t
  misc_feature (555)..(557): n is a, c, g, or t
  misc_feature (566)..(566): n is a, c, g, or t
  misc_feature (578)..(578): n is a, c, g, or t
  misc_feature (580)..(580): n is a, c, g, or t
  misc_feature (586)..(586): n is a, c, g, or t
  misc_feature (588)..(589): n is a, c, g, or t
  misc_feature (598)..(598): n is a, c, g, or t
  misc_feature (600)..(600): n is a, c, g, or t
  misc_feature (604)..(604): n is a, c, g, or t
  misc_feature (614)..(614): n is a, c, g, or t
  misc_feature (627)..(627): n is a, c, g, or t
  misc_feature (785)..(785): n is a, c, g, or t
  misc_feature (790)..(790): n is a, c, g, or t
  misc_feature (871)..(871): n is a, c, g, or t
  misc_feature (882)..(882): n is a, c, g, or t
  misc_feature (934)..(934): n is a, c, g, or t
gggggaggaggaagaagnggcgaggcgggggcaggaaaggcggggaggggaacgagggcgcagccggggagagccgaccagcccaggaacggggaaggggcgcgggaggaagagaagaacaaaggggagggggaagaaaaggaggaacaggcgaaaaaccggaggacaagtcagccaaaggtgttaggaaagaacaaccgaggcacnatcgccacgngggcgaggggacaacgggcganagcgcacgcggtaggggggcnggccgggcgganacagccggtcatgcccgatagccccggagaagancccgggggcgccataagacagaggatgataatgcccggcaggaggcgcggaccacggccctgataacggtacatgccggtgcgcnctaaaggngtaaccaatcatccgatggggaaaagaaacggcacgtaaagggtaaggaggaatggtgtaggaactgtngcngtgggtagaagggcgagangggcaganganngccccagaatgcgggcgcgcagggactgccgctggtaaaccacgggcgggggnnngggggcggnatggagcgcgcncnccacgnanncgcgattgncnaaancttttttttnaacagcggggggnggggacggcccggggcccaccgccaggccaccgggggaagcccacaggcagccaagacccggaaaggaaaggaacacaaaggcggacgcgggaaggaggaggggcaaacagaacacgaaagagaaaaggggaagcggcaagggggggggaaggcagancccancagagcccgggccacccaggggccaagaagacaaggggcaaagcgacaaaggggcaagagaaaaaggggacgaggaaggcngggggaaaagncggaagagggaagggacaccgaaaagggcagggcggggcggaaaaggggcangggggacccc

SEQ ID NO: 616101 - DNA, 278 bp, Homo sapiens
tagaggaccccaaacaccgcattcttctcaagcttaccttctaacttctgcccaccagaaattaattgatgggcttttaaaataaattggttacccactaatttcctcattttttccagtgctattttatcccaatttttcggctttatattttttctatcttctatacttctccaatacttgtcttagcttattttttcattttctatctgaaagtcttgacgatattatcatcatctactcatgttgtctctatctcccaattttcttctaagttg

SEQ ID NO: 616102 - DNA, 113 bp, Homo sapiens
  misc_feature (97)..(97): n is a, c, g, or t
aaaatcattttactctgttcataggtcacatttaaatgggcagaactgcttccattacaaacacatatcgtgcaaagaaaaataggtgaagaattgngccataggaacacaat

SEQ ID NO: 616103 - DNA, 649 bp, Homo sapiens
  misc_feature (14)..(14): n is a, c, g, or t
  misc_feature (32)..(32): n is a, c, g, or t
  misc_feature (98)..(98): n is a, c, g, or t
  misc_feature (127)..(127): n is a, c, g, or t
  misc_feature (138)..(138): n is a, c, g, or t
taaaaatcgtaaanggccttcctttatttatnttggcaatatgaaataaaagctcggcacaaacacacgcacactcacaccagccggggaggagggancgggggacaaggtcactgggcaacagggnggggacctcanaccctcaaggccccgggggcgttgtggccggggaggccccgggtccccagagccggacgggccgtgttgaaagctgcagggtcggggcaaaggcacggcccccactcgggaccctcgggcacccccacccacgcgtgggccgtcccccagtgggtggaccgtgagcttaaaaggccggggtggtgggcggtggccgatctgtgcgcgtgcagcggtgggacagctggggccacggtggggtggcaacctttgggaccccttaaaccagctcccgcgtgggacggaacagggaaggctgtgcttgggagccgccagcccagtcggggtcctcactctctctggcctctcctccctctctctatttcatatataactatatggtgcctctctctccattctctctattggagctctcgggatcttattccaggaggcaacgctccaaaacttctcttctcagtggcagaggggggttgcgtggggcctgtctcccgggacccagctccggggg

SEQ ID NO: 616104 - DNA, 131 bp, Homo sapiens
aatttgttctccattgagtggggaagaggcattcctctctacgaggggggtcagacaaggttccatgtagcttatccctctagctgagcattctccataggtaggtgtctatgttgcacttcgagatgctt

SEQ ID NO: 616105 - DNA, 180 bp, Homo sapiens
agtaagtccctattgcagtcgttctcaagttcttcactccagttgaaagcattcggggatggagaatcactggctgatgattctgaattcacattaggctctgatattgaaattggacactttatccgatgagacgaatagtcccgcgtgttgtgctgtactcttgtatggaatggccat

SEQ ID NO: 616106 - DNA, 291 bp, Homo sapiens
gggcgttcttccttcatgtttctctgtcccaggccgaacgctcctcaacatctccctttcatggcttgattatttagcttccatggcttctttcagctggtggttctcggtcaggcgctctttcatctgctgcagccagctcctccggggtcaaacgtgtccaggttggggtggggcaggtgggggggtccatttcctgtgctttcagtggggcttgtcctctttttcagtgaggccagatgagcaggttgatggcagcgtcgcgcatgggtcacgagctcgcactcgtca

SEQ ID NO: 616107 - DNA, 171 bp, Homo sapiens
atcacttgaacctgggaggcagaggttgtggtgagccaagattgcgccattgcactgaagcctggggaacaagagtaaactccgtctaagagaaaaaaaaaaaagggggtaggtaccagcatggggcctaatggcctttaatcctagcattttggggaccaaggcaggaag

SEQ ID NO: 616108 - DNA, 533 bp, Homo sapiens
  misc_feature (483)..(483): n is a, c, g, or t
  misc_feature (515)..(515): n is a, c, g, or t
gttacccgacctacacagtgttaccgaacaccaccagggctacaccccagtgcagaatcatgctgacccaaccatagcgggccggcggattacgtagctgcatgtacttaatcccgtaagaactgtgcccaagactagcgctttacctatcgaattaaagcggaaaattttgctttgaaatatcgaaaaatacgataacgaggctaggcatcataaattaacaagggattaagactatccctgggaaacgtgacagaccgtcctgcatttaccgcgaatttccccacaatggcttgtgacccaagccaccattgcataggcttgcgcgattgtttcgcctgcgcccgccgcaggaccgcttcgaggagatcaccgatgggcttgaataaccagtggatgcaacgcgacctcgcggtgctgtggcatccctgcacccagatgaaagaccaccagcaattgcccctggtgcccatcaagcgcggngaaggcgtatggctggaagacttcgaaggcangcgctacctcgatgccgt

SEQ ID NO: 616109 - DNA, 1518 bp, Homo sapiens
  misc_feature (935)..(935): n is a, c, g, or t
  misc_feature (1366)..(1366): n is a, c, g, or t
gagcaaacctggccactgaggaggagctgagcgaggcaaaggatctcttgaaggaaaggtcgtaaggtggtaaagaaggtccccaaaggaacatccgagttaccaagcttgacatggcattttggcatggtggccagccacaagtggctgggtgacaggcagcatgcacatcatgcaatcatgcatgcatcataggaaccatgcacggattttcataggcaggcaggcaatcgtccaggcatgcagcagtcagtgcacagcacagcaggcacagcaatccatgcaacactcatgcacgtattgtgggcagctcctagtgcgatgcatgcatctcgtcatgcatcacacgaacactcagcactgtaagcaacagcctgaagggccaacacacatgattagcgcagcacaactcattaaacaccacaggcaaagcacctggcaacagcagcaatgctctatccaagcaatggcacaggtggggaacaacaggcctcgctgtgtgaaattcgtgcggcgttgccattcgaaaacatttccggaaattatccaggtagagatgtaccatgcaagcggcgcattagtacagggaaggccatttgcgcagggataagcaaattccagtacccaagttggagaggaacagttcccgagtaaccacgggggcaagaggacacaaccccagtgctcgccgattccgaaaacggacaacttctcaacttgggcctgttaccggccaggacgcttaagtcgtgtcccgagcgcgtattttacatacccaaggcgaaaacaaccggtgcgtgagtgaacgccagttaacgaagatcgaatagcactataatcgatgtccaataacgaatggtcggaagagtttctgttttctgggtagcacacacacgggacacacggcggaatctctttcgacaacaacagggcancacgacgtcatgcatgcgaaaagcacggaatatatcggcataccagacgcggacaccggtcgcattgtgtgaaacgtcggactatactaggacgacacatgtgcagcattaacctttggcgtttcacaagccaaacaaacagtatcgtcgcacaacgattagtggtttaccggtattactcgttaggacacacaacagatatcacacgccgccccgggtgttcccgacttcggcagggaagcatgtggcctatctcccgtcaacagtagcttggtacccatcattcccccaaaggactggacgcacaaaatcgcgggctaaaaacacacgatatcccgccccaccttttttggccgacaaaatttattcggcgcaacacttattcgagtaggtcacaccgttgctcgatacaaacacacgattctcaaaanacccccttacccccaacatcgtgcgtacaccagcccaacatggctaacaacgcaacatttgggtctcccacacaggcgaacacttattgggcaaaacacctaaagtcttgtgcgagtaagtgagggttcacgacagctcgacgcacagcatg

SEQ ID NO: 616110 - DNA, 893 bp, Homo sapiens
gccgtcgtgccgtcgtcgcgtttctctgccggtcgcgatggaacgccaggagatcggccgagctggtcattgacaatggctccggcatgtgcaaaggtggttgaccgtggggacgacgctccccgagccggggtcttccttccaggcgtcgggcggcctccaataccaccgatgggcggtcgataggttgggcgtgggcctaggaataggactcctactgtcgcgtgctgacgagggcctcgaggaggctaggcgtgggtaatcgttggacccttgagatgtactcgcctattagagctattggtgcgatcgtcaatccgaatcttgggtactgacgagtgtgacgcagagtaatcatggccatctcacaacgctttcttacgaaactgaagactgcggactgttggccccctggtagggtaggcgagcctcggagtggcgtgtctgaaacactgaaggggcactcgcccatggatagccctctaaaggggacccagccacgcaaggaggacaagcaatggagcgtccaggagtttatgatctattggagggaccccttatgcgttaacctaccactcgctgggcactatctcgcgttaccggtttgggggcccttgtcccgaaaggcccggggtgcccgtgcgatttcgcctgtacccttagcaggcgctcccttgtgggggccgacgagggccaaccttaagggttcaactattgggttccaattgggcgtagcgttccctggggccaagaaaccaggggaggtcttccaaaccactctattccaaccgggggtaggaccgcttcgagttgccgttaatccgtgcaggggggcggccttgtatctggcacccctttgcctcggccctatgcaggcctctatttcccttgtg

SEQ ID NO: 616111 - DNA, 999 bp, Homo sapiens
ggttgcctctcgggttcgtgcattaggccggaatatggcctgtgctcagtgcgtgaagagactggatccgccatgcgcgctgtctgaatacacccgcgctatcgcttgcgcttctcataggcgacagcgagttgctgttcacagtcctgtatacatagagcatctcacgtgagtaccttactatgagtgttccagtatgttaagcatgtatatccacgccaagaaagtattctgcctggcatattcgttgatgcctgattcttggggggatggttaccctaggtgggtactcaatgcattctacctctacctgtctcatgagtgcagggcagaagccgtagtgcccgaaggcagagagaatgatccccgttccaatcatcgtaagccctgcctgaggacaagctttgatggggggccccagcttcaaggctggggtgggaacagcacccccaaatgccagcctctcctttcttcccagtccaccagtatactgcggggcatttctggtctttgtccaacaggaaacccatttctggtgggatatgccttccagtgccacagggccactcaccccatgcatctctgtcctgcccgtcagtgctgggacggacagcaagggcaagcccagtgtctggcggataggtgggtgggaagagagagggagaaatgccgtctaagcattctgcttggggggatcccccacaaggaccctgggatactggctgggaaaactgttcctaagtaaaacctattgacctcgctcgcccgaccggctggaagccacgcatttccgtgaaggtggatggaagcgctttggcctcattttgaactgaagctgggtcaccggtctaagcctccagtgattctaaccagaccagcctggagaagaggtggttgcagctggtggacaaagaaggccgcgggctgaaccttccatatccacaggttcagcatcggacaccttttaccacacaaggcccgaggtataccctctgaggg

SEQ ID NO: 616112 - DNA, 165 bp, Homo sapiens
gtccgtggggctgcgggaaaacccggctctgacagagactggcgcaggctcagagaacaaactgtcaactccaggaggttttatctgcttcccccttttccaggaactgaagctgtgcccaccgtgtgctcacccctgtacccacccccgtgcccaccccggatg

SEQ ID NO: 616113 - DNA, 619 bp, Homo sapiens
ggccgggcgcggtggctcacgcctgtaatcccagctctcagggaggctaagaggcgggaggatagcttgagcccaggagttcgagacctgcctgggcaatatagcgagaccccgttctccagaaaaacgggaaaaaacaaacaaaaaaacaccaaaggaccgaaaaaaaaaaacaaaaaaaaaaaaaaaaaaacgtgtgttgggcgcggcgcgccgccgcgggcgccccgcgaaaaaggtttttataaacacccttgcggtggggggcgcgcggggcgccccatgggggtaagggcaacaagcggcggcccaaaagggcggggtttcctcagagaggggaaactccgccggggaccagagcgacacagagggggcgcggggaattctctctctccccaaatatataaaaaaaagcgcgcgcgcggggggggaagcccaccggaggcgggtcctcggggaaacacaaaaatcccgaaaggggaggaggagccttcgaaggggcggcaccccaaccgagggggaggactctcactccacccgggggggggaggctcgccaaagaaggagagagcgccgagaaataactctaaatattataaggcccgcggagtcggtggga

SEQ ID NO: 616114 - DNA, 96 bp, Homo sapiens
tatttataaaaaatatgagagactggcagctattaacattgcaactggaccatatttcccttatttaataagggaaatgactagttctagattcgc

SEQ ID NO: 616115 - DNA, 976 bp, Homo sapiens
tacccctccttagtttttatgccctcaaaaaccaatttaaacccccccccattgtaaagggggggcgggacaaaagacaaaaacgacacaaagccagctgggaacacaacccgttcgggtgcccccggtcatttttcgccctgatgtgggtttggtggttttcaactctgtgtcccgtgtgcgattggggtagagtgggggggtggcgcctccgggggggccatgtgccacgtgagccccctttgcgacgctcagcagggggacttggaaaaggcccttgcccgaacttgtggtcttgggggaccaggggctgatcccccacaaggttctgtgcaggcgggaagcggggggcttgcggcgaacacaggctcctccaccccaaggttgttccagagaagggtctccgagcgcagcgcccccaccgagtcgacggtgcggacccaccctgagcacgacccactgaacagtcctgacccgacacagagcgagacagaggggggaagcaacgaaagagcgtgctgcaacacacggaacgacgagtgctcccaccatcacgggcatcggggccacagagagtttgagacaaaccaactccccagcaaacaaaccagcgacgcgagcaaccaccaccatcaccaaccaagggggaaaaactcgatgtggacggccacaactccaaacaccagaggacgtgagaaccaccaagaaaagtgaccaaaaaagcaccagtgagatggaacccaccacgcggagggacacacgagggggaatccgaacagccacgtccacaccgcagcccctacagacgagcctcgaacacaccaccacagacgcgccacagacgcgaagcagtcacggcacagacccaggacaagagtgggactgtacaccagcggacacgcccatcgggatcggggagaacacagaacaacgacccacccgcgaacaccaccggcatgcaagaaggcacagacgt

SEQ ID NO: 616116 - DNA, 407 bp, Homo sapiens
gggccactgaggaaatcatccgcgccgccgcgccgcgctgcgcgcgcctcgccgggaggaagacagcgccgccggcaccgcagcgaccccgccgagagtccacccgccacaggcctcgggccaggcggcaggagctgcctcccgccagtgagtgtgacgtgaacagagaggtggagcgccttatacctgaaaggatgagaacccaaggggtcaaggagttagttggagccattgagaccagagtgcgaagacccagtttagtataccagaagtgggggatcgccggaaaaaaaataaactaggttaaaggaagggggagaccaaaggccggttggacgagaaagggggcattgatgtagggcacccgagaaccttgcgtggtaatggtggaatgagatagagcttaa

SEQ ID NO: 616117 - DNA, 730 bp, Homo sapiens
  misc_feature (24)..(24): n is a, c, g, or t
  misc_feature (90)..(90): n is a, c, g, or t
  misc_feature (100)..(100): n is a, c, g, or t
  misc_feature (111)..(111): n is a, c, g, or t
  misc_feature (121)..(121): n is a, c, g, or t
  misc_feature (142)..(142): n is a, c, g, or t
  misc_feature (155)..(155): n is a, c, g, or t
  misc_feature (166)..(167): n is a, c, g, or t
  misc_feature (192)..(195): n is a, c, g, or t
  misc_feature (198)..(198): n is a, c, g, or t
  misc_feature (205)..(206): n is a, c, g, or t
  misc_feature (237)..(237): n is a, c, g, or t
  misc_feature (240)..(241): n is a, c, g, or t
  misc_feature (266)..(266): n is a, c, g, or t
  misc_feature (288)..(288): n is a, c, g, or t
  misc_feature (301)..(301): n is a, c, g, or t
  misc_feature (304)..(304): n is a, c, g, or t
  misc_feature (306)..(306): n is a, c, g, or t
  misc_feature (328)..(328): n is a, c, g, or t
  misc_feature (330)..(331): n is a, c, g, or t
  misc_feature (339)..(339): n is a, c, g, or t
  misc_feature (365)..(365): n is a, c, g, or t
  misc_feature (427)..(427): n is a, c, g, or t
  misc_feature (439)..(439): n is a, c, g, or t
  misc_feature (499)..(499): n is a, c, g, or t
  misc_feature (574)..(574): n is a, c, g, or t
  misc_feature (663)..(663): n is a, c, g, or t
  misc_feature (685)..(685): n is a, c, g, or t
ctgcaggtaggccttgtactggtnggaggtgagggagagtgggtgggtgttggaaatgtgcaggtccacagtattctccagggaggaggnagcgcctagncgggggatttntaccaagggngtgagggacgtggggagaagnttgagcatcaggngggtgttggtnnaggggtggtggtggggggatgagtnnnncanagagaannagaggggatagggtggtgagggtgcggttcnttnngtgaaggtaatgagatgtggggggngaggagggtagaatgaaggggnccaggtgaaacangcntncttccttgtccttggggacctngnnatcagggncatgggcgctgttggggaggaggtgntgggtgagtgggcagtatgtgtggcagtgcgcagcgggtggggccagagggagtgctcgggncgggagagagcnagtggcccagccagggaggtcaggagatgggtcacgtagctcatcactcccctgtctgtnagggacatgccagggtctggcagtgtgactggccatccaggcagcgtcctgtctcccacttcggaccccaacagncgcaggcctccgggcaggagatggtctgctggaagacttggcggccccggtagaaggctgtcacctcgaactcccactcttcccccggnaacaacagccgcttcagtgggntctcagagggccccaggtttgggaagggagtgggattgtccaagc

SEQ ID NO: 616118 - DNA, 375 bp, Homo sapiens
gggaggcgaggtatgcaggtcaccggaggtcagcgagtcacagacagagacaagggcaacagggtgaaccagtcgtctacgaaaaatacaaaaatggggccgggcacggtggctcacgccaggtaatcccagcacatgggaaggccgaggcgtgcggatcatgtcaggagttctagaccagctgggccaatatggtgaaaccccgcctctactaaaaatacaaaaattatccgggcatggtggcatatgcctgtagtcccagctactcaagaggctgagggataagaatcgcttgaacctgggaggtggaggtggcagtgagccaagatcatgccactgcactctagccggggtgacagagtgagactctgtctc

SEQ ID NO: 616119 - DNA, 359 bp, Homo sapiens
ttagctaggttcctggagcctcagctgtcagtctagatccctggcatggcctgtgtgtttgtcagggcgtagtacagctgctggagcaaaatagggctgagaaatgcttcatagttaagatagcagttcagtctggtactatcctcactgtggtgtgaagtaggtatctctatgccagaggatagctatcctaccacgcggtgatacagggacccaggctccaactgtcttcttccccttctctatccagccagtattaagggaagcagaggtgagggaggagccctcccactcttagaagcctcagtccacctactgctcacaataagactagcgggggagactataaaatagtctgt

SEQ ID NO: 616120 - DNA, 461 bp, Homo sapiens
tgtatcgatgcacagaggctaagtcgtccctgctgagtaatgtggggagacagcaccaaagccaggcagttgtgctccagagaagcccttacccactcctacaaatgccctctcaggaagcagagggcagcgtgctcgggtttcacccatatatgcagcatctggctcagccacggaagggcacttaccaactatgaacacattacaatgtggcaacgtggatcaaagccagacttctctttcagaacctttaaaatgatcataggaaaactagcccaggaactgctggtggaaaatggcaatttaaaaactctactaccaagaatatcaaataccaacatagagaatcatataataaccctccacaaacttctcacccagctcaactagaaccaccatgcacatgtggccagaataatctgcccccagataattctgaaacaaattctagatatcacatc

SEQ ID NO: 616121 - DNA, 315 bp, Homo sapiens
ccctagcaaccttccttacaagcagcagataattaaaaaaaaagaaaaaaaaagggatgatgcttattagtaggcttagcaagggatatgaaatgcactctttaaaaccggacagattcttaaccaaaaagtttgaaagattggtcgtaacaacgtagcattcagtaacgtgggacaccctcccaacataagatcgagattcccacccgttttttaagcccacccttctctacccagtagcatttaaccgcatagctctctcacaaactaccttctctctcccaccagctctggggcccccttgaaacccagtta

SEQ ID NO: 616122 - DNA, 224 bp, Homo sapiens
caactcttgtgcctgaggcccggaaccgtttgcacccggcctgccccagtcaggccgttttaaaaaagcttttacttgggcgccccccgtctttggcgcgaaccctggaatgcatatactactttatgtgctgtgttttttatttttggaaacatttgattttttcccgtaagtccccatatacttctataaaagcgtgacttgtaataaagggttaatgaaga

SEQ ID NO: 616123 - DNA, 952 bp, Homo sapiens
actgttctactataggtggccaaaggaatgtcactcgggtccccttcatcgcgccctttatcgtaccccagggacattcccgcgggctacacaaaccccagtggggaaccacaagaggggtctttccacgggtgcggggtgaaccccaaataggtgcacccttggcatcgcatgtattttgggaccccctcttccggcacacaagcagcgtggttcttcgtcacgtcccctctcacgtgccccatttactgcgcgactgctcttctgggcccccccctgtacaggcgcgtaattccctgcttgatgctcgggttctatctcttctatggcctcctcttgttctccctcccagtgacccacccttccgaagatgcccacccctgtcggcgctgtgagcgttccaacaaaagcatatttataaggcggggcaaccaacaaaatcacggccccctcgcagagtgcggttctggaaaaaaaacagtgggcccaccggcggctggccccccccgcccatacggcaggctcacctgtgtgagcgcccacccccatgtcacgggcgttctctaataggcgcggcccgcggtgtaactcccccggcgaaagcaggatgacgcggggtaccgtccccccagcgtgattagtcccgtggctaccccccctctgcgggttgttatccaccacgccaagagagaccaggtacaaccccccggccggttggagaaacccccctcttctcgcacccacagaatcggacaaaagcctgggaaacttaccctctactccttgggtcagtgcttcactgaagttatctcttcctcctggtaaaaggagcagtggctcttcttatctatggtcttaccagaaaatcgtgtacagataacaaattctgcactcattcaagacttgcattgtaaaaaactcaaaacaaaccatataaagaacaaacaaaaca

SEQ ID NO: 616124 - DNA, 980 bp, Homo sapiens
ctgacctaaccagagtcatcatgcctcttgagcaaagaagtcagcactgcaagcctgaggaaggccttcaggcccaagaagaagacctgggcctggtgggtgcacaggctctccaagctgaggagcaggaggctgccttcttctcctctactctgaatgtgggcactctagaggagttgcctgctgctgagtcaccaagtcctccccagagtcctcaggaagagtccttctctcccactgccatggatgccatctttgggagcctatctgatgagggctctggcagccaagaaaaggaggggccaagtacctcgcctgacctgatagaccctgagtccttttcccaagatatactacatgacaagataattgatttggttcatttattgctccgcaagtatcgagtcaaggggctgatcacaaaggcagaaatgctggggagtgtcatcaaaaattatgaggactactttcctgagatatttagggaagcctctgtatgcatgcaactgctctttggcattgatgtgaaggaagtggaccccactagccactcctatgtccttgtcacctccctcaacctctcttatgatggcatacagtgtaatgagcagagcatgcccaagtctggcctcctgataatagtcctgggtgtaatcttcatggaggggaactgcatccctgaagaggttatgtgggaagtcctgagcattatgggggtgtatgctggaagggagcacttcctctttggggagcccaagaggctccttacccaaaattgggtgcaggaaaagtacctggtgtaccggcaggtgcccggcactgatcctgcatgctatgagttcctgtggggtccaagggcccacgctgagaccagcaagatgaaagttcttgagtacatagccaatgccaatgggagggatcccacttcttacccatccctgtatgaagatgctttgagagaggagggagagggagtctga

SEQ ID NO: 616125 - DNA, 258 bp, Homo sapiens
gacacgctgtgcggcattcaccgacagtctgtcatgcacccaccaggttggccatgtccttgtgttcctatcggatgctcccagtaaccagggggaccacccgagctaatcatgcgaatgtcctgttcgccagctagacagcgatagaagaaacgattcgtgcacttttaacctgctctcatcagggcccaagggctggctgggattattgtttttttttcccactaactgtgtttctgaccaaagtgaattggaggc

SEQ ID NO: 616126 - DNA, 427 bp, Homo sapiens
  misc_feature (63)..(63): n is a, c, g, or t
  misc_feature (145)..(145): n is a, c, g, or t
  misc_feature (218)..(218): n is a, c, g, or t
acaagattagggacactttttgaattattccttcaaatatgttttctgtgttgtatacttttnctcctctctcaggaatgccaataatttataggtttggtcactttacataatcccatatttctcaaagattttgtttattttncttaattctttttttaattttttgtcagacttggttattttgaaagactggtcttcaagctctgaggtttttncttctgcttggaacagtctattgataaaactttcaaatgtgttttgaaaatttcagttgagtttttgaattccagaagctctgattgatttcctaagatgtgtatctcttacttcatttcctgaattgatttagggagtttctttgtgttgactttcaacacactctagtgcctgtgttttaagggctgttgagcaagatggaagagtg

SEQ ID NO: 616127 - DNA, 100 bp, Homo sapiens
tcggtaccatatatacattagtaaagttagacccataaatgaaaaaaaaatctcaagtaagtgaaccagttaaatgtttttttgcattacgaactgtaag

SEQ ID NO: 616128 - DNA, 347 bp, Homo sapiens
  misc_feature (271)..(271): n is a, c, g, or t
  misc_feature (279)..(279): n is a, c, g, or t
tgctttaatgcagattagccattaattaaagtaatatgtatgtggaattgatcctgcattatgatggtagctgtgatttgctcattagtgatgcagttcttcctagtctcgatggtctttacattttggcatgattttgcagcggctggtaccggttgttcctttccatgtttagcgcttccttcaggagctcttttagggcaggcctggtggtgacaaaatctctcagcatttgcttgtctataaagtattttatttctccttcactaangcctctgntgcccttaacattttttccttcatttcaactttggtgaatctgacaattatgtgtcttggattgctct

SEQ ID NO: 616129 - DNA, 119 bp, Homo sapiens
  misc_feature (53)..(53): n is a, c, g, or t
  misc_feature (98)..(98): n is a, c, g, or t
  misc_feature (104)..(104): n is a, c, g, or t
acagtcaccaaccccaagaggaccgcccaggccggacgagcaagaaggcctgncaacagactgctgccgaaggtcaaccagaccggctcggtgaccgnatcganccaggcgtgcaaaca

SEQ ID NO: 616130 - DNA, 126 bp, Homo sapiens
gggagcgtggcacttacctttgtcccttgcttcattcttgttacaagataaaactgggcacaggtcttaagtacaatataaatgaacaaactttcttttatttccaaatccatgtcaaatatttta

SEQ ID NO: 616131 - DNA, 699 bp, Homo sapiens
  misc_feature (24)..(24): n is a, c, g, or t
  misc_feature (73)..(73): n is a, c, g, or t
  misc_feature (85)..(86): n is a, c, g, or t
  misc_feature (106)..(106): n is a, c, g, or t
  misc_feature (109)..(109): n is a, c, g, or t
  misc_feature (113)..(113): n is a, c, g, or t
  misc_feature (130)..(130): n is a, c, g, or t
  misc_feature (199)..(199): n is a, c, g, or t
  misc_feature (204)..(204): n is a, c, g, or t
  misc_feature (215)..(215): n is a, c, g, or t
  misc_feature (264)..(264): n is a, c, g, or t
  misc_feature (272)..(273): n is a, c, g, or t
  misc_feature (315)..(315): n is a, c, g, or t
  misc_feature (317)..(317): n is a, c, g, or t
  misc_feature (344)..(344): n is a, c, g, or t
  misc_feature (386)..(386): n is a, c, g, or t
  misc_feature (437)..(437): n is a, c, g, or t
  misc_feature (576)..(576): n is a, c, g, or t
  misc_feature (675)..(675): n is a, c, g, or t
tgtggacagggaaaacagcaagtncacaaagtgggacaggaccaaaggacaggctgggagttaataaagagtncacactgcttcnntgctttccccagttactganggntctnggccacctcctcctcancctcctcctcgaactcgccctcctcctcggctgttgcatcctggtactgctggtactcggacaccaggncattnatgttgctctnggcctcggtgaactccatctcgtccatgccctcgcccgtttacaagtanaggaaggnnaaacgccggaacatggccgtgaactgctcggagatgcgcttnancagctcctggatggccgttctgttgcnaattaaggtggcggacatttttagcccccgaggtgggatgtnacagaaagccgttttcacattgttggggatccactaaacaaaatagctgcngtttttgttttggacattaagcatttgctcatccacctccttcatggacatgcggcccctgaacacggcggcaaccgttagtagcggccatggcgggggtcgcaggcagccatcatgttcttggcatcaaacatctgcngggtgagctcgggcacggtcagcgcccggtactgctggctgccccggctggtcagttgggcaaagcgggcatgaagaagttcagccggggaaacgggancatgttcacagccagcctccgcag

SEQ ID NO: 616132 - DNA, 296 bp, Homo sapiens
ataggccataccatgcagatgcgagcggtgcaagggaaactgtgtacgaacgtacggaattcgcattatgaaagttcgacacaaagtgctgtttgggggtttttcggtgcaattgcgcagcaaaaaatgccaggcgaggcgtctagcgcactcggttggggcgcgactgttacttatctagatccacaccgtagaacggcgttacgccaaagggggtgatcttgaagtcacgcacttgcttgcgcatagggtgagagaacggtcgagttcgcaataggcgttataggtacttgttc

SEQ ID NO: 616133 - DNA, 157 bp, Homo sapiens
atttttggatcaagttgtttccagttaaaaagtactgatcaacaaactaatacacttaaaactgccacacgcaaaaaaagaccaccaaagatggtccacacaaacattctccgtttccattctgaagagttttacagatagcattagttactcatta

SEQ ID NO: 616134 - DNA, 140 bp, Homo sapiens
ttgctcccgggctctgtgctctatatcagagtgactcaggcaaaacatactgcttattgtaacactgctgacttggaagaagagattctccgttgcaaatgtggtaggaaccaggtttaagtgtgatgtctgggaagcca

SEQ ID NO: 616135 - DNA, 418 bp, Homo sapiens
ctcggctgagtctgcactggattcacattgtgcgtataccacgataatcttgccatctagtttcaacagctgtaaatcacagtctccttcgacagcatgctccttcagttgcctcacgctgcatcttgccacaggggtggggtccagcacatggcaggtggtttccagggtgtctatttcaatctcaatgcagctctgcggaaggctcctgaggcctcacctcttgttcatcaatatggttcacggtgtgtatgtatccccaaggaaggttctaattgatgtagtctatagcctccagagctgcttcctcagtatctggatcatcgcagttcggttgtctataaatcagccctaggccatgtgggcctgagtggcagcctcagatctgagcaagacagaggagcaggaacaggcactt

SEQ ID NO: 616136 - DNA, 517 bp, Homo sapiens
ttatgtacggggctcgtcctgcattccgtcgtactcaccgccctcatcacagtccgtcatctccaggcagtgttgtaccagtgcagggcctctagccagtcttggcaccttgccaggagatacagagggaaaggtggaggttaccatggcaacagggtggcaggaggagggccttccagcaggaggggcaagtcagggatcccagcagggccaccacctatggttcacgacctatcttgtccaaggccaatacatctatgaggcaccttcatactgtgatattcattcactcattcattcattcatttttgagacagagtcttgctctgttgcccaggctggagtgcagtggcatgatcatagctcactgcagcctctaactcctgggctcaggctatcctcccacctcagcctccggagtagctgggactgcaggtgtccatcaccacacccagctttttgtgtgtttattgtattttttaatttttgtgggtacatagtaagtgtgtatatgggt

SEQ ID NO: 616137 - DNA, 108 bp, Homo sapiens
agggtcggaggtagagacagatgttctgaactcccactgtgcttgagcccagcgcatgtatgcgtggagtgtatgcgcagagtagtgtctgttggactgcttcatcca

SEQ ID NO: 616138 - DNA, 130 bp, Homo sapiens
attctgcccactgcacgccagcctcccaaagtgcaggtattacagacgtgtagcaccgggtcctgaccgagggtgtcttttttctttttttactttttaataatggccattctggctgggcgtgcagtgg

SEQ ID NO: 616139 - DNA, 317 bp, Homo sapiens
tcgtgtgtcgtgcaggaatcgtcgtggtggtggatccctggccggctgagatcgactccctgtgggagatcagcaatgcagatagaatggccatacgatttgtgctctgggtgacggggccgcctggcctgtgcagggtctgatcctgccacgtttcggcctggagctctgaggagcgggatgcagctggttagcccaagcagcatcatggccctggcatggctgcctcgttagcccacctacacgacgacgacagaattcctggctggggactcctcctagatgtctgaccctgcacggacatgcaatgccttggc

SEQ ID NO: 616140 - DNA, 294 bp, Homo sapiens
gcttggggagagccccaccgttgataactagttagttaaccattgttgtactgaaccactattacgatactgctgtcatgaactcctgtgtgtaatatgttttccctacaaacgtagcacccttcagcaggaccctataaaactttcctccagcccttgcctctttgcaggtagccccttctctgctgagctgcccactgcaacatattttcacaatttctctaataaatctgctcttctttacctacaactatcttggtaaatggctttaccacctgcaaaactgaccctagg

SEQ ID NO: 616141 - DNA, 136 bp, Homo sapiens
ccagtagttccatgccacgtgtgtgctggcagtcactatactactaagcagtaccgctacctcaacaccaccttcttcgaccccgccggagaaggagaccctattttacaccaacccctgttcggttgagcggaga

SEQ ID NO: 616142 - DNA, 439 bp, Homo sapiens
  misc_feature (12)..(12): n is a, c, g, or t
  misc_feature (24)..(24): n is a, c, g, or t
  misc_feature (41)..(41): n is a, c, g, or t
  misc_feature (59)..(59): n is a, c, g, or t
  misc_feature (169)..(169): n is a, c, g, or t
  misc_feature (198)..(198): n is a, c, g, or t
aaaaaaagcccntttttaattgtntttgggaaaatccatcnccttcactgttagccaantggtagaattacctagcccatgattacctagcagatacagaagaacaggacagcatccatcagcccaacaggactgaagccaacattgtagaatagtgcctcaacaaggnccgggtgcggtggtcccatgccctttaanccccagcactttgggaagcagaggcgggcagattgcttgaggtcaggaattcaagagtagacctggataacatggtgaaaccctgtctctactgaaaatacaaaaattagccaggcatggtggcgcatgcctgtattcccagctgcttgggaagctgaggtaggagaatcgcttgaactgggaggcgaaggttgcagtaagccaagattgtgttacaaagcttgggttacagaataagact

SEQ ID NO: 616143 - DNA, 102 bp, Homo sapiens
cctggtatcccaccctgacaaactccttctcccatcttttccaactcttcctccaaactccagctataggaatcaccttttcatgtagacttccctgatgcc

SEQ ID NO: 616144 - DNA, 893 bp, Homo sapiens
ccttcatttggggtttcggttcccccccttccccttccccgggtctgagggtgacattgcaccggcccctcgtggggtcgcgtggtgcaccccgaggcggactccccagctgtgtcgccctcccatctgccgtgtctggttcgtgcccccaccctgcttcccacctgaccagccactgcgcgtgcgaatgcgagtagctctaccaggcgtgcagctctctgtctgcgtcggcccggctcttcgcgcttttcttgatcactgtggctggggacccgctagcgcgttatcatcctgtgtcgcagtggcatttagtctggctggtctccctgctccttggactctgtggtctggttcatctttggtccttgtgaccgaccggtcagatgcccggctccagtacggctcctgatttaggtgctgcgtgtctctgtccttctacaggaggtgttccgctttgcctactacaagctgcttcacgaaggcagatgaggggttagcatcgctgcagtgaggacggaagatcacccatgtccatccgccagatggcctatgtttctggtctctcctgcggcatcatcagtgggtgtcttctctgtgcatcaatactgttggcgtgaatgcacttgggccaggtgtggtccggaatcccatggtataactcacccctaataacttcctgacttcagactttctgaatagcaggcaattatcctggtccataacgttttgggaaatgtgtactgggtgccggtgacaggcaacagtctctgggccttggccctgtggtggaaagaccacatgcttggcgcttactccgaaacccggttacgcaacctaggccataacatccagggcagggcggcccaaacggagccccaaaacaggcgtttaat

SEQ ID NO: 616145 - DNA, 391 bp, Homo sapiens
cttttggggtctttgctcatgttcttatttttgcaaaataaacatggaggacacgaacaattaagagtacatttatcatattagaaataattcattgacatatgctctccataccatatgcttctctgattgttgcaaacattgaatattagtactgaagaatttatgaattttggctgtaaaatgcagtttttctagaacgattctttctttgaacagataaaataatgcagtattcagagccttctgacttatttcggaagagtgctaagtataggatctctttaagtatagattcgcattctcaagactgcacaagaggtaaaacctgctgaaaagcactacaacatgtcacaaagttacccaaatgatgaacaggatgcttgggatg

SEQ ID NO: 616146 - DNA, 100 bp, Homo sapiens
aggatattaagaaaaactttgaacagctttaaaaaagatatgctttaagatactagagagataacaaggtattaaagaactagtgggcctgtagcttcaa

SEQ ID NO: 616147 - DNA, 526 bp, Homo sapiens
  misc_feature (23)..(23): n is a, c, g, or t
  misc_feature (55)..(55): n is a, c, g, or t
  misc_feature (68)..(68): n is a, c, g, or t
aagtttctaagttttaggaatgngtttaaaagcgccagtaaccatggatcattgnaaagaaggcactnttcagccttggtatctagctgaaccaaatgacacctttcaaaccattgccagtagttgttgaaaaagcgtctattgtcaaagtttctttctccttaaaggacggtgttccaatgaattcagtagagcccactttcctccactgtggaggaagaatccctaagagatactcaaatgattaaattaaaattggatcatcaaactcaagagaggcataaacttagacacagtcttgcatttttgtctttcctgaactcttctgccattttcctccttcactcgtcctgaaaatctgcaagttacataataaaactttagatatttgtctgacaaagtgtaattactcaactgaataaatgactgagaacaagttacaaaaggaatcatgaatcctggtaaacaataaagaagattcagacactgagggaaaaaaataaagctttttacttaaataatgaaa

SEQ ID NO: 616148 - DNA, 255 bp, Homo sapiens
taacatgtcaatctggccgttcacatgtgtgggacatggtgtttgtggccttgactgacatgaagctgttgtgtgaggttcgcttatcaagtaatgatttagtgatcaaattgtgcggtactttgtgcattctggattttaaaagttttttattgtgcattatatcaaatctcccactgtgtgagtggaaattaagactttatatagtttttgtatgttgtaatagttcctcaaataaatctctcctataatcca

SEQ ID NO: 616149 - DNA, 572 bp, Homo sapiens
actctttcttcatcttttttcttatgatttaaaacttactagttagaaacttttttgtttgcctcaccatgcttcagtgaaatttcgcttctatgatttgttagaaaaacaaacaagctaacacacagacgcacgcacacgcactgtatattcttccaccctgtagtataaagaaaacattttcatacatccgaaaatgaaatatgttcacctttttccttccaaaaggtagactgtgagtgatgtccgtgtggtgtcctttgcccccatttcttactgtcagttctatggtataaaatcctcagtatttgcttaatctttttgtcattgaggaaaactaacagtaaaatgagttagactgaaaatgccctttacagttcagcattcagagtgaggaacgaggtctatatgcagttaaggtgagaacggaaccgtagcttccgccgggcggacttgtgagcacgtcagaaagcgaatgtgcctcactagaacgcacggtggcggcaggagtggccggcagtgcccggcacgcagtcacgggaggtgggtcgagtcctggtttatgtgagtcg

SEQ ID NO: 616150 - DNA, 573 bp, Homo sapiens
agagcatacccctactctctagttcccaaacttcaaagggcaaaaaaattgttctcccctggttcacacttccctgtctcaactgggtggtggcttttgaactgggattattaaaattcccagaatcctttctatggtgaggtatcctttctggttaagcctccagaatttgctccagaggtgaggagaagggaattcccttgagctgtgcatttgggaagggagcaaggaagtcaggggttagggaaggcacttcagccattgccttgaattagtatcctatcacatagagttgaagggggaaagccaggatttggcaaggatgagcttttcaaccttggcttctcagtaaaatctctggacagtttttttttttttaaaaaaaaaaaccaaaaaccagaatttaaacaatccgtaaaaccataccccgatcttatcaccataggtgcccgtgtaattgtggtcaataaggaccccggcttcgaaaatttttaaagcttccccggtgaacattaaaatgcacgccgagtttggaaacttggcctctcaaaaagggggaatccctgttctggg

SEQ ID NO: 616151 - DNA, 187 bp, Homo sapiens
  misc_feature (115)..(115): n is a, c, g, or t
gaccggtctggtaagagcggtctggcctacaccacagtccacagcattgctggatccgagccacgtctgtgacctacaccacagctgacggcaatgacagatccttcacccactngattgaagccagggatccaaccagcatcctcatggatactaatcaggcttgttaccattgagccacaatggg

SEQ ID NO: 616152 - DNA, 1163 bp, Homo sapiens
gttcatgcctgtgctgtgcttgagtggcctcttacatgcgtcctgtcagccatcacgtgagcactttcaggcagtcctgacaggttcagcgagcggtactgacgtccaggcattcgctgtggactgatggagctagattgatgactagcttaatttcactactcgcggcaaccgttgtcatcatggcattggctcacgagtcgcaacgaatgggagccaggtgtcccttggtggtagtaagaagaaggcgatagagaagagcattgcatgtagtcttagttcagcccaagaacgtgagagccaaagtctggtcgcacgaggcagtgtgtggtgcatgagactgtcgcctcgaagaggtcctgtgtacatttccatgatcacgtcgctggactcgactcgagatggcgcatcttctgtgctgcagtctgatgggcgacgtgcgaggcatttcctgtggcccagagtgatagcgtgttaccacagttctgagcgtccacaagacgcagtcccagtgggactccgctgagcggcgcagaggagacctgaagccctaagcatgaacaacccctgtgtgccaatcatggatcgccgtcacgtgccagatagtgtccgtcaacacggggcactagcactgggcccaggaacacgacgaaagcgcttggttagacttccttagcggtaagtgacgtcctggcgtcgcaccttgtcgggccttgactaggcaaagatcaggttttcagccgtggagggcttagcacgttggcaagtgcaaggggtattgaagcgcagtgatcccggagtatagtcctatagagggcgcccagggataagtagccttccctcgaccaggttctcgttgctgatcgggcacttgccaaacgtacgactcgcactttggccctaaaaaagaaggttggtataaagaaggctttggtcaaggacactggttccaagctcctttgctccagcgaattctcttcacaagcaggagctccaccgaccccgggaattcagttctggttcccttagtgtcaccccttggggacttgtttgctttcccaggcgaaaccggggggctctgggccttcctgtcttggcgcccaggctgtggtagcgcccactgcgatttcaacgcaagtcgggtgccggtacttccttggccg

SEQ ID NO: 616153 - DNA, 2102 bp, Homo sapiens
tttatgtattcttactctagttgtttattaagaatgacaagcacgtcttttcaacatgttagtgaacaacgtctctttattttggggaggagcccggcgggacagtagaagtaaacccttgcctgttaattgaactggccgaggtcctgcggggagtgtggggtgggacgtgaagtggcagctcctcagtgacaaggccactatgtgctatacgcatgcgctgtttcttcagcgccagctccgcccccgccgcagcgaggcgggtaggttccgcccgcgcgcactacgccctgacgtcagcgtcgcgcgcagcgcagtgacgaaatcggctggtttatattggcgcggcccagacggcagaggtctctgcggcgcggtcctcggagacacgcggcggtgtcctgtgttggccatggccgactacctgattagtgggggcacgtcctacgtgccagacgacggactcacagcacagcagctcttcaactgcggagacggcctcacctacaatgactttctcattctccctgggtacatcgacttcactgcagaccaggtggacctgacttctgctctgaccaagaaaatcactcttaagaccccactggtttcctctcccatggacacagtcacagaggctgggatggccatagcaatggcgcttacaggcggtattggcttcatccaccacaactgtacacctgaattccaggccaatgaagttcggaaagtgaagaaatatgaacagggattcatcacagaccctgtggtcctcagccccaaggatcgcgtgcgggatgtttttgaggccaaggcccggcatggtttctgcggtatcccaatcacagacacaggccggatggggagccgcttggtgggcatcatctcctccagggacattgattttctcaaagaggaggaacatgactgtttcttggaagagataatgacaaagagggaagacttggtggtagcccctgcaggcatcacactgaaggaggcaaatgaaattctgcagcgcagcaagaagggaaagttgcccattgtaaatgaagatgatgagcttgtggccatcattgcccggacagacctgaagaagaatcgggactacccactagcctccaaagatgccaagaaacagctgctgtgtggggcagccattggcactcatgaggatgacaagtataggctggacttgctcgcccaggctggtgtggatgtagtggttttggactcttcccagggaaattccatcttccagatcaatatgatcaagtacatcaaagacaaataccctaatctccaagtcattggaggcaatgtggtcactgctgcccaggccaagaacctcattgatgcaggtgtggatgccctgcgggtgggcatgggaagtggctccatctgcattacgcaggaagtgctggcctgtgggcggccccaagcaacagcagtgtacaaggtgtcagagtatgcacggcgctttggtgttccggtcattgctgatggaggaatccaaaatgtgggtcatattgcgaaagccttggcccttggggcctccacagtcatgatgggctctctcctggctgccaccactgaggcccctggtgaatacttcttttccgatgggatccggctaaagaaatatcgcggtatgggttctctcgatgccatggacaagcacctcagcagccagaacagatatttcagtgaagctgacaaaatcaaagtggcccagggagtgtctggtgctgtgcaggacaaagggtcaatccacaaatttgtcccttacctgattgctggcatccaacactcatgccaggacattggtgccaagagcttgacccaagtccgagccatgatgtactctggggagcttaagtttgagaagagaacgtcctcagcccaggtggaaggtggcgtccatagcctccattcgtaagtcaccctgtccttggtggggcctctgccatacctcatgcctcctttctcctgccctcacctcacaggtggtccttctgcctgcaggtatgagaagcggcttttctgaaaagggatccagcacacctcctcggtttttttttcaataaaagtttagaaagaaa

SEQ ID NO: 616154 - DNA, 1953 bp, Homo sapiens
tttatgtattcttactctagttgtttattaagaatgacaagcacgtcttttcaacatgttagtgaacaacgtctctttattttggggaggagcccggcgggacagtagaagtaaacccttgcctgttaattgaactggccgaggtcctgcggggagtgtggggtgggacgtgaagtggcagctcctcagtgacaaggccactatgtgctatacgcatgcgctgtttcttcagcgccagctccgcccccgccgcagcgaggcgggtaggttccgcccgcgcgcactacgccctgacgtcagcgtcgcgcgcagcgcagtgacgaaatcggctggtttatattggcgcggcccagacggcagaggtctctgcggcgcggtcctcggagacacgcggcggtgtcctgtgttggccatggccgactacctgattagtgggggcacgtcctacgtgccagacgacggactcacagcacagcagctcttcaactgcggagacggcctcacctacaatgactttctcattctccctgggtacatcgacttcactgcagaccaggtggacctgacttctgctctgaccaagaaaatcactcttaagaccccactggtttcctctcccatggacacagtcacagaggctgggatggccatagcaatggcgcttacaggcggtattggcttcatccaccacaactgtacacctgaattccaggccaatgaagttcggaaagtgaagaaatatgaacagggattcatcacagaccctgtggtcctcagccccaaggatcgcgtgcgggatgtttttgaggccaaggcccggcatggtttctgcggtatcccaatcacagacacaggccggatggggagccgcttggtgggcatcatctcctccagggacattgattttctcaaagaggaggaacatgactgtttcttggaagagataatgacaaagagggaagacttggtggtagcccctgcaggcatcacactgaaggaggcaaatgaaattctgcagcgcagcaagaagggaaagttgcccattgtaaatgaagatgatgagcttgtggccatcattgcccggacagacctgaagaagaatcgggactacccactagcctccaaagatgccaagaaacagctgctgtgtggggcagccattggcactcatgaggatgacaagtataggctggacttgctcgcccaggctggtgtggatgtagtggttttggactcttcccagggaaattccatcttccagatcaatatgatcaagtacatcaaagacaaataccctaatctccaagtcattggaggcaatgtggtcactgctgcccaggccaagaacctcattgatgcaggtgtggatgccctgcgggtgggcatgggaagtggctccatctgcattacgcaggaagtgctggcctgtgggcggccccaagcaacagcagtgtacaaggtgtcagagtatgcacggcgctttggtgttccggtcattgctgatggaggaatccaaaatgtgggtcatattgcgaaagccttggcccttggggcctccacagtcatgatgggctctctcctggctgccaccactgaggcccctggtgaatacttcttttccgatgggatccggctaaagaaatatcgcggtatgggttctctcgatgccatggacaagcacctcagcagccagaacagatatttcagtgaagctgacaaaatcaaagtggcccagggagtgtctggtgctgtgcaggacaaagggtcaatccacaaatttgtcccttacctgattgctggcatccaacactcatgccaggacattggtgccaagagcttgacccaagtccgagccatgatgtactctggggagcttaagtttgagaagagaacgtcctcagcccaggtggaaggaggctatggacgccaccttccgtcgacgcggccgcgaat

SEQ ID NO: 616155 - DNA, 392 bp, Homo sapiens
tggatacggcatgcgcacatgctggctactttaagagtaagatcttttaaaacagactgtggtgctaagctcaaacgtgtttttggttgtttccttaaaaaagaaaacagtgatagtgcccaacactatgaatgtatttaacaccattgaattgtactcttaaaagtgattaagatggtaaattttatgtgtatttaccacagtaaaagtgggggaaaatgcaaaaaagaaagtgaagaacttatttccatattagtcttgtgtttaaaatgtaaattggatagaacttataaaagtcatcggggttttaaatgtaacttactttaagtggctatttaaaagctagtgtgcattttaataggtgttggggatagaataggctagtgtcatga

SEQ ID NO: 616156 - DNA, 735 bp, Homo sapiens
agcggtctggctggcctgaactcctgacctcaggtgatccacctgcctcagcctcccaaagtgctgcgattacaggcgtgagccactgtactcggcctgctgtaggctttatatacactgtgcacttaggctacataaacttataaaaaactttcttcaataataaattaactttagcttcctgtaacttttttaccttataaacgttttaattttttaaactgtataacccttttatcataacacttaccttaaaacacaaatacatgtacaactgtacacaaatattttatattttcataagcttttttctatttccacaatttttaattttttaatttctttttttacttcttaagtttttttgttaaaaactaagacacaaacacattagcctccatctacactgtcttccacctccacagcttgtcccactgcaagggccttcaggggcaataacaggcatggagttgccatctcctatgagagcaacaccttcttgtgcaataccttctggaggacctgcctgaggctgttcacagtcaactttttctttaagtagaaggagtacactctaaaataaaaagtgtagtaaagccataaaccgtagtcattattatcaagtattatgaactgtacataattgtatgtgctatacctttatatgactgacagcacagtaggtttgtttacaccagcatcaccacaaacacgtgagtaatgcattgcactgtg

SEQ ID NO: 616157 - DNA, 2182 bp, Homo sapiens
tttatgtattcttactctagttgtttattaagaatgacaagcacgtcttttcaacatgttagtgaacaacgtctctttattttggggaggagcccggcgggacagtagaagtaaacccttgcctgttaattgaactggccgaggtcctgcggggagtgtggggtgggacgtgaagtggcagctcctcagtgacaaggccactatgtgctatacgcatgcgctgtttcttcagcgccagctccgcccccgccgcagcgaggcgggtaggttccgcccgcgcgcactacgccctgacgtcagcgtcgcgcgcagcgcagtgacgaaatcggctggtttatattggcgcggcccagacggcagaggtctctgcggcgcggtcctcggagacacgcggcggtgtcctgtgttggccatggccgactacctgattagtgggggcacgtcctacgtgccagacgacggactcacagcacagcagctcttcaactgcggagacggcctcacctacaatgactttctcattctccctgggtacatcgacttcactgcagaccaggtggacctgacttctgctctgaccaagaaaatcactcttaagaccccactggtttcctctcccatggacacagtcacagaggctgggatggccatagcaatggcgcttacaggcggtattggcttcatccaccacaactgtacacctgaattccaggccaatgaagttcggaaagtgaagaaatatgaacagggattcatcacagaccctgtggtcctcagccccaaggatcgcgtgcgggatgtttttgaggccaaggcccggcatggtttctgcggtatcccaatcacagacacaggccggatggggagccgcttggtgggcatcatctcctccagggacattgattttctcaaagaggaggaacatgactgtttcttggaagagataatgacaaagagggaagacttggtggtagcccctgcaggcatcacactgaaggaggcaaatgaaattctgcagcgcagcaagaagggaaagttgcccattgtaaatgaagatgatgagcttgtggccatcattgcccggacagacctgaagaagaatcgggactacccactagcctccaaagatgccaagaaacagctgctgtgtggggcagccattggcactcatgaggatgacaagtataggctggacttgctcgcccaggctggtgtggatgtagtggttttggactcttcccagggaaattccatcttccagatcaatatgatcaagtacatcaaagacaaataccctaatctccaagtcattggaggcaatgtggtcactgctgcccaggccaagaacctcattgatgcaggtgtggatgccctgcgggtgggcatgggaagtggctccatctgcattacgcaggaagtgctggcctgtgggcggccccaagcaacagcagtgtacaaggtgtcagagtatgcacggcgctttggtgttccggtcattgctgatggaggaatccaaaatgtgggtcatattgcgaaagccttggcccttggggcctccacagtcatgatgggctctctcctggctgccaccactgaggcccctggtgaatacttcttttccgatgggatccggctaaagaaatatcgcggtatgggttctctcgatgccatggacaagcacctcagcagccagaacagatatttcagtgaagctgacaaaatcaaagtggcccagggagtgtctggtgctgtgcaggacaaagggtcaatccacaaatttgtcccttacctgattgctggcatccaacactcatgccaggacattggtgccaagagcttgacccaagtccggtgagcttggggagctgggacatgggtagaggggctggtccagggccagctacccacatttgacctctgcccttcttcagagccatgatgtactctggggagcttaagtttgagaagagaacgtcctcagcccaggtggaaggtggcgtccatagcctccattcgtaagtcaccctgtccttggtggggcctctgccatacctcatgcctcctttctcctgccctcacctcacaggtggtccttctgcctgcaggtatgagaagcggcttttctgaaaagggatccagcacacctcctcggtttttttttcaataaaagtttagaaagaaa

SEQ ID NO: 616158 - DNA, 175 bp, Homo sapiens
  misc_feature (57)..(57): n is a, c, g, or t
tcctctggcagctgcatgagtagcgactttgtgtctcctccaggctgttctccaggnatgctttcatgctgagctgggactgcagctcaatctccaggttctgcgtgtgcgccggagtccgagatctcgctcttgccgctctgaaccagctcgctgttggtggccacctcgcggt

SEQ ID NO: 616159 - DNA, 2092 bp, Homo sapiens
tttatgtattcttactctagttgtttattaagaatgacaagcacgtcttttcaacatgttagtgaacaacgtctctttattttggggaggagcccggcgggacagtagaagtaaacccttgcctgttaattgaactggccgaggtcctgcggggagtgtggggtgggacgtgaagtggcagctcctcagtgacaaggccactatgtgctatacgcatgcgctgtttcttcagcgccagctccgcccccgccgcagcgaggcgggtaggttccgcccgcgcgcactacgccctgacgtcagcgtcgcgcgcagcgcagtgacgaaatcggctggtttatattggcgcggcccagacggcagaggtctctgcggcgcggtcctcggagacacgcggcggtgtcctgtgttggccatggccgactacctgattagtgggggcacgtcctacgtgccagacgacggactcacagcacagcagctcttcaactgcggagacggcctcacctacaatgactttctcattctccctgggtacatcgacttcactgcagaccaggtggacctgacttctgctctgaccaagaaaatcactcttaagaccccactggtttcctctcccatggacacagtcacagaggctgggatggccatagcaatggcgcttacaggcggtattggcttcatccaccacaactgtacacctgaattccaggccaatgaagttcggaaagtgaagaaatatgaacagggattcatcacagaccctgtggtcctcagccccaaggatcgcgtgcgggatgtttttgaggccaaggcccggcatggtttctgcggtatcccaatcacagacacaggccggatggggagccgcttggtgggcatcatctcctccagggacattgattttctcaaagaggaggaacatgactgtttcttggaagagataatgacaaagagggaagacttggtggtagcccctgcaggcatcacactgaaggaggcaaatgaaattctgcagcgcagcaagaagggaaagttgcccattgtaaatgaagatgatgagcttgtggccatcattgcccggacagacctgaagaagaatcgggactacccactagcctccaaagatgccaagaaacagctgctgtgtggggcagccattggcactcatgaggatgacaagtataggctggacttgctcgcccaggctggtgtggatgtagtggttttggactcttcccagggaaattccatcttccagatcaatatgatcaagtacatcaaagacaaataccctaatctccaagtcattggaggcaatgtggtcactgctgcccaggccaagaacctcattgatgcaggtgtggatgccctgcgggtgggcatgggaagtggctccatctgcattacgcaggaagtgctggcctgtgggcggccccaagcaacagcagtgtacaaggtgtcagagtatgcacggcgctttggtgttccggtcattgctgatggaggaatccaaaatgtgggtcatattgcgaaagccttggcccttggggcctccacagtcatgatgggctctctcctggctgccaccactgaggcccctggtgaatacttcttttccgatgggatccggctaaagaaatatcgcggtatgggttctctcgatgccatggacaagcacctcagcagccagaacagatatttcagtgaagctgacaaaatcaaagtggcccagggagtgtctggtgctgtgcaggacaaagggtcaatccacaaatttgtcccttacctgattgctggcatccaacactcatgccaggacattggtgccaagagcttgacccaagtccggtgagcttggggagctgggacatgggtagaggggctggtccagggccagctacccacatttgacctctgcccttcttcagagccatgatgtactctggggagcttaagtttgagaagagaacgtcctcagcccaggtggaaggtggcgtccatagcctccattcgtatgagaagcggcttttctgaaaagggatccagcacacctcctcggtttttttttcaataaaagtttagaaagaaa

SEQ ID NO: 616160 - DNA, 2429 bp, Homo sapiens
tttatgtattcttactctagttgtttattaagaatgacaagcacgtcttttcaacatgttagtgaacaacgtctctttattttggggaggagcccggcgggacagtagaagtaaacccttgcctgttaattgaactggccgaggtcctgcggggagtgtggggtgggacgtgaagtggcagctcctcagtgacaaggccactatgtgctatacgcatgcgctgtttcttcagcgccagctccgcccccgccgcagcgaggcgggtaggttccgcccgcgcgcactacgccctgacgtcagcgtcgcgcgcagcgcagtgacgaaatcggctggtttatattggcgcggcccagacggcagaggtctctgcggcgcggtcctcggagacacgcggcggtgtcctgtgttggccatggccgactacctgattagtgggggcacgtcctacgtgccagacgacggactcacagcacagcagctcttcaactgcggagacggcctcacctacaatgactttctcattctccctgggtacatcgacttcactgcagaccaggtggacctgacttctgctctgaccaagaaaatcactcttaagaccccactggtttcctctcccatggacacagtcacagaggctgggatggccatagcaatggcgcttacaggcggtattggcttcatccaccacaactgtacacctgaattccaggccaatgaagttcggaaagtgaagaaatatgaacagggattcatcacagaccctgtggtcctcagccccaaggatcgcgtgcgggatgtttttgaggccaaggcccggcatggtttctgcggtatcccaatcacagacacaggccggatggggagccgcttggtgggcatcatctcctccagggacattgattttctcaaagaggaggaacatgactgtttcttggaagagataatgacaaagagggaagacttggtggtagcccctgcaggcatcacactgaaggaggcaaatgaaattctgcagcgcagcaagaagggaaagttgcccattgtaaatgaagatgatgagcttgtggccatcattgcccggacagacctgaagaagaatcgggactacccactagcctccaaagatgccaagaaacagctgctgtgtggggcagccattggcactcatgaggatgacaagtataggctggacttgctcgcccaggctggtgtggatgtagtggttttggactcttcccagggaaattccatcttccagatcaatatgatcaagtacatcaaagacaaataccctaatctccaagtcattggaggcaatgtggtcactgctgcccaggccaagaacctcattgatgcaggtgtggatgccctgcgggtgggcatgggaagtggctccatctgcattacgcaggaagtgctggcctgtgggcggccccaagcaacagcagtgtacaaggtgtcagagtatgcacggcgctttggtgttccggtcattgctgatggaggaatccaaaatgtgggtcatattgcgaaagccttggcccttggggcctccacagtcatgatgggctctctcctggctgccaccactgaggcccctggtgaatacttcttttccgatgggatccggctaaagaaatatcgcggtatgggttctctcgatgccatggacaagcacctcagcagccagaacagatatttcagtgaagctgacaaaatcaaagtggcccagggagtgtctggtgctgtgcaggacaaagggtcaatccacaaatttgtcccttacctgattgctggcatccaacactcatgccaggacattggtgccaagagcttgacccaagtccggtgagcttggggagctgggacatgggtagaggggctggtccagggccagctacccacatttgacctctgcccttcttcagagccatgatgtactctggggagcttaagtttgagaagagaacgtcctcagcccaggtggaaggtggcgtccatagcctccattcgtaagtcaccctgtccttggtggggcctctgccatacctcatgcctcctttctcctgccctcacctcacaggtggtccttctgcctgcaggtatgagaagcggcttttctgaaaagggatccagcacacctcctcggtttttttttcaataaaagtttagaaagaaaaaaaaaaaaaacaaaaacaaaaaaaaaaaaaaaaaaacacaacaaaaacacaacaaaacaaaacaaaaaaaaaaccacggggagcccccagcggggggggcacacagcgctacacgggcgccgacgcggtaaaacagtggtctcagaagaccacctttgtgtacgaacgagtggatatagcggggtcccaaaaagggggacaacatatgtcagaaagcgcagaccgctatagcccacagcaaaaggt

SEQ ID NO: 616161 - DNA, 89 bp, Homo sapiens
gaaccctcttttcatagccttccctggctctaattttcagattttttttttaataaacatgaatccattttgaatctgaaaaaaaaaaa

SEQ ID NO: 616162 - DNA, 2084 bp, Homo sapiens
tttatgtattcttactctagttgtttattaagaatgacaagcacgtcttttcaacatgttagtgaacaacgtctctttattttggggaggagcccggcgggacagtagaagtaaacccttgcctgttaattgaactggccgaggtcctgcggggagtgtggggtgggacgtgaagtggcagctcctcagtgacaaggccactatgtgctatacgcatgcgctgtttcttcagcgccagctccgcccccgccgcagcgaggcgggtaggttccgcccgcgcgcactacgccctgacgtcagcgtcgcgcgcagcgcagtgacgaaatcggctggtttatattggcgcggcccagacggcagaggtctctgcggcgcggtcctcggagacacgcggcggtgtcctgtgttggccatggccgactacctgattagtgggggcacgtcctacgtgccagacgacggactcacagcacagcagctcttcaactgcggagacggcctcacctacaatgactttctcattctccctgggtacatcgacttcactgcagaccaggtggacctgacttctgctctgaccaagaaaatcactcttaagaccccactggtttcctctcccatggacacagtcacagaggctgggatggccatagcaatggcgcttacaggcggtattggcttcatccaccacaactgtacacctgaattccaggccaatgaagttcggaaagtgaagaaatatgaacagggattcatcacagaccctgtggtcctcagccccaaggatcgcgtgcgggatgtttttgaggccaaggcccggcatggtttctgcggtatcccaatcacagacacaggccggatggggagccgcttggtgggcatcatctcctccagggacattgattttctcaaagaggaggaacatgactgtttcttggaagagataatgacaaagagggaagacttggtggtagcccctgcaggcatcacactgaaggaggcaaatgaaattctgcagcgcagcaagaagggaaagttgcccattgtaaatgaagatgatgagcttgtggccatcattgcccggacagacctgaagaagaatcgggactacccactagcctccaaagatgccaagaaacagctgctgtgtggggcagccattggcactcatgaggatgacaagtataggctggacttgctcgcccaggctggtgtggatgtagtggttttggactcttcccagggaaattccatcttccagatcaatatgatcaagtacatcaaagacaaataccctaatctccaagtcattggaggcaatgtggtcactgctgcccaggccaagaacctcattgatgcaggtgtggatgccctgcgggtgggcatgggaagtggctccatctgcattacgcaggaagtggctcccaagatccctccagacataaagtcccacagccccaaatgcccttctactgtcacgggttgctatatgctggcctgtgggcggccccaagcaacagcagtgtacaaggtgtcagagtatgcacggcgctttggtgttccggtcattgctgatggaggaatccaaaatgtgggtcatattgcgaaagccttggcccttggggcctccacagtcatgatgggctctctcctggctgccaccactgaggcccctggtgaatacttcttttccgatgggatccggctaaagaaatatcgcggtatgggttctctcgatgccatggacaagcacctcagcagccagaacagatatttcagtgaagctgacaaaatcaaagtggcccagggagtgtctggtgctgtgcaggacaaagggtcaatccacaaatttgtcccttacctgattgctggcatccaacactcatgccaggacattggtgccaagagcttgacccaagtccgagccatgatgtactctggggagcttaagtttgagaagagaacgtcctcagcccaggtggaaggtggcgtccatagcctccattcgtatgagaagcggcttttctgaaaagggatccagcacacctcctcggtttttttttcaataaaagtttagaaagaaa

SEQ ID NO: 616163 - DNA, 518 bp, Homo sapiens
atccctgagcttagccgcacctggagagcaacgcgataggcagacgtaaagcgagaatcgcgagaaaggaggtgctaggcccagaggcaccagccagcgcaggccaacgggagatagtagcaaggggtgaggggatctgtatctaggcctgtcagtgatacgcagtgccagagtgcatggaacaggaagctcaaatcaaggagaggttaaatgacttaagtcacacaaatctcagtcacgggcagcttaggcaaataaatgcaaatatcttctggtcagtgttttttctactaatcacaactgctctcacatgcttactggctctaacacattcaatcatatatgcagacctgtctctcatctctccagcaatccaagagcattccctaacatgcttgaactaaagacacctaaagctagcaatttcacatcagagctgaaacattccacacagtccttagcataaacaaatatttgactatcttctattttacagacttgctatacttttaaattta

SEQ ID NO: 616164 - DNA, 2002 bp, Homo sapiens
tttatgtattcttactctagttgtttattaagaatgacaagcacgtcttttcaacatgttagtgaacaacgtctctttattttggggaggagcccggcgggacagtagaagtaaacccttgcctgttaattgaactggccgaggtcctgcggggagtgtggggtgggacgtgaagtggcagctcctcagtgacaaggccactatgtgctatacgcatgcgctgtttcttcagcgccagctccgcccccgccgcagcgaggcgggtaggttccgcccgcgcgcactacgccctgacgtcagcgtcgcgcgcagcgcagtgacgaaatcggctggtttatattggcgcggcccagacggcagaggtctctgcggcgcggtcctcggagacacgcggcggtgtcctgtgttggccatggccgactacctgattagtgggggcacgtcctacgtgccagacgacggactcacagcacagcagctcttcaactgcggagacggcctcacctacaatgactttctcattctccctgggtacatcgacttcactgcagaccaggtggacctgacttctgctctgaccaagaaaatcactcttaagaccccactggtttcctctcccatggacacagtcacagaggctgggatggccatagcaatggcgcttacaggcggtattggcttcatccaccacaactgtacacctgaattccaggccaatgaagttcggaaagtgaagaaatatgaacagggattcatcacagaccctgtggtcctcagccccaaggatcgcgtgcgggatgtttttgaggccaaggcccggcatggtttctgcggtatcccaatcacagacacaggccggatggggagccgcttggtgggcatcatctcctccagggacattgattttctcaaagaggaggaacatgactgtttcttggaagagataatgacaaagagggaagacttggtggtagcccctgcaggcatcacactgaaggaggcaaatgaaattctgcagcgcagcaagaagggaaagttgcccattgtaaatgaagatgatgagcttgtggccatcattgcccggacagacctgaagaagaatcgggactacccactagcctccaaagatgccaagaaacagctgctgtgtggggcagccattggcactcatgaggatgacaagtataggctggacttgctcgcccaggctggtgtggatgtagtggttttggactcttcccagggaaattccatcttccagatcaatatgatcaagtacatcaaagacaaataccctaatctccaagtcattggaggcaatgtggtcactgctgcccaggccaagaacctcattgatgcaggtgtggatgccctgcgggtgggcatgggaagtggctccatctgcattacgcaggaagtgctggcctgtgggcggccccaagcaacagcagtgtacaaggtgtcagagtatgcacggcgcttgtcattgctgatggaggaatccaaaatgtgggtcatattgcgaaagccttggcccttggggcctccacagtcatgatgggctctctcctggctgccaccactgaggcccctggtgaatacttcttttccgatgggatccggctaaagaaatatcgcggtatgggttctctcgatgccatggacaagcacctcagcagccagaacagatatttcagtgaagctgacaaaatcaaagtggcccagggagtgtctggtgctgtgcaggacaaagggtcaatccacaaatttgtcccttacctgattgctggcatccaacactcatgccaggacattggtgccaagagcttgacccaagtccgagccatgatgtactctggggagcttaagtttgagaagagaacgtcctcagcccaggtggaaggtggcgtccatagcctccattcgtatgagaagcggcttttctgaaaagggatccagcacacctcctcggtttttttttcaataaaagtttagaaagaaa

SEQ ID NO: 616165 - DNA, 534 bp, Homo sapiens
tggattcgtaatttaattccccacccccaagacgggccaccggggattacctgaaaattggaacacctattggctggaatacaaatgcaccaaatgaggatttaaaaactttccgcgcgaaaggtataccacaacgaaaaaagaatttcctagcattttcccccaaggtttaaatttcccgccacacacactttccaaaggaccgttacaaatccaactttatgtcagtttcttggctttggtggagagggaatccactactttgctcatgttctgaattgtttccaaagcagcttcgtaagttttatttactgggggttcatcgaaaataatcaggacaccctccccctggcccaaaatcccatgaaaatttttgtaaagaatcattggggaaaatttctttccacgtcggccttggagagtttgaagaaataaaatatgggtcaaccggcctttggaaaaaggctcaatggctctggacaaaattttgttcaataagatattatacaacttggcccaagggggggttgtaag

SEQ ID NO: 616166 - DNA, 1933 bp, Homo sapiens
tttatgtattcttactctagttgtttattaagaatgacaagcacgtcttttcaacatgttagtgaacaacgtctctttattttggggaggagcccggcgggacagtagaagtaaacccttgcctgttaattgaactggccgaggtcctgcggggagtgtggggtgggacgtgaagtggcagctcctcagtgacaaggccactatgtgctatacgcatgcgctgtttcttcagcgccagctccgcccccgccgcagcgaggcgggtaggttccgcccgcgcgcactacgccctgacgtcagcgtcgcgcgcagcgcagtgacgaaatcggctggtttatattggcgcggcccagacggcagaggtctctgcggcgcggtcctcggagacacgcggcggtgtcctgtgttggccatggccgactacctgattagtgggggcacgtcctacgtgccagacgacggactcacagcacagcagctcttcaactgcggagacggcctcacctacaatgactttctcattctccctgggtacatcgacttcactgcagaccaggtggacctgacttctgctctgaccaagaaaatcactcttaagaccccactggtttcctctcccatggacacagtcacagaggctgggatggccatagcaatggcgcttacaggcggtattggcttcatccaccacaactgtacacctgaattccaggccaatgaagttcggaaagtgaagaaatatgaacagggattcatcacagaccctgtggtcctcagccccaaggatcgcgtgcgggatgtttttgaggccaaggcccggcatggtttctgcggtatcccaatcacagacacaggccggatggggagccgcttggtgggcatcatctcctccagggacattgattttctcaaagaggaggaacatgactgtttcttggaagagataatgacaaagagggaagacttggtggtagcccctgcaggcatcacactgaaggaggcaaatgaaattctgcagcgcagcaagaagggaaagttgcccattgtaaatgaagatgatgagcttgtggccatcattgcccggacagacctgaagaagaatcgggactacccactagcctccaaagatgccaagaaacagctgctgtgtggggcagccattggcactcatgaggatgacaagtataggctggacttgctcgcccaggctggtgtggatgtagtggttttggactcttcccagggaaattccatcttccagatcaatatgatcaagtacatcaaagacaaataccctaatctccaagtcattggaggcaatgtggtcactgctgcccaggccaagaacctcattgatgcaggtgtggatgccctgcgggtgggcatgggaagtggctccatctgcattacgcaggaagtgctggcctgtgggcggccccaagcaacagcagtgtacaaggtgtcagagtatgcacggcgcttgtcatgatgggctctctcctggctgccaccactgaggcccctggtgaatacttcttttccgatgggatccggctaaagaaatatcgcggtatgggttctctcgatgccatggacaagcacctcagcagccagaacagatatttcagtgaagctgacaaaatcaaagtggcccagggagtgtctggtgctgtgcaggacaaagggtcaatccacaaatttgtcccttacctgattgctggcatccaacactcatgccaggacattggtgccaagagcttgacccaagtccgagccatgatgtactctggggagcttaagtttgagaagagaacgtcctcagcccaggtggaaggtggcgtccatagcctccattcgtatgagaagcggcttttctgaaaagggatccagcacacctcctcggtttttttttcaataaaagtttagaaagaaa

SEQ ID NO: 616167 - DNA, 716 bp, Homo sapiens
  misc_feature (2)..(2): n is a, c, g, or t
  misc_feature (65)..(65): n is a, c, g, or t
  misc_feature (102)..(102): n is a, c, g, or t
  misc_feature (115)..(115): n is a, c, g, or t
  misc_feature (122)..(122): n is a, c, g, or t
  misc_feature (124)..(124): n is a, c, g, or t
  misc_feature (134)..(134): n is a, c, g, or t
  misc_feature (138)..(138): n is a, c, g, or t
  misc_feature (142)..(142): n is a, c, g, or t
  misc_feature (154)..(154): n is a, c, g, or t
  misc_feature (162)..(166): n is a, c, g, or t
  misc_feature (200)..(200): n is a, c, g, or t
  misc_feature (233)..(233): n is a, c, g, or t
  misc_feature (276)..(277): n is a, c, g, or t
  misc_feature (279)..(280): n is a, c, g, or t
  misc_feature (290)..(290): n is a, c, g, or t
  misc_feature (303)..(303): n is a, c, g, or t
  misc_feature (311)..(313): n is a, c, g, or t
  misc_feature (327)..(327): n is a, c, g, or t
  misc_feature (333)..(333): n is a, c, g, or t
  misc_feature (346)..(346): n is a, c, g, or t
anaaaaacttgaagagaggagaagaaagaagtcaccgaagaggagaaaaccaaggaggagaagcnagaagccaaaggggtcaaggaggaggtcaagttggcntgaatggacatcnccagatntngaaaaaagangagnacancacgtatcttcnccaacccnnnnnattttatattttctatttctctgtgtatttatanaaaaatttattaaatataaatatccccaggganagaaaccaaggccccgagctcagggcagctgtgctgggtgagnncnnccaggagccnccttgccacccantcttcccnnncttaactttgaacnaaaaanggaacaaaaaaanggtgaaagggatacttttatgcaaccataagacaaactcctgaaatgccaagtgcctgcttagtagctttggaaaggtgcccttattgaacattctagaaggggtggctgggtcttcaaggatctcctgtttttttcaggctcctaaagtaacatcagccatttttagattggttctgttttcgtaccttcccactggcctcaagtgagccaagaaacactgcctgccctctgtctgtcttttccaaattcgccaggggagggtggcaaggaaaatttcccctttttgaaaaaactatttcacatttttgtgaagcctctttggaaataaaatggggccactttctaatatccctcccttgaaaaaaaaa

SEQ ID NO: 616168 - DNA, 896 bp, Homo sapiens
taaaccaggtggtcctttgaaaggtaaagacaaaaagtgcttttggtgtgtgtcatgggtttaggcacagtttctgtttaaaagccggcaaaagggataatttggtgacttggaggttgtacgctggctattttggtggacaagggaatgttcaaggtggcttccatggctggattttcccttattgtaatccagtattttaaagtcaagagagtcagtggtcattttaacaagtcttgagccaccctactgttgtaaccatctctatttattatcaagggcttataattaagagtctaaaaagagaagttttctaaaggccggttcatggggacaaaactcttctcagaaagcttttgcaatgggacaggaggataagggtcagcaagggtccttggggaaactaaaaggtggctcgattttttgttttcaccatgttctggtgtatctcaataagggttcccaaaaacaaaaccaacacaacaacactacacacaacaatattttttgtgggggcggctcttcggcgcctcagaaaaaaactgtttttgtaaaaccaacttgtggtgtgggggcgcgcgggggcccccaatttgtgcgttattggacaacactgtcacacaaacagtgtggtttcccccacaaagaggaacacaccctggcgggcgccgagaagagacaacatcgggcggctgggggggcttctctccaccacaagaaattaaaaaaacacgcgccgcgggcggcgcacacacagcagggcttcgctgacaaaacaaccctcccaacacaggggggcggctcctcgacggaggacgcgcaacactaaggggggcgcctatcaacagcagagggggggtcctaacagcgaggccgctccagcattcaacaatacg

SEQ ID NO: 616169 - DNA, 283 bp, Homo sapiens
  misc_feature (7)..(7): n is a, c, g, or t
  misc_feature (9)..(9): n is a, c, g, or t
  misc_feature (39)..(39): n is a, c, g, or t
  misc_feature (65)..(65): n is a, c, g, or t
  misc_feature (201)..(201): n is a, c, g, or t
cagtctngnacgttcacactgttgtgtaccccgttcggntatgcggtacagctggggacccgggnctagttgactttagccactggctggtttgcctggctggctccctgacaggctgccacactttcctgcactgctctagaaaatttgaacagaagcaagacaggcgacgtagaatccaggctctctgcctcctggggnctgtaaccgcataccgacgggatccgtgcacgttaacgattactaggactatgcagaaaccagtccgacgaaaatctcaggc

SEQ ID NO: 616170 - DNA, 794 bp, Homo sapiens
ccctgacagaggccacatgaagtcctagttggcacttggcagtggcacatgctttatgttaggcgtcccgttgtgatggctgagaatcatgaaacgacagatcctcgcgctagcctctgtggctcaagtttctggacaccaagtctctgggaactagtggttgtgattatctaaatgtgcactgtggcaccttaccgttgtctctcacgtgacgttagagaaacgctaaaagcgcatgttaaaaaagttacgcaacgagttttgctatcagtacctttcccgataactgggcgttgccatgccgttgctctgaatgaaatcatctatactctgacttgggcgcaacgaactgcactttctttgtgacattctgaatccagtgtattgtgcgtttctctggcccgtgaacacctcggcgaattctgttagggatagcggatgagtgggacgagaagcccatttgagaaggagggagccaggccctgtcatgcgcaggttttccactcatctgaggaagagccagggctctgaattctagcctaacactcatctctggactgtggagcttgggaagaaatgaccatgatttacagatatgtatcttggtacatactatgtgtgatacttgaaaagataaaagggactgccagcccctaactgaaatatgaagctgttttatcgctatttttcctacgtcctgtctcctcccttccacctttctcctagcattgtgatgatctagtaggacgtctgtcaacagacacatgcctcctaaacataaggtctaatagttg

SEQ ID NO: 616171 - DNA, 149 bp, Homo sapiens
atgcttcgtgaagatcggcgatattggactggacgctcggcgtgtgcagtatggttcttcggcgtgtgcatgcacacgccgagtatccatactgcacacgccgaagatccacactaggacaggtcagtccgtaatcgccgatcttcacg

SEQ ID NO: 616172 - DNA, 2152 bp, Homo sapiens
tttatgtattcttactctagttgtttattaagaatgacaagcacgtcttttcaacatgttagtgaacaacgtctctttattttggggaggagcccggcgggacagtagaagtaaacccttgcctgttaattgaactggccgaggtcctgcggggagtgtggggtgggacgtgaagtggcagctcctcagtgacaaggccactatgtgctatacgcatgcgctgtttcttcagcgccagctccgcccccgccgcagcgaggcgggtaggttccgcccgcgcgcactacgccctgacgtcagcgtcgcgcgcagcgcagtgacgaaatcggctggtttatattggcgcggcccagacggcagaggtctctgcggcgcggtcctcggagacacgcggcggtgtcctgtgttggccatggccgactacctgattagtgggggcacgtcctacgtgccagacgacggactcacagcacagcagctcttcaactgcggagacggcctcacctacaatgactttctcattctccctgggtacatcgacttcactgcagaccaggtggacctgacttctgctctgaccaagaaaatcactcttaagaccccactggtttcctctcccatggacacagtcacagaggctgggatggccatagcaatggcgcttacaggcggtattggcttcatccaccacaactgtacacctgaattccaggccaatgaagttcggaaagtgaagaaatatgaacagggattcatcacagaccctgtggtcctcagccccaaggatcgcgtgcgggatgtttttgaggccaaggcccggcatggtttctgcggtatcccaatcacagacacaggccggatggggagccgcttggtgggcatcatctcctccagggacattgattttctcaaagaggaggaacatgactgtttcttggaagagataatgacaaagagggaagacttggtggtagcccctgcaggcatcacactgaaggaggcaaatgaaattctgcagcgcagcaagaagggaaagttgcccattgtaaatgaagatgatgagcttgtggccatcattgcccggacagacctgaagaagaatcgggactacccactagcctccaaagatgccaagaaacagctgctgtgtggggcagccattggcactcatgaggatgacaagtataggctggacttgctcgcccaggctggtgtggatgtagtggttttggactcttcccagggaaattccatcttccagatcaatatgatcaagtacatcaaagacaaataccctaatctccaagtcattggaggcaatgtggtcactgctgcccaggccaagaacctcattgatgcaggtgtggatgccctgcgggtgggcatgggaagtggctccatctgcattacgcaggaagtgctggcctgtgggcggccccaagcaacagcagtgtacaaggtgtcagagtatgcacggcgctttggtgttccggtcattgctgatggaggaatccaaaatgtgggtcatattgcgaaagccttggcccttggggcctccacagtcatgatgggctctctcctggctgccaccactgaggccctggtgaatacttcttttccgatgggatccggctaaagaaatatcgcggtatgggttctctcgatgccatggacaagcacctcagcagccagaacagatatttcagtgaagctgacaaaatcaaagtggcccagggagtgtctggtgaatacttcttttccgatgggatccggctaaagaaatatcgcggtatgggttctctcgatgccatggacaagcacctcagcagccagaacagatatttcagtgaagctgacaaaatcaaagtggcccagggagtgtctggtgctgtgcaggacaaagggtcaatccacaaatttgtcccttacctgattgctggcatccaacactcatgccaggacattggtgccaagagcttgacccaagtccgagccatgatgtactctggggagcttaagtttgagaagagaacgtcctcagcccaggtggaaggtggcgtccatagcctccattcgtatgagaagcggcttttctgaaaagggatccagcacacctcctcggtttttttttcaataaaagtttagaaagaaa

SEQ ID NO: 616173 - DNA, 378 bp, Homo sapiens
tgtgaattctcgtgggcgtgcaaaggacccacagctgccgaaacactggggaggagtgaagctgaatggcagcaggtcctgggtgcaagaatcacaaaaccacagtcatggggccacgtggcgttggctttccgaccgatgagcagaaccagagcgtccagaaacaggcgcccacacgcggaccactgacttgatgaaggctcaaagaccatttaatggcatcttttaataaggatactgtaaatgataggatcactcatacaccagaaagtgaacttggagtcaaaaaaattaaccccagatgcgtcagggatctgaaggtaaagcccagaaccgcagagctagggcgaagcctttgtgacagtgggccgggccaca

SEQ ID NO: 616174 - DNA, 1690 bp, Homo sapiens
  misc_feature (1564)..(1564): n is a, c, g, or t
  misc_feature (1574)..(1574): n is a, c, g, or t
tttatgtattcttactctagttgtttattaagaatgacaagcacgtcttttcaacatgttagtgaacaacgtctctttattttggggaggagcccggcgggacagtagaagtaaacccttgcctgttaattgaactggccgaggtcctgcggggagtgtggggtgggacgtgaagtggcagctcctcagtgacaaggccactatgtgctatacgcatgcgctgtttcttcagcgccagctccgcccccgccgcagcgaggcgggtaggttccgcccgcgcgcactacgccctgacgtcagcgtcgcgcgcagcgcagtgacgaaatcggctggtttatattggcgcggcccagacggcagaggtctctgcggcgcggtcctcggagacacgcggcggtgtcctgtgttggccatggccgactacctgattagtgggggcacgtcctacgtgccagacgacggactcacagcacagcagctcttcaactgcggagacggcctcacctacaatgactttctcattctccctgggtacatcgacttcactgcagaccaggtggacctgacttctgctctgaccaagaaaatcactcttaagaccccactggtttcctctcccatggacacagtcacagaggctgggatggccatagcaatggcgcttacaggcggtattggcttcatccaccacaactgtacacctgaattccaggccaatgaagttcggaaagtgaagaaatatgaacagggattcatcacagaccctgtggtcctcagccccaaggatcgcgtgcgggatgtttttgaggccaaggcccggcatggtttctgcggtatcccaatcacagacacaggccggatggggagccgcttggtgggcatcatctcctccagggacattgattttctcaaagaggaggaacatgactgtttcttggaagagataatgacaaagagggaagacttggtggtagcccctgcaggcatcacactgaaggaggcaaatgaaattctgcagcgcagcaagaagggaaagttgcccattgtaaatgaagatgatgagcttgtggccatcattgcccggacagacctgaagaagaatcgggactacccactagcctccaaagatgccaagaaacagctgctgtgtggggcagccattggcactcatgaggatgacaagtataggctggacttgctcgcccaggctggtgtggatgtagtggttttggactcttcccagggaaattccatcttccagatcaatatgatcaagtacatcaaagacaaataccctaatctccaagtcattggaggcaatgtggtcactgctgcccaggccaagaacctcattgatgcaggtgtggatgccctgcgggtgggcatgggaagtggctccatctgcattacgcaggaagtgctggcctgtgggcggccccaagcaacagcagtgtacaaggtgtcagagtatgcacggcgcttggtgttccggtcattgctgatggggaatccaaatgtggtcaattgcgaaacctggcctgggctccagcagtggcttcggtgnccctgggccngggatttttcggggcggggaaatggggggtttccgccgggccccccaatttttggacagcgcgcgggggtggggcgcaccctttgttcctgcgggccctctgttgttatctcgtac

SEQ ID NO: 616175 - DNA, 596 bp, Homo sapiens
cggtgtcaaaataactaattgggtgatgggccacatagttttgaagaacgtagagtctagcccatagagtgactggaatattcagttcacttaccaccataccagcagatatagcagagcaatttcaatttggcagtaaaccagggtaaatcatacccagacttgtttgatagcaaaagactaaaataactcaagtgccataccaacagtggacaggttcacttaacatataatgcatttgcttaactgcagtccatgcaagtgtgtcacgaggaggctctgtatgtgctcgatagggaaagttctccaagatagattgtcatgaaaagggcaagtgcagaaaagtctacacagtctgctaccttgcacaggaatgaaaaacaagtgaagaaaacgcgtttcattcattatagactgatcatccagcaggactgagtacgtgggcagatccacaagaaaaggaacatagtgcaccgacctggatcagtcgcagggatggatctctttatatataatctctttacttcacatagtttgaaccctgtgcttgttctacttatttgaaaaattaaacagatttggtattcagaagaact

SEQ ID NO: 616176 - DNA, 842 bp, Homo sapiens
ggctagagttagtggtttggctccagtttgtgccttcagctacttcactgcttccctaacctggccttgtcagtcagcctcagtctaccatctacccaggtctgcataccccgcaaaacagtatacactttgacgcttttctgcaagcacaattaccttttgggggagcccttctcttaaagcagagtaggttaatgtttgtgaatgaaacggaactttggcaggctgaggtgtctcaggtcatcagcttacgttgtctactgtgtgactaattgaggcaaaagatgtcctttttaatagtattttctcatcacttttgcctgggtgccctttaggaatgttatttttggcatacaacttgagtttcacttaaatttataattctttctgttcattcctactgctctgttgcccagatgtggattttgctttgtctcacaagcgttgctgaaacactggtagaaaggtggacgacggattggttgtgattagtttgatcttcacagtacagaaattcaaaaggtcaataagctcaacaagattgctgtctcactgatgatcagagttgccattaaaatcgtatttcccgcacatcaggctggaaaaaagaataaacatgatcattttagttgtcctcaaaggagaagaggacaggtattctgtaatcaggtgttgtgagtgtaactagttaaactctttgggaggtgggcagttttaccttggcaatatctatcaatgcattgcctgtcatcatataattccatttccaattcaatttatcctgtgggggtagaggcccaagtgagcagaggatgttctttccagcattgtttataatcgca

SEQ ID NO: 616177 - DNA, 405 bp, Homo sapiens
gctggtttttcctaggttataattgtagaacaaagattattataatattggaatagagttatgctataaactaatgattagtaatatatataatcatagctataatctatttctagtataactattcttattctatgtattttctttattatactggaacagcttgtgcccatcggtctcttgccttgtgcagctggtatggcttgtcctcccacatggacactgctgggacattagtctgttaatacttgaactcattgttttaagacttattttcactaagagcttcacctatttttaactcgcactagtggccatgacgctctgccgagaagctgacttgattcgtgtaatctcctccagttataacagtgcaaggagactatcttatcagcattactagag

SEQ ID NO: 616178 - DNA, 164 bp, Homo sapiens
atcagatttgctatatagaaacagaatgaataaatgaactttttactttttgcttttttttgcatgaggtaagttaaagagattcaatttgatacttctagaggggggaaaaaggatgttgaaagtaggtcttcattttgcagtcatcatctgtacgaattctt

SEQ ID NO: 616179 - DNA, 197 bp, Homo sapiens
  misc_feature (111)..(111): n is a, c, g, or t
cccctttgggggccccggcccaagggcccctttccccccccccgggggggcgggggggtaaacccggggggggggggggttccccccccccccccccctttttttttttcnaacccccttttttgggaaaaaaaggggggggggggtttgttttttttttttttttttttccccccaaaagggggattttaagggga

SEQ ID NO: 616180 - DNA, 1332 bp, Homo sapiens
  misc_feature (29)..(30): n is a, c, g, or t
  misc_feature (34)..(34): n is a, c, g, or t
  misc_feature (36)..(36): n is a, c, g, or t
  misc_feature (40)..(40): n is a, c, g, or t
  misc_feature (44)..(45): n is a, c, g, or t
  misc_feature (47)..(47): n is a, c, g, or t
  misc_feature (52)..(53): n is a, c, g, or t
ggggccggcgaggaatggcggtatttgtnngagnantccntttnnanagggnnactcctagatatctccaacacaccagagtctagcattaactatggagacaccccaaagtcttgtactaagtcttctaaaagctccactccagttccttcaaagcagtcagcaaggtggcaagttgcaaaagagctttatcaaactgaaagtaattatgttaatatattggcaacaattattcagttatttcaagtaccattggaagaggaaggacaacgtggtggacctatccttgcaccagaggagattaagactatttttggtagcatcccagatatctttgatgtacacactaagataaaggatgatcttgaagaccttatagttaattgggatgagagcaaaagcattggtgacatttttctgaaatattcaaaagatttggtaaaaacctaccctccctttgtaaacttctttgaaatgagcaaggaaacaattattaaatgtgaaaaacagaaaccaagatttcatgcttttctcaagataaaccaagcaaaaccagaatgtggacggcagagccttgttgaacttcttatccgaccagtacagaggttacccagtgttgcattacttttaaatgatcttaagaagcatacagctgatgaaaatccagacaaaagcactttagaaaaagctattggatcactgaaggaagtaatgacgcatattaatgaggataagagaaaaacagaagctcaaaagcaaatcttgatttagtttgatagtgtgtggaattttattttgaaggataagaccatgggaaaattgtggtaaagactgtttgtacccttcatgaaataattctgaagttgccatcagttttactaatcttctgtgaaatgcatagatatgcgcatgttcaactttttattgtggtcttataattaaatgtaaaattgaaaattcatttgctgtttcaaagtgtgatatctttcacaatagcctttttatagtcagtaattcagaataatcaagttcatatggataaatgcatttttatttcctatttctttagggagtgctacaaatgtttgtcacttaaatttcaagtttctgttttaatagttaactgactatagattgttttctatgccatgtatgtgccacttctgagagtagtaaatgactctttgctacattttaaaagcaattgtattagtaagaactttgtaaataaatacctaaaacccaagtgtaaaaaaaaaaaaggggggcgtaaagatatccaaggggcaaattgaggtacaagttttttacaagggcccaggggggaataaa

SEQ ID NO: 616181 - DNA, 188 bp, Homo sapiens
  misc_feature (109)..(109): n is a, c, g, or t
ctgagatattttctacaatattgtggcaattcagtgggtcaaaattgagttgtcctttctgcttcattagtttaagctgtataattcctttcccttcctacattctgtnttcatttttcggaggaagaggagttgctagtactggcattggttttcctttctcttttttttttttttttttccaggag

SEQ ID NO: 616182 - DNA, 222 bp, Homo sapiens
ccgagattgcgccactacattccagcctgggtaacagaggaagattccgactcaaaaaaaaaaaaaccctccccgggccaggtgcggtgtctcatgcctgtaatcccagcttttggggaaaccagggtgggcggatcacttgaggttcgggagttacagacccagccctgaccaacagtgagaacccccattcactactcacaattacaaaaaaaaaaaatt

SEQ ID NO: 616183 - DNA, 271 bp, Homo sapiens
ccatcctatgaaaaagcatgacggcgggatggcacacacaggcaggggacatgtggagcttgtatagtgcaggtctggagcagaaaagcagctagctgttggttctcgaccctgggccggctctctggcgaagcaagcgagggagcagaaagctaacccgaccaggttccccacccaggactagaccgagtgctcttccgtgactactactttattagtctttattgtctcaaggcagcagtctgttgaacaagccctccccagcaaggaa

SEQ ID NO: 616184 - DNA, 646 bp, Homo sapiens
acccccgtaaggtgccaaataggggaaaattaacccttaaaatattccgcattaaaaaacttttctggctgatgtcgaaaccttcatctcaaattcaactttattctgtagactaccagaataatattttctgattctatctaaaaacttcttctcctgttcaaaatccttcggagaataattactaaaaagaaatgcttcaatgaaaatttaaccctttagaaagactgtagttagatgtggctactaggctaaaattcaaacccattcacattatttcaagttatttgggccctttttatggcagttttcatgatatgatcaatacgaccaatataaaaccaaattttcagaagccctcccttgcagtcttcttgaccaaatgtaatcccaagcaactttagaaaaacagagaactgctgggtaaaatattacatttgcagatcagactctcatagcaggaaaggaataaaagaaaaatgtatcatggcaagaaaggaaaaaagaaacatgtgttcgcagttgcaaaaccatgttaagtttcgagatatttgaaatgactttcgagaaatgagactgtgttcaacaaatatttatatgcatggcacatgaggatgtaacaaagcttcacatgtactgccaaacc

SEQ ID NO: 616185 - DNA, 213 bp, Homo sapiens
gtacctcccggggtagagtcttatacagctgagcagataccagtggctacgggcctcccccggcagtagtataacagcacaaaaattcaatgggaccattaaacgggtaggtcaataaaagtggaatgtaggaataaatgatgacattagcttaggctgagtgcagtggctcacccctgtaatcccaacatttggggaggtcaaggggagagg

SEQ ID NO: 616186 - DNA, 910 bp, Homo sapiens
  misc_feature (6)..(7): n is a, c, g, or t
  misc_feature (13)..(16): n is a, c, g, or t
  misc_feature (24)..(24): n is a, c, g, or t
  misc_feature (26)..(26): n is a, c, g, or t
  misc_feature (78)..(78): n is a, c, g, or t
  misc_feature (109)..(109): n is a, c, g, or t
  misc_feature (705)..(705): n is a, c, g, or t
  misc_feature (750)..(750): n is a, c, g, or t
  misc_feature (780)..(780): n is a, c, g, or t
  misc_feature (787)..(787): n is a, c, g, or t
cgagcnntccggnnnnaagtttcngnatatcgtcgacagaccgttcatcccttcatcgacgaccggcgtagtcacgantattcctgataggactggctatgggatcggngtctttcagactgttcgccatcataaacccgcgatcttgaataaatgctggagttgactggctctttcaggcgcgaaagaatggaaaaacgtgacagtgtttcgagcgtgccaggggcgcatggggcgtgagtcaattcactgtgattaagcaatttctcgtagattttgatctcttcggaaatgcgcaagcaatacggcaccttcacgatgtaaacacgatcgaggaaggcttcgttgttgttgttattacggaaagtgacccattcggactcgttcgagtgtgcgagaataatcccgttgaacggcagggcggagataccttccgtcccgttgtagttaccttcctgagtggcggttaacaagggatgcagcactttaatcggtgctttaaacatctcaacgaattccatgatcccctgattggcgcggcacagcgcaccggaatagccgtaggcgtccgggtcattctgcgcgtagtgttcgagtttacgaatatcggatttcccaaccagcgcggagatgtcctggttgttctcatcgccgggttccgttttggcgatagcaattgtggcagaattgacggcagaccttcantacccggaacttagtgatatcggcaccaaatcatgcaggcggttngccgccaaggagacatgaggtgcgagaaancgggagnatggcctagtccttcagaacctggcattacctgggatggaaggagacggataacgggaaggaaagcacgacggcaaaataacggcagcgaaagaagaggccaaggaagtcacacaagcaatag

SEQ ID NO: 616187 - DNA, 825 bp, Homo sapiens
  misc_feature (74)..(74): n is a, c, g, or t
  misc_feature (76)..(76): n is a, c, g, or t
  misc_feature (620)..(620): n is a, c, g, or t
  misc_feature (665)..(665): n is a, c, g, or t
  misc_feature (695)..(695): n is a, c, g, or t
  misc_feature (702)..(702): n is a, c, g, or t
cgctgcggaactgtttatttctgccgatcagaaatggatggattatgcggttgataaaaaagcgatcgaatacnantacgcgtcagacactgctcggcaatagcctggtcgttgtagcaccgaaagccagcgtgccaggggcgcatggggcgtgagtcaattcactgtgattaagcaatttctcgtagattttgatctcttcggaaatgcgcaagcaatacggcaccttcacgatgtaaacacgatcgaggaaggcttcgttgttgttgttattacggaaagtgacccattcggactcgttcgagtgtgcgagaataatcccgttgaacggcagggcggagataccttccgtcccgttgtagttaccttcctgagtggcggttaacaagggatgcagcactttaatcggtgctttaaacatctcaacgaattccatgatcccctgattggcgcggcacagcgcaccggaatagccgtaggcgtccgggtcattctgcgcgtagtgttcgagtttacgaatatcggatttcccaaccagcgcggagatgtcctggttgttctcatcgccgggttccgttttggcgatagcaattgtggcagaattgacggcagaccttcantacccggaacttagtgatatcggcaccaaatcatgcaggcggttngccgccaaggagacatgaggtgcgagaaancgggagnatggcctagtccttcagaacctggcattacctgggatggaaggagacggataacgggaaggaaagcacgacggcaaaataacggcagcgaaagaagaggccaaggaagtcacacaagcaatag

SEQ ID NO: 616188 - DNA, 527 bp, Homo sapiens
  misc_feature (4)..(4): n is a, c, g, or t
  misc_feature (27)..(27): n is a, c, g, or t
tgtngtggggaaggattgtttttgttngtggggatggtggtaagtaagatgattaaagatgtgtagaggagagtagtgattaattaaaagttgatagaaattggagaaagagaatgttttaaagagttgttgagagttaaattaattgaatgtggttggaaggattagttgaaggtatattgtaaagaggtaattaaagaaaaaggattagaatatgttattgttgatgatttggtggttgaaattattttaaaagtagagttttggtatttgatagtgtaaagaaggagtttttataaagaataagaatattttttgtttagtatgttagtttttaagattgaattagattgtgttgttgtggttttatttttgaaagtaaaatttgttataaattagaaaataattttttaaaataaaatttttttttgtatgatggtatatagtttttagtaatgatgtatatattgtattgatttttttttttaaatgtgttattttaataaatattttatgaatgagtttga

SEQ ID NO: 616189 - DNA, 407 bp, Homo sapiens
ggagtcaaatattttaaccaatctgcttatcttaaatacttttgatttcctgaacatgagctcatttttagcattagtcacacttaataaacattcattattttcatcagtaaaaacccatttctggctgtacatggtggctcacacctgtaatccaagcactttgggagacgaggcggggccgatcacttgaggtcgggagtttgagaccagttttccgacattgtgaaccccattttttctaaaaattccaaaatttgcccggcattgttgttaaccattgttattccttgcaattccggagcttaagccaggggatttgcttaacctctggggcttaagtttccattgagttgagattgtcacattcaattccggcttgggcaacggggcaggattctttctca

SEQ ID NO: 616190 - DNA, 2184 bp, Homo sapiens
tttatgtattcttactctagttgtttattaagaatgacaagcacgtcttttcaacatgttagtgaacaacgtctctttattttggggaggagcccggcgggacagtagaagtaaacccttgcctgttaattgaactggccgaggtcctgcggggagtgtggggtgggacgtgaagtggcagctcctcagtgacaaggccactatgtgctatacgcatgcgctgtttcttcagcgccagctccgcccccgccgcagcgaggcgggtaggttccgcccgcgcgcactacgccctgacgtcagcgtcgcgcgcagcgcagtgacgaaatcggctggtttatattggcgcggcccagacggcagaggtctctgcggcgcggtcctcggagacacgcggcggtgtcctgtgttggccatggccgactacctgattagtgggggcacgtcctacgtgccagacgacggactcacagcacagcagctcttcaactgcggagacggcctcacctacaatgactttctcattctccctgggtacatcgacttcactgcagaccaggtggacctgacttctgctctgaccaagaaaatcactcttaagaccccactggtttcctctcccatggacacagtcacagaggctgggatggccatagcaatggcgcttacaggcggtattggcttcatccaccacaactgtacacctgaattccaggccaatgaagttcggaaagtgaagaaatatgaacagggattcatcacagaccctgtggtcctcagccccaaggatcgcgtgcgggatgtttttgaggccaaggcccggcatggtttctgcggtatcccaatcacagacacaggccggatggggagccgcttggtgggcatcatctcctccagggacattgattttctcaaagaggaggaacatgactgtttcttggaagagataatgacaaagagggaagacttggtggtagcccctgcaggcatcacactgaaggaggcaaatgaaattctgcagcgcagcaagaagggaaagttgcccattgtaaatgaagatgatgagcttgtggccatcattgcccggacagacctgaagaagaatcgggactacccactagcctccaaagatgccaagaaacagctgctgtgtggggcagccattggcactcatgaggatgacaagtataggctggacttgctcgcccaggctggtgtggatgtagtggttttggactcttcccagggaaattccatcttccagatcaatatgatcaagtacatcaaagacaaataccctaatctccaagtcattggaggcaatgtggtcactgctgcccaggccaagaacctcattgatgcaggtgtggatgccctgcgggtgggcatgggaagtggctccatctgcattacgcaggaagtgctggcctgtgggcggccccaagcaacagcagtgtacaaggtgtcagagtatgcacggcgctttggtgttccggtcattgctgatggaggaatccaaaatgtgggtcatattgcgaaagccttggcccttggggcctccacagtcatgatgggctctctcctggctgccaccactgaggccctggtgaatacttcttttccgatgggatccggctaaagaaatatcgcggtatgggttctctcgatgccatggacaagcacctcagcagccagaacagatatttcaggtgggacaggcaagccagttaccccaccctaatcctgcactgacagtctcatctctgctgtgaccttgcccgtgtctctgcctctccctgcagtgaagctgacaaaatcaaagtggcccagggagtgtctggtgctgtgcaggacaaagggtcaatccacaaatttgtcccttacctgattgctggcatccaacactcatgccaggacattggtgccaagagcttgacccaagtccggtgagcttggggagctgggacatgggtagaggggctggtccagggccagctacccacatttgacctctgcccttcttcagagccatgatgtactctggggagcttaagtttgagaagagaacgtcctcagcccaggtggaaggtggcgtccatagcctccattcgtatgagaagcggcttttctgaaaagggatccagcacacctcctcggtttttttttcaataaaagtttagaaagaaa

SEQ ID NO: 616191 - DNA, 401 bp, Homo sapiens
  misc_feature (54)..(54): n is a, c, g, or t
  misc_feature (81)..(81): n is a, c, g, or t
  misc_feature (127)..(127): n is a, c, g, or t
  misc_feature (168)..(168): n is a, c, g, or t
  misc_feature (221)..(221): n is a, c, g, or t
  misc_feature (226)..(226): n is a, c, g, or t
  misc_feature (289)..(289): n is a, c, g, or t
  misc_feature (301)..(301): n is a, c, g, or t
  misc_feature (318)..(318): n is a, c, g, or t
  misc_feature (337)..(337): n is a, c, g, or t
  misc_feature (383)..(383): n is a, c, g, or t
tccttcaagacagtctctcgctctgttgcctgttgtccatgcctgttgtgtganatcggctcattgcagcctttgcctccnaagctcaagggattctcctgcctcatcctcccgagtagctggaatnacaggcatgtgccaccatgcctgactgatttttgtattttnagtagagacatggttttaccatttggccaggctggtcttaaacgcctgatctnaagtnatcctcccacctcggcctcccaaagtgttgggattgcaggcgtaagcacttgcgcccagcctntaagaccttttnaacatacatggctgggnattctggcagtatgttgancttttataatttcaattttgtgtaggctttttgcccctaaattttnttggaaattcttatttaa

SEQ ID NO: 616192 - DNA, 169 bp, Homo sapiens
catatggtaagtgtttggtagtaaatgatgatgatggtgatagtgatggacatagtgagatgaggacagccccgtggatatgcttgaaggtgcaatcaatagcagtatatgacggatcgtatgtggtatgtgagagaagagtcaaggatgccctcagttgattttggtc

SEQ ID NO: 616193 - DNA, 2189 bp, Homo sapiens
tttatgtattcttactctagttgtttattaagaatgacaagcacgtcttttcaacatgttagtgaacaacgtctctttattttggggaggagcccggcgggacagtagaagtaaacccttgcctgttaattgaactggccgaggtcctgcggggagtgtggggtgggacgtgaagtggcagctcctcagtgacaaggccactatgtgctatacgcatgcgctgtttcttcagcgccagctccgcccccgccgcagcgaggcgggtaggttccgcccgcgcgcactacgccctgacgtcagcgtcgcgcgcagcgcagtgacgaaatcggctggtttatattggcgcggcccagacggcagaggtctctgcggcgcggtcctcggagacacgcggcggtgtcctgtgttggccatggccgactacctgattagtgggggcacgtcctacgtgccagacgacggactcacagcacagcagctcttcaactgcggagacggcctcacctacaatgactttctcattctccctgggtacatcgacttcactgcagaccaggtggacctgacttctgctctgaccaagaaaatcactcttaagaccccactggtttcctctcccatggacacagtcacagaggctgggatggccatagcaatggcgcttacaggcggtattggcttcatccaccacaactgtacacctgaattccaggccaatgaagttcggaaagtgaagaaatatgaacagggattcatcacagaccctgtggtcctcagccccaaggatcgcgtgcgggatgtttttgaggccaaggcccggcatggtttctgcggtatcccaatcacagacacaggccggatggggagccgcttggtgggcatcatctcctccagggacattgattttctcaaagaggaggaacatgactgtttcttggaagagataatgacaaagagggaagacttggtggtagcccctgcaggcatcacactgaaggaggcaaatgaaattctgcagcgcagcaagaagggaaagttgcccattgtaaatgaagatgatgagcttgtggccatcattgcccggacagacctgaagaagaatcgggactacccactagcctccaaagatgccaagaaacagctgctgtgtggggcagccattggcactcatgaggatgacaagtataggctggacttgctcgcccaggctggtgtggatgtagtggttttggactcttcccagggaaattccatcttccagatcaatatgatcaagtacatcaaagacaaataccctaatctccaagtcattggaggcaatgtggtcactgctgcccaggccaagaacctcattgatgcaggtgtggatgccctgcgggtgggcatgggaagtggctccatctgcattacgcaggaagtgctggcctgtgggcggccccaagcaacagcagtgtacaaggtgtcagagtatgcacggcgctttggtgttccggtcattgctgatggaggaatccaaaatgtgggtcatattgcgaaagccttggcccttggggcctccacaggtgaggcccagtacccgtgaaggccagtgggaccccctccctagtgctgcttaggctctaacccaagcactccatctgtccgcagtcatgatgggctctctcctggctgccaccactgaggccctggtgaatacttcttttccgatgggatccggctaaagaaatatcgcggtatgggttctctcgatgccatggacaagcacctcagcagccagaacagatatttcaggtgggacaggcaagccagttaccccaccctaatcctgcactgacagtctcatctctgctgtgaccttgcccgtgtctctgcctctccctgcagtgaagctgacaaaatcaaagtggcccagggagtgtctggtgctgtgcaggacaaagggtcaatccacaaatttgtcccttacctgattgctggcatccaacactcatgccaggacattggtgccaagagcttgacccaagtccgagccatgatgtactctggggagcttaagtttgagaagagaacgtcctcagcccaggtggaaggtggcgtccatagcctccattcgtatgagaagcggcttttctgaaaagggatccagcacacctcctcggtttttttttcaataaaagtttagaaagaaa

SEQ ID NO: 616194 - DNA, 402 bp, Homo sapiens
  misc_feature (263)..(264): n is a, c, g, or t
  misc_feature (268)..(268): n is a, c, g, or t
  misc_feature (282)..(282): n is a, c, g, or t
  misc_feature (302)..(302): n is a, c, g, or t
  misc_feature (305)..(307): n is a, c, g, or t
  misc_feature (324)..(324): n is a, c, g, or t
  misc_feature (383)..(383): n is a, c, g, or t
gctctatgtagatgcgctgcatgccaactaacggaaagtttgtttatgcattgaatctctgtaggctctatgaacaggaatagcatgagtgtgctgttcgaatcagatgttactgctagaattaacatgtcgtgactggaatagcgctgacgaccattaaatcattcacaataataatactatttttattagagaatgtatacttttaggaaagctgtctccttatttaaataaaatagtgtttgtctgtagttcagtgttgnngcantcttgggggggatncttctctaatcttcagaaanttnnnctgcgaacactctttantggaccagatcaggatttgagcggaagaacgaatgtaactttaaggcatgaaagccctngacatgaagggtaccgagc

SEQ ID NO: 616195 - DNA, 255 bp, Homo sapiens
ccagggccatggaaggacccttaggagtttgatgaaaaagaccatgaggccattggggtttccccctcccaggcctcctgggggtcatccccttactttaatttttgggcctccaaaaagtgtcccaaaggggtttggccaggcccccctgctgcggatgtggtttgtgggggggggtgggcacaggggtgagggtgtgagtgacagttaccccatttcagtcatttcctggtgcaaataagtcagcaacccagt

SEQ ID NO: 616196 - DNA, 2089 bp, Homo sapiens
tttatgtattcttactctagttgtttattaagaatgacaagcacgtcttttcaacatgttagtgaacaacgtctctttattttggggaggagcccggcgggacagtagaagtaaacccttgcctgttaattgaactggccgaggtcctgcggggagtgtggggtgggacgtgaagtggcagctcctcagtgacaaggccactatgtgctatacgcatgcgctgtttcttcagcgccagctccgcccccgccgcagcgaggcgggtaggttccgcccgcgcgcactacgccctgacgtcagcgtcgcgcgcagcgcagtgacgaaatcggctggtttatattggcgcggcccagacggcagaggtctctgcggcgcggtcctcggagacacgcggcggtgtcctgtgttggccatggccgactacctgattagtgggggcacgtcctacgtgccagacgacggactcacagcacagcagctcttcaactgcggagacggcctcacctacaatgactttctcattctccctgggtacatcgacttcactgcagaccaggtggacctgacttctgctctgaccaagaaaatcactcttaagaccccactggtttcctctcccatggacacagtcacagaggctgggatggccatagcaatggcgcttacaggcggtattggcttcatccaccacaactgtacacctgaattccaggccaatgaagttcggaaagtgaagaaatatgaacagggattcatcacagaccctgtggtcctcagccccaaggatcgcgtgcgggatgtttttgaggccaaggcccggcatggtttctgcggtatcccaatcacagacacaggccggatggggagccgcttggtgggcatcatctcctccagggacattgattttctcaaagaggaggaacatgactgtttcttggaagagataatgacaaagagggaagacttggtggtagcccctgcaggcatcacactgaaggaggcaaatgaaattctgcagcgcagcaagaagggaaagttgcccattgtaaatgaagatgatgagcttgtggccatcattgcccggacagacctgaagaagaatcgggactacccactagcctccaaagatgccaagaaacagctgctgtgtggggcagccattggcactcatgaggatgacaagtataggctggacttgctcgcccaggctggtgtggatgtagtggttttggtgagctgctacacaggtgggttggggcaataggggcagctgccacatcacagtctgagacttacttcttgtcctaggactcttcccagggaaattccatcttccagatcaatatgatcaagtacatcaaagacaaataccctaatctccaagtcattggaggcaatgtggtcactgctgcccaggccaagaacctcattgatgcaggtgtggatgccctgcgggtgggcatgggaagtggctccatctgcattacgcaggaagtgctggcctgtgggcggccccaagcaacagcagtgtacaaggtgtcagagtatgcacggcgctttggtgttccggtcattgctgatggaggaatccaaaatgtgggtcatattgcgaaagccttggcccttggggcctccacagtcatgatgggctctctcctggctgccaccactgaggcccctggtgaatacttcttttccgatgggatccggctaaagaaatatcgcggtatgggttctctcgatgccatggacaagcacctcagcagccagaacagatatttcagtgaagctgacaaaatcaaagtggcccagggagtgtctggtgctgtgcaggacaaagggtcaatccacaaatttgtcccttacctgattgctggcatccaacactcatgccaggacattggtgccaagagcttgacccaagtccgagccatgatgtactctggggagcttaagtttgagaagagaacgtcctcagcccaggtggaaggtggcgtccatagcctccattcgtatgagaagcggcttttctgaaaagggatccagcacacctcctcggtttttttttcaataaaagtttagaaagaaa

SEQ ID NO: 616197 - DNA, 1561 bp, Homo sapiens
  misc_feature (1429)..(1429): n is a, c, g, or t
tttatgtattcttactctagttgtttattaagaatgacaagcacgtcttttcaacatgttagtgaacaacgtctctttattttggggaggagcccggcgggacagtagaagtaaacccttgcctgttaattgaactggccgaggtcctgcggggagtgtggggtgggacgtgaagtggcagctcctcagtgacaaggccactatgtgctatacgcatgcgctgtttcttcagcgccagctccgcccccgccgcagcgaggcgggtaggttccgcccgcgcgcactacgccctgacgtcagcgtcgcgcgcagcgcagtgacgaaatcggctggtttatattggcgcggcccagacggcagaggtctctgcggcgcggtcctcggagacacgcggcggtgtcctgtgttggccatggccgactacctgattagtgggggcacgtcctacgtgccagacgacggactcacagcacagcagctcttcaactgcggagacggcctcacctacaatgactttctcattctccctgggtacatcgacttcactgcagaccaggtggacctgacttctgctctgaccaagaaaatcactcttaagaccccactggtttcctctcccatggacacagtcacagaggctgggatggccatagcaatggcgcttacaggcggtattggcttcatccaccacaactgtacacctgaattccaggccaatgaagttcggaaagtgaagaaatatgaacagggattcatcacagaccctgtggtcctcagccccaaggatcgcgtgcgggatgtttttgaggccaaggcccggcatggtttctgcggtatcccaatcacagacacaggccggatggggagccgcttggtgggcatcatctcctccagggacattgattttctcaaagaggaggaacatgactgtttcttggaagagataatgacaaagagggaagacttggtggtagcccctgcaggcatcacactgaaggaggcaaatgaaattctgcagcgcagcaagaagggaaagttgcccattgtaaatgaagatgatgagcttgtggccatcattgcccggacagacctgaagaagaatcgggactacccactagcctccaaagatgccaagaaacagctgctgtgtggggcagccattggcactcatgaggatgacaagtataggctggacttgctcgcccaggctggtgtggatgtagtggttttggactcttcccagggaaattccatcttccagatcaatatgatcaagtacatcaaagacaaataccctaatctccaagtcattggaggcaatgtggtcactgctgcccaggccaagaacctcattgatgcaggtgtggatgccctgcgggtgggcatgggaagtggctccatctgcattacgcaggaagtgtgccgtggngcccacaaggcgggacagtgccagcagccgggcggggcgcatggggggacaaggggaatggaacggctggccacgcagtggccgggccaagccgggaaatgcggcgcaaacgggggtccggaacccacatag

SEQ ID NO: 616198 - DNA, 146 bp, Homo sapiens
agacatgatgagagtgaggaggacgaggaggagagatgaggttatctgtggaatggggaaaggacataagtgagttcaagaagtagaatggatagttcttgttgggctaggtgggttcgctggtcaagcaaagattcagtaccaga

SEQ ID NO: 616199 - DNA, 107 bp, Homo sapiens
gctcggcccccccacctcgacgttgcccccgagattgacgaccaccaggtccagggcgtcaagctcctgcaaacacgagacgtcgtcgtcacgaacctcgacgcgat

SEQ ID NO: 616200 - DNA, 658 bp, Homo sapiens
gcggcggtggagtgcagtagctggggcggtcgcagcattagtggaccttacagaggcggctatggcggtggggggtggctatggaggcagctccttctacaagaaaattcaaaatgcctgggagtggctctaggggtagctctttccaccagcccaagtggggtcaactcctaagccccaccccctcacacattaccgacttccctgtattgcccttgggggagccacttctaaggctgcttacccttgtggggtgtcctctattttgcctgccacctctcgttgtctctccctctgaatgatggactcggcccacatacacatttttgtgtcacagtcattgatggactctatttttcttattattactttggagctatggccgtattttatactagcaaaatgtcttgttttcactctgtgtccatggggcggaggggaggcgacgtgaactttgctgattctgtagcaaaacctgggtgggggtggggtggggggtagtttacttcgttgtacggacttgataacctggctacagcgtttctatgaaatccaacttggattcccaatggccttgaaaatttggagagccattagtgttgccaccggtccatttgacggtcgcactcggaagtaacatcagtggggtgagaccgta

SEQ ID NO: 616201 - DNA, 2010 bp, Homo sapiens
tttatgtattcttactctagttgtttattaagaatgacaagcacgtcttttcaacatgttagtgaacaacgtctctttattttggggaggagcccggcgggacagtagaagtaaacccttgcctgttaattgaactggccgaggtcctgcggggagtgtggggtgggacgtgaagtggcagctcctcagtgacaaggccactatgtgctatacgcatgcgctgtttcttcagcgccagctccgcccccgccgcagcgaggcgggtaggttccgcccgcgcgcactacgccctgacgtcagcgtcgcgcgcagcgcagtgacgaaatcggctggtttatattggcgcggcccagacggcagaggtctctgcggcgcggtcctcggagacacgcggcggtgtcctgtgttggccatggccgactacctgattagtgggggcacgtcctacgtgccagacgacggactcacagcacagcagctcttcaactgcggagacggcctcacctacaatgactttctcattctccctgggtacatcgacttcactgcagaccaggtggacctgacttctgctctgaccaagaaaatcactcttaagaccccactggtttcctctcccatggacacagtcacagaggctgggatggccatagcaatggcgcttacaggcggtattggcttcatccaccacaactgtacacctgaattccaggccaatgaagttcggaaagtgaagaaatatgaacagggattcatcacagaccctgtggtcctcagccccaaggatcgcgtgcgggatgtttttgaggccaaggcccggcatggtttctgcggtatcccaatcacagacacaggccggatggggagccgcttggtgggcatcatctcctccagggacattgattttctcaaagaggaggaacatgactgtttcttggaagagataatgacaaagagggaagacttggtggtagcccctgcaggcatcacactgaaggaggcaaatgaaattctgcagcgcagcaagaagggaaagttgcccattgtaaatgaagatgatgagcttgtggccatcattgcccggacagacctgaagaagaatcgggactacccactagcctccaaagatgccaagaaacagctgctgtgtggggcagccattggcactcatgaggatgacaagtataggctggacttgctcgcccagctggtgtggatgtagtggtttggactcttcccagggaaattccatcttccagatcaatatgatcaagtacatcaaagacaaataccctaatctccaagtcattggaggcaatgtggtcactgctgcccaggccaagaacctcattgatgcaggtgtggatgccctgcgggtgggcatgggaagtggctccatctgcattacgcaggaagtgctggcctgtgggcggccccaagcaacagcagtgtacaaggtgtcagagtatgcacggcgctttggtgttccggtcattgctgatggaggaatccaaaatgtgggtcatattgcgaaagccttggcccttggggcctccacagtcatgatgggctctctcctggctgccaccactgaggcccctggtgaatacttcttttccgatgggatccggctaaagaaatatcgcggtatgggttctctcgatgccatggacaagcacctcagcagccagaacagatatttcagtgaagctgacaaaatcaaagtggcccagggagtgtctggtgctgtgcaggacaaagggtcaatccacaaatttgtcccttacctgattgctggcatccaacactcatgccaggacattggtgccaagagcttgacccaagtccgagccatgatgtactctggggagcttaagtttgagaagagaacgtcctcagcccaggtggaaggtggcgtccatagcctccattcgtatgagaagcggcttttctgaaaagggatccagcacacctcctcggtttttttttcaataaaagtttagaaagaaa

SEQ ID NO: 616202 - DNA, 1440 bp, Homo sapiens
tttatgtattcttactctagttgtttattaagaatgacaagcacgtcttttcaacatgttagtgaacaacgtctctttattttggggaggagcccggcgggacagtagaagtaaacccttgcctgttaattgaactggccgaggtcctgcggggagtgtggggtgggacgtgaagtggcagctcctcagtgacaaggccactatgtgctatacgcatgcgctgtttcttcagcgccagctccgcccccgccgcagcgaggcgggtaggttccgcccgcgcgcactacgccctgacgtcagcgtcgcgcgcagcgcagtgacgaaatcggctggtttatattggcgcggcccagacggcagaggtctctgcggcgcggtcctcggagacacgcggcggtgtcctgtgttggccatggccgactacctgattagtgggggcacgtcctacgtgccagacgacggactcacagcacagcagctcttcaactgcggagacggcctcacctacaatgactttctcattctccctgggtacatcgacttcactgcagaccaggtggacctgacttctgctctgaccaagaaaatcactcttaagaccccactggtttcctctcccatggacacagtcacagaggctgggatggccatagcaatggcgcttacaggcggtattggcttcatccaccacaactgtacacctgaattccaggccaatgaagttcggaaagtgaagaaatatgaacagggattcatcacagaccctgtggtcctcagccccaaggatcgcgtgcgggatgtttttgaggccaaggcccggcatggtttctgcggtatcccaatcacagacacaggccggatggggagccgcttggtgggcatcatctcctccagggacattgattttctcaaagaggaggaacatgactgtttcttggaagagataatgacaaagagggaagacttggtggtagcccctgcaggcatcacactgaaggaggcaaatgaaattctgcagcgcagcaagaagggaaagttgcccattgtaaatgaagatgatgagcttgtggccatcattgcccggacagacctgaagaagaatcgggactacccactagcctccaaagatgccaagaaacagctgctgtgtggggcagccattggcactcatgaggatgacaagtataggctggacttgctcgcccaggctggtgtggatgtagtggttttggactcttcccagggaaattccatcttccagatcaatatgatcaagtacatcaaagacaaataccctaatctccaagtcattggaggcaatgagggccatgagctcatcatcttcatttacaaggggcaacgttgcctttttggctgcgcagcacaatttcgtaggcctcctccagggtgctgcctgagggtgggtacttgggtaccgag

SEQ ID NO: 616203 - DNA, 121 bp, Homo sapiens
  misc_feature (102)..(102): n is a, c, g, or t
catcagagcattaaaggactggtgggaggccggggtgtattgtgggaagtcataacccacagatgatcaacctaagaatcctggcccttctccactctccancatgcgtggattgccagga

SEQ ID NO: 616204 - DNA, 2100 bp, Homo sapiens
tttatgtattcttactctagttgtttattaagaatgacaagcacgtcttttcaacatgttagtgaacaacgtctctttattttggggaggagcccggcgggacagtagaagtaaacccttgcctgttaattgaactggccgaggtcctgcggggagtgtggggtgggacgtgaagtggcagctcctcagtgacaaggccactatgtgctatacgcatgcgctgtttcttcagcgccagctccgcccccgccgcagcgaggcgggtaggttccgcccgcgcgcactacgccctgacgtcagcgtcgcgcgcagcgcagtgacgaaatcggctggtttatattggcgcggcccagacggcagaggtctctgcggcgcggtcctcggagacacgcggcggtgtcctgtgttggccatggccgactacctgattagtgggggcacgtcctacgtgccagacgacggactcacagcacagcagctcttcaactgcggagacggcctcacctacaatgactttctcattctccctgggtacatcgacttcactgcagaccaggtggacctgacttctgctctgaccaagaaaatcactcttaagaccccactggtttcctctcccatggacacagtcacagaggctgggatggccatagcaatggcgcttacaggcggtattggcttcatccaccacaactgtacacctgaattccaggccaatgaagttcggaaagtgaagaaatatgaacagggattcatcacagaccctgtggtcctcagccccaaggatcgcgtgcgggatgtttttgaggccaaggcccggcatggtttctgcggtatcccaatcacagacacaggccggatggggagccgcttggtgggcatcatctcctccagggacattgattttctcaaagaggaggaacatgactgtttcttggaagagataatgacaaagagggaagacttggtggtagcccctgcaggcatcacactgaaggaggcaaatgaaattctgcagcgcagcaagaagggaaagttgcccattgtaaatgaagatgatgagcttgtggccatcattgcccggacagacctgaagaagaatcgggactacccactagcctccaaagatgccaagaaacagctgctgtgtggggcagccattggcactcatgaggatgacaagtataggctggacttgctcgcccaggctggtgtggatgtagtggttttggactcttcccagggaaattccatcttccagatcaatatgatcaagtacatcaaagacaaatacctcctaatctccgaacgatcattggagggcagagtgtggagttcactttgcgtgccccacggcctaacgtaacccgtcgattgatgcatggtagtggcatgccctgctgggatgggcatgtggaagtggcctccaatctgccattacgtcaggactgtgctggtgctgtggtgcgcgacccagacgctaaggatcagctgtacaaggttgtcgacagtatgctacgtgcgcgtaatggatgtcctcaggtcatttgcgtggatgtgagtgaatacctagaaatgtggcgtcactattgcgataagaagccttggcccttggggcctccacagtcatgatgggctctctcctggctgccaccactgaggcccctggtgaatacttcttttccgatgggatccggctaaagaaatatcgcggtatgggttctctcgatgccatggacaagcacctcagcagccagaacagatatttcagtgaagctgacaaaatcaaagtggcccagggagtgtctggtgctgtgcaggacaaagggtcaatccacaaatttgtcccttacctgattgctggcatccaacactcatgccaggacattggtgccaagagcttgacccaagtccgagccatgatgtactctggggagcttaagtttgagaagagaacgtcctcagcccaggtggaaggtggcgtccatagcctccattcgtatgagacagcgggctttatctggaaaggggatccaggacaacctcctcggtatatttttcaataacaagttacgaaggaaaaatcgaccagacaaacgc

SEQ ID NO: 616205 - DNA, 407 bp, Homo sapiens
tttccccttttttcccccaggttgaaattccccccccaaaaagggaaaaaaagggggggccccccccgggggggggcccttttaaaaaaaggggttcccccgggggggaggaatttgggcaaaaaccctttttcccccggccttgggttttttgggccttttttttccccccttttttctttgaaaccccccccccaaaggggggcccctcccccggggccccctcaaatttttccgggggccctgggccccgggttttaaaacccattttccaaaggcaaaaaccttttttccccctggggggggggggaaacaaaaaactttggcccttttttggggggggaaaaaaaattgaaagggtttttaattttttggatgggggaaaaaagcctggggaaaacccccca

SEQ ID NO: 616206 - DNA, 441 bp, Homo sapiens
tgggcggcgctaaacgggtcgaggtcaggttaatatatagtggggcagatctggaagggtcacaagggaacaaacagtctcactccagtccgtttccttctttctatggtaaatttctgactgtaagtgatgctcacggaaccttggttttcttgcttccttttcaatccttctgtctgtgccacttactagcatcacaactgctctatagaaattgctttttaaaagtcatgaagttgcagatcacagaatccaagtaaagccatctccttaaagctggtctttactcccactgtgcttgggataactggtatactgaatccctgattcctgacctatgatttatggggtgtgtgtgtgtgtgtgtgtgtgtgtgttgtgtgagtgaagatctaaataagttcatgtactgtctagaggaccgagatctttctactcaat

SEQ ID NO: 616207 - DNA, 990 bp, Homo sapiens
tgatggtgtcccggctacttaaatgtctacttccaacatccttggaattctgctaagtgaagtgacaacaatctctgaaagacgtgtggaaaggctgtgactggtgccgtttggtgagctaggtcgagtatcgttcgtagactcgaaactgcttagcgtgtaacgatgcaccgttccctaatggtttccaatgcgtatgctaagcaagatacctaaaatccttccacgtgtgttacaacgcacagatgtccaacagccacaccccaccaacctcctgtactccacaaacactactctcctgccacccccccactaaccctaacagactctcttctgaaacctcacctattcgcgcaccgcgagcgcactgctgggcgtctacttcaaaagagccgtcgagccacttcttcccgcaaagaaggacccgcagggcagaagcgacgagggcatacgaatccgctcccacatgaaaaatgccacccgcgcaggcgccgaacggacagcgctacatcacaccagagaaaatggagtacgcccagcactacacccaacggggtgcagcacccaacgcgcaatcacccagacgacccccatgcccacggcacggccccaccgtgtggacgcaacacgcccccaccaggactcccatgacccgggtccttcctgcccccaccggaaccccagcaccaaccgctgacccacacacgtacggcaccaccattccctaggaatcgacgactcaccaacacacacgaagaacggcagaccacccgcacccactaccaccagagcagcaccgcaggcggctcggcaccaccccgaacgcaccacacgccacacaaaccccactccatccttacgggcctgccccgacggcccacacacgcacccgcccgcataacacaaccgcacagaacatccaaacacaaaaataccccccacacaacgcccacagaaaaaacacaacatcaacaacaccaaccaaacaca

SEQ ID NO: 616208 - DNA, 1447 bp, Homo sapiens
  misc_feature (199)..(199): n is a, c, g, or t
gcgaacacgtgagcacgttggtcagagcggtccaacactgccaggatggtcctacgggaagacagggagatgaaggaggaggagattcaatcggacaacttccatcgcatatacagaactccggcagcgtattacacgcaactctctcacggctgtcgcacgcaggaacgactggcgcatatactgccgtgtgaacagnactctatacaattgtacacgtccgcgcagagtgagtacagcatcacgcacgtgtagccccaagtagatgcgtatttcgtaacactatcggtcagtggacttccaaatgcgcaattctagatgctagaataccccgaccgtggacaacgcttagcttggtaccgccttcgtgtgggcccccatttgtgagcccgaaaggattggatgttggacagtattacgccaatctttgagggttgaggtttggtattccgcattcgtaagtttgggtttggcgttttgtgccgaaggttttccggctaggtaggccaaattgaatggttaatgagacccgccaacttaggacgcccaaaaagtgctgccaagcggacacaatgagccacctttaatggacaactgaagcccttataagagcggccccgggtttgtggaacatgaggaaatatgagcaacagaggcgtttacacccacaatttttggggcgcactttaggggggggaccaacctttgaggaaccccatggtgggcgggcgttcatacggatgggccgccctttgaagaaggtgttccagggccacgcacaaccccgccaactagatgaaccttattcggggggaacctcttaggggtcaatatgaagcgccaacggcaaaggtatatggaggaacaacaacggatggttcgcaccgtttagttgttgctcacttaatcgcggaaaaaaaccttctgggttggcgcaagatggcgcgggcgttgaaacacggttccatattcgtggggaaggcacttgtgaagctttccgaataggtgaaaggcccacgaatatataggggccttcacatagggggtggccccgccgacacactgggagtgatgtgtaacaaactagctagtcagacgctaaacctcctgacggtataatttagtagtatgtcatagctcacccgcagcacctcgatacatttgggagggtaacagtgagactaggcaacaaaaggagagtgttctacgctcgtttaacacgcctttatttgaggccggtggacaacatcttgcacgccgtcgttttgggtggcgtctaagacaggggcagccaaaacaacgttttttctcgcccccccgcgatttttgaacaacgcggtgaacatctatgggtagtaggccaagaaacgcccacccttcatgtaggggacgagagcagaaacctattagtgggtgagactacgacgcacacccccatcttgttgca

SEQ ID NO: 616209 - DNA, 415 bp, Homo sapiens
cacgaggaggacacacccattaaaggactcaggacggacaagcacagtcttcgggtagagagacacaatcagtgataaaacgggcagaacaggctcttatagggccatggaggcagcctcctcgctcatgagacattgattatcgaaaactctgtctgatgcatgtaaaccactgaagaagcgattatcgggcttccacggaagcatcttcagcgtcttgggtttagcaaaagttcatctccttctgcatccttatctgagaatgaggtctcggacagcccgggagacgagccctcggagtctccatcagatagtgcagacgatccacaaactgatgtaactgtctcatccaaatggtctgagcgaggagtgactgccatgaaggagtatgtgtgccagctgttgtagaagacgg

SEQ ID NO: 616210 - DNA, 1354 bp, Homo sapiens
  misc_feature (1301)..(1302): n is a, c, g, or t
  misc_feature (1304)..(1304): n is a, c, g, or t
  misc_feature (1307)..(1309): n is a, c, g, or t
  misc_feature (1319)..(1319): n is a, c, g, or t
  misc_feature (1321)..(1321): n is a, c, g, or t
  misc_feature (1326)..(1328): n is a, c, g, or t
  misc_feature (1333)..(1333): n is a, c, g, or t
tttatgtattcttactctagttgtttattaagaatgacaagcacgtcttttcaacatgttagtgaacaacgtctctttattttggggaggagcccggcgggacagtagaagtaaacccttgcctgttaattgaactggccgaggtcctgcggggagtgtggggtgggacgtgaagtggcagctcctcagtgacaaggccactatgtgctatacgcatgcgctgtttcttcagcgccagctccgcccccgccgcagcgaggcgggtaggttccgcccgcgcgcactacgccctgacgtcagcgtcgcgcgcagcgcagtgacgaaatcggctggtttatattggcgcggcccagacggcagaggtctctgcggcgcggtcctcggagacacgcggcggtgtcctgtgttggccatggccgactacctgattagtgggggcacgtcctacgtgccagacgacggactcacagcacagcagctcttcaactgcggagacggcctcacctacaatgactttctcattctccctgggtacatcgacttcactgcagaccaggtggacctgacttctgctctgaccaagaaaatcactcttaagaccccactggtttcctctcccatggacacagtcacagaggctgggatggccatagcaatggcgcttacaggcggtattggcttcatccaccacaactgtacacctgaattccaggccaatgaagttcggaaagtgaagaaatatgaacagggattcatcacagaccctgtggtcctcagccccaaggatcgcgtgcgggatgtttttgaggccaaggcccggcatggtttctgcggtatcccaatcacagacacaggccggatggggagccgcttggtgggcatcatctcctccagggacattgattttctcaaagaggaggaacatgactgtttcttggaagagataatgacaaagagggaagacttggtggtagcccctgcaggcatcacactgaaggaggcaaatgaaattctgcagcgcagcaagaagggaaagttgcccattgtaaatgaagatgatgagcttgtggccatcattgcccggacagacctgaagaagaatcgggactacccactagcctccaaagatgccaagaaacagctgctgtgtggggcagccattggcactcatgaggatgacaagtataggctggacttgctcgcccagctgtgtggctgtcggggttggctcttcccaggaaatccctcttcccgatcaattgttcacagttcttcaaacaaatcccattccaatttgggcnntnggnnnggtgccggcnanccttnnnggggngccccgggcgggagggcccct

SEQ ID NO: 616211 - DNA, 714 bp, Homo sapiens
aggactaagcaaaggtcaatatccaacacagacaacctaccctgagcagcctcctgggaatccagtataccctaagaccttgcatcttcctcaggctacaccctataccgatgctacaactgactactcagagctctatcgttcgagctttgtgcacccaggggctgccacagaccccaccatgtcagacgcatttcctggagcctctatgcatcttcccatggtccagactgtggctgttgggcctttaaggtccacaattcccatggcttattatccagccggtcccatgtatccacctggcatcacagtgctgagggaaggagggcatgatgcaggtgccagatttggagctggggctactgctggcaacattcctgctccacctcctggatgccctcccaatgctgatcagctcgcacgcatgcagggagccaacgtcctcgtaactcatcggaaggcgaacttcttcatgcggggctcagatggcggctacaccatctgcagaggaaccaaggccacctttgtgaccggaaagacatcacataccttcagcacttctgacaatgtaactgctataggcatattaacctgaagtcgcagcttagaacatgctgttgggtagactttatgttgcccatactttaagcacttatcttaataaggaacctgtaacggtactagtacatcctaagccttctgggcgagggttct

SEQ ID NO: 616212 - DNA, 1375 bp, Homo sapiens
  misc_feature (1250)..(1250): n is a, c, g, or t
  misc_feature (1284)..(1284): n is a, c, g, or t
  misc_feature (1297)..(1297): n is a, c, g, or t
tttatgtattcttactctagttgtttattaagaatgacaagcacgtcttttcaacatgttagtgaacaacgtctctttattttggggaggagcccggcgggacagtagaagtaaacccttgcctgttaattgaactggccgaggtcctgcggggagtgtggggtgggacgtgaagtggcagctcctcagtgacaaggccactatgtgctatacgcatgcgctgtttcttcagcgccagctccgcccccgccgcagcgaggcgggtaggttccgcccgcgcgcactacgccctgacgtcagcgtcgcgcgcagcgcagtgacgaaatcggctggtttatattggcgcggcccagacggcagaggtctctgcggcgcggtcctcggagacacgcggcggtgtcctgtgttggccatggccgactacctgattagtgggggcacgtcctacgtgccagacgacggactcacagcacagcagctcttcaactgcggagacggcctcacctacaatgactttctcattctccctgggtacatcgacttcactgcagaccaggtggacctgacttctgctctgaccaagaaaatcactcttaagaccccactggtttcctctcccatggacacagtcacagaggctgggatggccatagcaatggcgcttacaggcggtattggcttcatccaccacaactgtacacctgaattccaggccaatgaagttcggaaagtgaagaaatatgaacagggattcatcacagaccctgtggtcctcagccccaaggatcgcgtgcgggatgtttttgaggccaaggcccggcatggtttctgcggtatcccaatcacagacacaggccggatggggagccgcttggtgggcatcatctcctccagggacattgattttctcaaagaggaggaacatgactgtttcttggaagagataatgacaaagagggaagacttggtggtagcccctgcaggcatcacactgaaggaggcaaatgaaattctgcagcgcagcaagaagggaaagttgcccattgtaaatgaagatgatgagcttgtggccatcattgcccggacagacctgaagaagaatcgggactacccactagcctccaaagatgccaagaaacagctgctgtgtggggcagccattggcactcatgaggatgacaagtataggctggacttgctcgcccagctgtgtggctgtcggggttggctcttcccaggaaatccatctncgatcaatgtcagtctcaagaaatacctattcanttgggcggggtgngccggcaaccttgtggggggcccgggggggaggcccctcacagtggtggccccacaggtccgggtctgaagttacttc

SEQ ID NO: 616213 - DNA, 2047 bp, Homo sapiens
  misc_feature (1121)..(1121): n is a, c, g, or t
tttatgtattcttactctagttgtttattaagaatgacaagcacgtcttttcaacatgttagtgaacaacgtctctttattttggggaggagcccggcgggacagtagaagtaaacccttgcctgttaattgaactggccgaggtcctgcggggagtgtggggtgggacgtgaagtggcagctcctcagtgacaaggccactatgtgctatacgcatgcgctgtttcttcagcgccagctccgcccccgccgcagcgaggcgggtaggttccgcccgcgcgcactacgccctgacgtcagcgtcgcgcgcagcgcagtgacgaaatcggctggtttatattggcgcggcccagacggcagaggtctctgcggcgcggtcctcggagacacgcggcggtgtcctgtgttggccatggccgactacctgattagtgggggcacgtcctacgtgccagacgacggactcacagcacagcagctcttcaactgcggagacggcctcacctacaatgactttctcattctccctgggtacatcgacttcactgcagaccaggtggacctgacttctgctctgaccaagaaaatcactcttaagaccccactggtttcctctcccatggacacagtcacagaggctgggatggccatagcaatggcgcttacaggcggtattggcttcatccaccacaactgtacacctgaattccaggccaatgaagttcggaaagtgaagaaatatgaacagggattcatcacagaccctgtggtcctcagccccaaggatcgcgtgcgggatgtttttgaggccaaggcccggcatggtttctgcggtatcccaatcacagacacaggccggatggggagccgcttggtgggcatcatctcctccagggacattgattttctcaaagaggaggaacatgactgtttcttggaagagataatgacaaagagggaagacttggtggtagcccctgcaggcatcacactgaaggaggcaaatgaaattctgcagcgcagcaagaagggaaagttgcccattgtaaatgaagatgatgagcttgtggccatcattgcccggacagacctgaagaagaatcgggaggcaaatgaaattntgcagcgcacaagaagggaaagttgcccattgtaaatgaagatgccaagaaacagctgctgtgtggggcagccattggcactcatgaggatgacaagtataggctggacttgctcgcccaggctggtgtggatgtagtggttttggactcttcccagggaaattccatcttccagatcaatatgatcaagtacatcaaagacaaataccctaatctccaagtcattggaggcaatgtggtcactgctgcccaggccaagaacctcattgatgcaggtgtggatgccctgcgggtgggcatgggaagtggctccatctgcattacgcaggaagtgctggcctgtgggcggccccaagcaacagcagtgtacaaggtgtcagagtatgcacggcgctttggtgttccggtcattgctgatggaggaatccaaaatgtgggtcatattgcgaaagccttggcccttggggcctccacagtcatgatgggctctctcctggctgccaccactgaggcccctggtgaatacttcttttccgatgggatccggctaaagaaatatcgcggtatgggttctctcgatgccatggacaagcacctcagcagccagaacagatatttcagtgaagctgacaaaatcaaagtggcccagggagtgtctggtgctgtgcaggacaaagggtcaatccacaaatttgtcccttacctgattgctggcatccaacactcatgccaggacattggtgccaagagcttgacccaagtccgagccatgatgtactctggggagcttaagtttgagaagagaacgtcctcagcccaggtggaaggtggcgtccatagcctccattcgtatgagaagcggcttttctgaaaagggatccagcacacctcctcggtttttttttcaataaaagtttagaaagaaa

SEQ ID NO: 616214 - DNA, 184 bp, Homo sapiens
  misc_feature (89)..(89): n is a, c, g, or t
  misc_feature (137)..(137): n is a, c, g, or t
  misc_feature (164)..(164): n is a, c, g, or t
ggggtccgggtgggtttgatgtacacactcaccactcactcttttgatatcagatcaacattatctttccattctccatcatctatcancatccatcttccatccatccattctccatctgtccatccatccatatncatacatccatccatcctccattcagncatcctccatctgtccttca

SEQ ID NO: 616215 - DNA, 452 bp, Homo sapiens
acagcctgccaagtagctgggactataggcctgtgccaccatacctggctaatttttgtatttttgttagagacggggtttcgccatgttggccaggctggtctcaaactcctgacctcaagtgatccacccctgtcggcctctgaaagtgctgggattacaggcctgagccagcatacccagccaacatctggttcttacgtacaattttcctcccccattccctactaaggagtgtgtaactatgctgtgctgcagggtgctttgtacatttgccgatgactgcatatatgacattgcatgcttctggttttttggttttcaaatggtagtgtgtcatatgaatatgtgaacagctcatcttcctgccagccaaaaggagagtgaaagaataaaatcattttggttattcccactgacacgattttggaatatagcaaggcctccttatt

SEQ ID NO: 616216 - DNA, 113 bp, Homo sapiens
tattctcttgatttgagcccctcagtgtatcactgcaagataaagaggtagaaaagacaaacagaccacaaaagacaagaacccagacctattgacagacgcaccttttgcac

SEQ ID NO: 616217 - DNA, 201 bp, Homo sapiens
  misc_feature (48)..(48): n is a, c, g, or t
  misc_feature (63)..(63): n is a, c, g, or t
  misc_feature (147)..(147): n is a, c, g, or t
cgagaagacacagaaggggaaggaggagaaactgagacggtccggaangagccgaaagcggtntccgggtgggtggcaggaggtggaaacagcctaaagaaaagcagccagggtaatgcgaaagagaatgagctgaacgggcggggntgaaggggagaataaacgaccaggaattcgccggagagcaagagggaaaaaccg

SEQ ID NO: 616218 - DNA, 105 bp, Homo sapiens
agcggggcgcgcctgggggcctgggtgccctgggcaggagcgatggcactagtaccttgataaagttcttacggcaccagaagagaataaagtaactctccttcc

SEQ ID NO: 616219 - DNA, 179 bp, Homo sapiens
tagaggatccccgcatttgctcccatcagtataaggtaattctctacgctttattttttcaggctttacaagtgctaagttacttaacctggccgggcgactgatccagaacgtgggctaagatactgtttctcatttctgcttccctgtgctttgcttcctgatgggagcaagactgg

SEQ ID NO: 616220 - DNA, 133 bp, Homo sapiens
  misc_feature (81)..(81): n is a, c, g, or t
tcgaattcacaggcttcttaacgcatgtacggggacactgaggtttgagggctgcacgtgagcgtatcattatagccgctngtattccacgcctgagtgacagagcaagatcctatctctaaaaaagaaaaaa

SEQ ID NO: 616221 - DNA, 653 bp, Homo sapiens
tcgcggcacatcatgttgccggggtggcagtcgccgtgcatgcggatgttctggtgcggggtctcggcgtagacctgttgcacccgtttgagcaggtcgcgggccacggattcgtaggccggcagcaggctgcggggaatgaagttgccttccagcagggtggtcagcgagtcttcgccgaagttcttcacaccgagggcttcgcggtgttcgaacggacgggtggcgcccacggcgtgcaggcggccgagcagttgtccgaggcgatagagctggtcgagattgcccggttccggggcccggccgccacgccgggggaacagggtgaagcgaaaaccggcgtgttcgaacaggctttcgccgttgtggatcatcggcgcgacgaccgggacgtcgcagtcggccagttcgaaggtgaagcggtgttcttcgaggatggcctcgttggtccagcgctgagggcggtagaacttggcgatcaggggttcgctgtcttcgatgcccacctgatagacacggttttcgtagctgttgagcgccaggacccgggcgtcactgagaaagccgatgctttccacggcgtcgagcaccaggtcgggggtgagtgtttcaaacgggtgggacatgctgactcctgcgggcggcaggcggcc

SEQ ID NO: 616222 - DNA, 212 bp, Homo sapiens
tataaatctcttggtcttcatacctgtggtgctccccatcaggggtaccccagcagccattatgggatgaagatgaacaatgtgataggggttgggaccaaaagaggaaaaggaatggggcattccaagtagaaggcacagcatgaaataacgcacggggtgaataattacgaggggacagtatacagacagatctggttagggactgctgt

SEQ ID NO: 616223 - DNA, 182 bp, Homo sapiens
ccaaggtcccttaagcctatctgtaagtattttttaagattggttctttttgggaggcttaggcaggcagatcacttgaggtcaagagtttgagacctgcctgggcaacatggtaaaacccaatctctattaaaaatacaaaaactagctgggtgcagtggctcatgcctgtaatcccagca

SEQ ID NO: 616224 - DNA, 126 bp, Homo sapiens
  misc_feature (96)..(96): n is a, c, g, or t
  misc_feature (121)..(121): n is a, c, g, or t
agggtatcccgccaaacacactgaatgaataatgaaagatgttataaagccaaattatgaaaagggcatcagttattaaacacttgtacagatgtnttacacaccatcttatgtatgcctncataa

SEQ ID NO: 616225 - DNA, 212 bp, Homo sapiens
  misc_feature (35)..(35): n is a, c, g, or t
cggcacgaggggctggcacggtggggccccgtctntactaaaaaaaaaaaaaatgcagaggattggcctggctcagtggcgggcgcctgtggtcccagctgctcgggaggctggggcaggggagtggcgtgggcccgggaggcggagctttcagtgggccgggatggcgccactgcggtccggcctgggcgagggagcgagactccgtctca

SEQ ID NO: 616226 - DNA, 179 bp, Homo sapiens
  misc_feature (66)..(66): n is a, c, g, or t
tccgttatcaccttttgccgcagagtatctgtcccgacggtcatccttcatgcctcctctaccccntgtgaaacgacctgaaccctctgtcttcgacaactgaagcaacttgggattaatatgcttgattagcttcacggaaaggcgccaggacgactaaggtcgctcacttgctttat

SEQ ID NO: 616227 - DNA, 267 bp, Homo sapiens
  misc_feature (30)..(30): n is a, c, g, or t
  misc_feature (97)..(97): n is a, c, g, or t
  misc_feature (118)..(118): n is a, c, g, or t
aataagtctcacgaggcctgatggtttttnagggtggagttcccctgcatatgctctctattgcctgctgtcatgtaagacatatgttgctttgccntcaccttctgccatgactgtngggcctccccagcaatgtggaactgtgagtcaattaaacctcttttctttacaaattacccagtctctgatttgtctttattagcagcatgagaacaggctaatagacacaggctcctaaaagttggatataattttccatggtaagaa

SEQ ID NO: 616228 - DNA, 110 bp, Homo sapiens
gcgcggcggcgccgggagggcgttcgagtgtttcgttcgcccgctttttgccaagcagccagcagccttgcagccaagtaactttccgccgcggccaagcagccaaccaa

SEQ ID NO: 616229 - DNA, 101 bp, Homo sapiens
atatagactgagctggtaccctcgcgacgtgtatcctgctagagacagcacaaatcactctgccaacaaaatttctgttatttcaactcctggccactttc

SEQ ID NO: 616230 - DNA, 629 bp, Homo sapiens
ggtatgaagtgtaacagaacagacttgtaccacctgaaactgctgctgcaagttcagatcaggcaaggaacaaacctcgtaacaattaagcaagaccaaagaagagtacacttaagttgaagacacaacacatggattcttgaaactagagaagtatggtgctcatacatcgaagcagcttggaaatgagcgacgttccaagaggcggctagtagtctttgtgttgtcttcagtgctgtacttggtgagtatttgcccggtgacagcagcagttgtatgtctttattaagcatgtggtaagatcgatgttctctcgatcttttttttaatactgagcaatgtttcatccttggaaacgggtgcggaagataagatagaagtcagcaaatactacgtgaaagtgcagatatttgagtatcactgcgagatgagcttgtgatccaagacttctccacaacaatggacataatgggtaccctaatggtacttcagcagcacgtggtgaaactgggggttattgaaaaaatgttaacctcttacggatttattcagtgttcagaagtcaagctagactttttcttccactgttcacagatttattggggaactggaaaggattaagtggaata

SEQ ID NO: 616231 - DNA, 160 bp, Homo sapiens
gttatgatgccgaggccagtcagagcatgtgtgctgcaggccgaacttctccatgcatgtccaagccactggcaggagcagagtgtgatgtaagtcagcatgtagcacatggacagccggtcaatggcaaaggcactgacaccgtagaagtgcatgaaga

SEQ ID NO: 616232 - DNA, 861 bp, Homo sapiens
tgtgaagtatttgttccggcgccgtgtgtgacgggggtcttccatccatatgccgccgccgaggggtgctcttctcgcccatgttggacgtcgtcctacactctgtgtcagtcggcggagtcccccctcccttgcgacgaattgtctcccagcccccggggtaccccaacacgggtgttgctctgcctctatcaagggcggccccgtgtccataagcgagacaaaacttctgtggggccacccctaaataaaggactggcgagtcatcctgtttgtcaccgctcggtgtcatgggagccaatcgcttcactgaccacaaggcgaacacttccacacggtcgtgaacacggttgtccaaaccccacagtgggagcaaatgtgggacggggagaccccccgaggtaaagagggggccccgctgatttcagggagaagtcctccaccttgtaccctcccagccccgaatttgtggagtacgcgtcccccaacatgtgatttgcttcaaggtacagaggcagcaccaaatttgcaggcgccccatcgagggagcaacggagtggcgtttctattatttgtttttcggccattatacagcttctttgatagctcttgaactacttactatagaaccccccttgtcaagatgaatactcccatcctacctcacacgttttataggcaccacatcttggtggacaagtgcccacacaacaaacctaactttttggagatcaacatgaacacactgatgcaccgctctgaagtacttcacaccacatcatgacacccactctcgctggacccaaaatatagaaagaaaaaaataacaaaataaagaaaaaaacgaaaacccacatgaca

SEQ ID NO: 616233 - DNA, 292 bp, Homo sapiens
gggcgtggaacgcatgatcctccaacagctgtgtgcacggcagacctgggtccggtggtggtgacggttatttgtctcacaaagcaaggacacaaaaaaaacacaaagtcaccattaggcaaataccaataactgctgattcgtcgacggaaactaacgttagtgggttcttgagaggatattctcatggtgtccccgcaagatactcattacaccaaagaaaacagtaactctacagggaagagacctggtagacaccacctacatcctggagcagcaggcaaagacagga

SEQ ID NO: 616234 - DNA, 534 bp, Homo sapiens
acgcgcactagttcaaagttagaacgggaagaatgggtggcaaggtggctcctggacaagctcacccagcacatgttgccctgaagctcggggccttggtttctgtccctggcgatatctatatttaataaatttttatataactacacagagaaatagaaaatataaaatctgaggggtcggggaagaaacgtgaggaactcaagcaggaagccagagctgacgaggtacattcaggccaaattgacctcctccttgacccctttggcttctggcttctcctcctttggttctctcctcttcggtgacttctttcttctcctctgggccttacgcttttacatcctctgtttggactctcctggcttttttgaagttggaagagtttcttgcggcccccctctccctcctcttcaggatcggagaactcttcctcacaggcaattcgtttgtcagaggagccgatcgagatgcgctatccagggtcagtctacgtcctcatcgccaatctcctcaaggattgcgtactcagga

SEQ ID NO: 616235 - DNA, 747 bp, Homo sapiens
  misc_feature (9)..(9): n is a, c, g, or t
  misc_feature (11)..(11): n is a, c, g, or t
  misc_feature (19)..(19): n is a, c, g, or t
gcggggttncngtggggcncgcgttgaggctgcggtcatggagggagcaggagctggatccggcttccggaaggagctggtgagcaggctgctgcacctgcacttcaaggatgacaagaccaaagaagcagcagtccgcggcgtgcggcaggcccaggcagaagacgcgctccgtgtggacgtggaccagctggagaaggtgcttccgcagctgctcctggacttctagggatctcagccgtggctgaggccacccccagaggagcccctggtccacagaagcaggccttgtgtttccagcggcctctgataagaggcagggaaggacctgaaggatttggagttgattcaaacaagatctctgggagtctccagcctgtgcagaaggggcaggactgcagtgcactgcgggccttggagtgtccagtggggacactggtgtgggaaggggcagcacctggggagtccctgcctctcctccctgggacaatagtgtgcatgccacccggggtcctacaggcaggtgctgggaaaggcctggccagcaggtagcctgtgtgtttgacaaacagcagctggcagcgctgcctcctgcccacattcctgccacccgacatcaaagctggcgtgtgacctttccagccatgcgatattccccttggaagatgcttccccaggctataaatttgttctcacaaagcaacatcaataaatcaaaactgtctctcccaaaaaaaaaaaaaaaaa

SEQ ID NO: 616236 - DNA, 801 bp, Homo sapiens
  misc_feature (9)..(9): n is a, c, g, or t
  misc_feature (11)..(11): n is a, c, g, or t
  misc_feature (19)..(19): n is a, c, g, or t
gcggggttncngtggggcncgcgttgaggctgcggtcatggagggagcaggagctggatccggcttccggaaggagctggtgagcaggctgctgcacctgcacttcaaggatgacaagaccaaagtgagcggggacgcgctgcagctcatggtggagttgctgaaggtcttcgttgtggaagcagcagtccgcggcgtgcggcaggcccaggcagaagacgcgctccgtgtggacgtggaccagctggagaaggtgcttccgcagctgctcctggacttctagggatctcagccgtggctgaggccacccccagaggagcccctggtccacagaagcaggccttgtgtttccagcggcctctgataagaggcagggaaggacctgaaggatttggagttgattcaaacaagatctctgggagtctccagcctgtgcagaaggggcaggactgcagtgcactgcgggccttggagtgtccagtggggacactggtgtgggaaggggcagcacctggggagtccctgcctctcctccctgggacaatagtgtgcatgccacccggggtcctacaggcaggtgctgggaaaggcctggccagcaggtagcctgtgtgtttgacaaacagcagctggcagcgctgcctcctgcccacattcctgccacccgacatcaaagctggcgtgtgacctttccagccatgcgatattccccttggaagatgcttccccaggctataaatttgttctcacaaagcaacatcaataaatcaaaactgtctctcccaaaaaaaaaaaaaaaaa

SEQ ID NO: 616237 - DNA, 154 bp, Homo sapiens
  misc_feature (120)..(120): n is a, c, g, or t
aatagccatgactctcaagatgtatgctgttttgactggggtatgatgggtccaccccttttcgtgttgttcgggctgtctgtttcagttcaggagtgctaggtatagtccttcccaagnctggtctccttccagcttttgatataggatgtga

SEQ ID NO: 616238 - DNA, 211 bp, Homo sapiens
  misc_feature (15)..(15): n is a, c, g, or t
  misc_feature (41)..(41): n is a, c, g, or t
  misc_feature (50)..(50): n is a, c, g, or t
  misc_feature (173)..(173): n is a, c, g, or t
  misc_feature (193)..(193): n is a, c, g, or t
  misc_feature (208)..(208): n is a, c, g, or t
ggagtggctggcggnggggcctgggtgtccgcccagtgccngaggacgcnggctttggcaccgaagcccggcatcagaggcaaccccgcggcttctgccaacggtcggggccctcggggaccagcccttcgtggggttgctgccaaaaaacctcagtcgggaggagctggttnatgcgctgcgggcagccgtngtggtccggaaaggncct

SEQ ID NO: 616239 - DNA, 190 bp, Homo sapiens
  misc_feature (174)..(174): n is a, c, g, or t
aacaaccgtgacaaatgctttctgataacgcaattgaaggcggcatgctagagacagcacaaaaaaccaatgttctgttaggtgatctcggtgcaatgcagggtgcgatgctaatgacgatgaaagccaacaccgaggtgacatctgccaaccaggttttgaaaaataatgaanatgcttccaagtctga

SEQ ID NO: 616240 - DNA, 184 bp, Homo sapiens
taccggaccatcagtgcgggagcacacaccggctagccatttctattgggttgtctttctactgttgaattataagagttccttatatattctggatataaattcctttatcagatacatggtttgcaaatattttcttccattttatttctttcaattctgtgggttgttttttcactctctt

SEQ ID NO: 616241 - DNA, 669 bp, Homo sapiens
  misc_feature (9)..(9): n is a, c, g, or t
  misc_feature (11)..(11): n is a, c, g, or t
  misc_feature (19)..(19): n is a, c, g, or t
gcggggttncngtggggcncgcgttgaggctgcggtcatggagggagcaggagctggatccggcttccggaaggagctggtgagcaggctgctgcacctgcacttcaaggatgacaagaccaaacttccgcagctgctcctggacttctagggatctcagccgtggctgaggccacccccagaggagcccctggtccacagaagcaggccttgtgtttccagcggcctctgataagaggcagggaaggacctgaaggatttggagttgattcaaacaagatctctgggagtctccagcctgtgcagaaggggcaggactgcagtgcactgcgggccttggagtgtccagtggggacactggtgtgggaaggggcagcacctggggagtccctgcctctcctccctgggacaatagtgtgcatgccacccggggtcctacaggcaggtgctgggaaaggcctggccagcaggtagcctgtgtgtttgacaaacagcagctggcagcgctgcctcctgcccacattcctgccacccgacatcaaagctggcgtgtgacctttccagccatgcgatattccccttggaagatgcttccccaggctataaatttgttctcacaaagcaacatcaataaatcaaaactgtctctcccaaaaaaaaaaaaaaaaa

SEQ ID NO: 616242 - DNA, 857 bp, Homo sapiens
  misc_feature (9)..(9): n is a, c, g, or t
  misc_feature (11)..(11): n is a, c, g, or t
  misc_feature (19)..(19): n is a, c, g, or t
gcggggttncngtggggcncgcgttgaggctgcggtcatggagggagcaggagctggatccggcttccggaaggagctggtgagcaggctgctgcacctgcacttcaaggatgacaagaccaaagaagcagcagtccgcggcgtgcggcaggcccaggcagaagacgcgctccgtgtggacgtggaccagctggagaaggtgcttccgcagctgctcctggacttctagggatctcagccgtggctgaggccacccccagaggagcccctggtccacagaagcaggccttgtgtttccagcggcctctgataagaggcagggaaggacctgaaggatttggagttgattcaaacaagatctctgggagtctccagcctgtgcagaaggggcaggactgcagtgcactgcgggccttggagtgtccagtggggacactggtgtgggaaggggcagcacctggggagtccctgcctctcctccctgggacaatagtgtgcatgccacccggggtcctacaggcaggtgctgggaaaggcctggccagcaggtagcctgtgtgtttgacaaacagcagctggcagcgctgcctcctgcccacattcctgccacccgacatcaaagctggcgtgtgacctttccagccatgcgatattccccttggaagatgcttccccaggctataaatttgttctcacaaagcaacatcaataaatcaaaactgtctctcccaaaaaaaaaaaaaaaaactccgagcgctttttggcgggccgcaaaaagggttcggaaggcccggggcagtgtccgggcccttttgtaagggaaatcccggcccaaagggggtaattaaaccggacgg

SEQ ID NO: 616243 - DNA, 1286 bp, Homo sapiens
  misc_feature (1196)..(1196): n is a, c, g, or t
  misc_feature (1225)..(1225): n is a, c, g, or t
tttatgtattcttactctagttgtttattaagaatgacaagcacgtcttttcaacatgttagtgaacaacgtctctttattttggggaggagcccggcgggacagtagaagtaaacccttgcctgttaattgaactggccgaggtcctgcggggagtgtggggtgggacgtgaagtggcagctcctcagtgacaaggccactatgtgctatacgcatgcgctgtttcttcagcgccagctccgcccccgccgcagcgaggcgggtaggttccgcccgcgcgcactacgccctgacgtcagcgtcgcgcgcagcgcagtgacgaaatcggctggtttatattggcgcggcccagacggcagaggtctctgcggcgcggtcctcggagacacgcggcggtgtcctgtgttggccatggccgactacctgattagtgggggcacgtcctacgtgccagacgacggactcacagcacagcagctcttcaactgcggagacggcctcacctacaatgactttctcattctccctgggtacatcgacttcactgcagaccaggtggacctgacttctgctctgaccaagaaaatcactcttaagaccccactggtttcctctcccatggacacagtcacagaggctgggatggccatagcaatggcgcttacaggcggtattggcttcatccaccacaactgtacacctgaattccaggccaatgaagttcggaaagtgaagaaatatgaacagggattcatcacagaccctgtggtcctcagccccaaggatcgcgtgcgggatgtttttgaggccaaggcccggcatggtttctgcggtatcccaatcacagacacaggccggatggggagccgcttggtgggcatcatctcctccagggacattgattttctcaaagaggaggaacatgactgtttcttggaagagataatgacaaagagggaagacttggtggtagcccctgcaggcatcacactgaaggaggcaaatgaaattctgcagcgcagcaagaagggaaagttgcccattgtaaatgaagatgatgagcttgtggccatcattgcccggacagacctgaagaagaatcgggactacccactagcctccaaagatgccaagaaaaggtgttgtgtggggcagccttgggctcctgagggtgaccagttagggtggattggtngcccaggtgggtgcgttctggttgggccncccgggaatccctttccaaattgggcggtttagaaaacccattccatttgggcagggcccg

SEQ ID NO: 616244 - DNA, 937 bp, Homo sapiens
  misc_feature (9)..(9): n is a, c, g, or t
  misc_feature (11)..(11): n is a, c, g, or t
  misc_feature (19)..(19): n is a, c, g, or t
gcggggttncngtggggcncgcgttgaggctgcggtcatggagggagcaggagctggatccggcttccggaaggtgagggccggagggcaggggctaggcaggcgcggacgctccgtcccgacctcacgcgtgacactgtgagggccagacgccagcccccgcgccgccccctgtgcctttgaggttgggcccgttctcagactccatctccggccgggccgcgcgccccgcgccctcgtgggctggtgtctcgcagctggaggagctggtgagcaggctgctgcacctgcacttcaaggatgacaagaccaaagaagcagcagtccgcggcgtgcggcaggcccaggcagaagacgcgctccgtgtggacgtggaccagctggagaaggtgcttccgcagctgctcctggacttctagggatctcagccgtggctgaggccacccccagaggagcccctggtccacagaagcaggccttgtgtttccagcggcctctgataagaggcagggaaggacctgaaggatttggagttgattcaaacaagatctctgggagtctccagcctgtgcagaaggggcaggactgcagtgcactgcgggccttggagtgtccagtggggacactggtgtgggaaggggcagcacctggggagtccctgcctctcctccctgggacaatagtgtgcatgccacccggggtcctacaggcaggtgctgggaaaggcctggccagcaggtagcctgtgtgtttgacaaacagcagctggcagcgctgcctcctgcccacattcctgccacccgacatcaaagctggcgtgtgacctttccagccatgcgatattccccttggaagatgcttccccaggctataaatttgttctcacaaagcaacatcaataaatcaaaactgtctctcccaaaaaaaaaaaaaaaaa

SEQ ID NO: 616245 - DNA, 1289 bp, Homo sapiens
  misc_feature (1143)..(1143): n is a, c, g, or t
  misc_feature (1179)..(1179): n is a, c, g, or t
  misc_feature (1186)..(1186): n is a, c, g, or t
  misc_feature (1199)..(1199): n is a, c, g, or t
  misc_feature (1203)..(1203): n is a, c, g, or t
  misc_feature (1206)..(1207): n is a, c, g, or t
  misc_feature (1219)..(1219): n is a, c, g, or t
  misc_feature (1228)..(1228): n is a, c, g, or t
  misc_feature (1236)..(1236): n is a, c, g, or t
  misc_feature (1238)..(1238): n is a, c, g, or t
tttatgtattcttactctagttgtttattaagaatgacaagcacgtcttttcaacatgttagtgaacaacgtctctttattttggggaggagcccggcgggacagtagaagtaaacccttgcctgttaattgaactggccgaggtcctgcggggagtgtggggtgggacgtgaagtggcagctcctcagtgacaaggccactatgtgctatacgcatgcgctgtttcttcagcgccagctccgcccccgccgcagcgaggcgggtaggttccgcccgcgcgcactacgccctgacgtcagcgtcgcgcgcagcgcagtgacgaaatcggctggtttatattggcgcggcccagacggcagaggtctctgcggcgcggtcctcggagacacgcggcggtgtcctgtgttggccatggccgactacctgattagtgggggcacgtcctacgtgccagacgacggactcacagcacagcagctcttcaactgcggagacggcctcacctacaatgactttctcattctccctgggtacatcgacttcactgcagaccaggtggacctgacttctgctctgaccaagaaaatcactcttaagaccccactggtttcctctcccatggacacagtcacagaggctgggatggccatagcaatggcgcttacaggcggtattggcttcatccaccacaactgtacacctgaattccaggccaatgaagttcggaaagtgaagaaatatgaacagggattcatcacagaccctgtggtcctcagccccaaggatcgcgtgcgggatgtttttgaggccaaggcccggcatggtttctgcggtatcccaatcacagacacaggccggatggggagccgcttggtgggcatcatctcctccagggacattgattttctcaaagaggaggaacatgactgtttcttggaagagataatgacaaagagggaagacttggtggtagcccctgcaggcatcacactgaaggaggcaaatgaaattctgcagcgcagcaagaagggaaagttgcccattgtaaatgaagatgatgagcttgtggccatcattgcccggacagacctgaagaagaatcggataccactagctccaagatgccaagaaacagctgctgngtgggggaggcattggcctctgcggatgaacagttnggctggnttgtcccccaggngggntgnngtgggtgggacncccgggaanctctccananattgacagaatcaagagagactatcacagtgggacgaggtaatggcagcaa

SEQ ID NO: 616246 - DNA, 991 bp, Homo sapiens
  misc_feature (9)..(9): n is a, c, g, or t
  misc_feature (11)..(11): n is a, c, g, or t
  misc_feature (19)..(19): n is a, c, g, or t
gcggggttncngtggggcncgcgttgaggctgcggtcatggagggagcaggagctggatccggcttccggaaggtgagggccggagggcaggggctaggcaggcgcggacgctccgtcccgacctcacgcgtgacactgtgagggccagacgccagcccccgcgccgccccctgtgcctttgaggttgggcccgttctcagactccatctccggccgggccgcgcgccccgcgccctcgtgggctggtgtctcgcagctggaggagctggtgagcaggctgctgcacctgcacttcaaggatgacaagaccaaagtgagcggggacgcgctgcagctcatggtggagttgctgaaggtcttcgttgtggaagcagcagtccgcggcgtgcggcaggcccaggcagaagacgcgctccgtgtggacgtggaccagctggagaaggtgcttccgcagctgctcctggacttctagggatctcagccgtggctgaggccacccccagaggagcccctggtccacagaagcaggccttgtgtttccagcggcctctgataagaggcagggaaggacctgaaggatttggagttgattcaaacaagatctctgggagtctccagcctgtgcagaaggggcaggactgcagtgcactgcgggccttggagtgtccagtggggacactggtgtgggaaggggcagcacctggggagtccctgcctctcctccctgggacaatagtgtgcatgccacccggggtcctacaggcaggtgctgggaaaggcctggccagcaggtagcctgtgtgtttgacaaacagcagctggcagcgctgcctcctgcccacattcctgccacccgacatcaaagctggcgtgtgacctttccagccatgcgatattccccttggaagatgcttccccaggctataaatttgttctcacaaagcaacatcaataaatcaaaactgtctctcccaaaaaaaaaaaaaaaaa

SEQ ID NO: 616247 - DNA, 432 bp, Homo sapiens
  misc_feature (393)..(393): n is a, c, g, or t
gagcccagaccctctcctaagagcccccaccaaaatcctctctaggggcaggggatagagcaagacatgtcccccacccagagcaggggctgcggtcagggagctcaggggactcagccactccatggcagagcctgtttaatacaacttgtgtctgggatggcctggatcagagaccctatctaaggagcatgttcagaaaccatgttgctgggatcagacagcagggtccaactgcaggcctgtggtgcaggagctgtgtgaccatggggctgtcaccagggcctctctgtgctgggttcctccagtatagaggagaggcagtatagaggagagggccgcgtcctcacagtgcattcttgtgttccagcatccccgaccagccccaaggtntttcccgttgagcctttgcagcacccagccagatgggga

SEQ ID NO: 616248 - DNA, 1121 bp, Homo sapiens
  misc_feature (9)..(9): n is a, c, g, or t
  misc_feature (11)..(11): n is a, c, g, or t
  misc_feature (19)..(19): n is a, c, g, or t
gcggggttncngtggggcncgcgttgaggctgcggtcatggagggagcaggagctggatccggcttccggaaggtgagggccggagggcaggggctaggcaggcgcggacgctccgtcccgacctcacgcgtgacactgtgagggccagacgccagcccccgcgccgccccctgtgcctttgaggttgggcccgttctcagactccatctccggccgggccgcgcgccccgcgccctcgtgggctggtgtctcgcagctggaggagctggtgagcaggctgctgcacctgcacttcaaggatgacaagaccaaagtgagcggggacgcgctgcagctcatggtggagttgctgaaggtcttcgttgtgggtgagcccaggcccacgctccctccgggcacagcatccggaattttgcgtttttccagcgggaaaaccaagacgtgttttcccgtttcccacaagggcctaaacttgggtctcctgagcctgtttgtcagaagcagcagtccgcggcgtgcggcaggcccaggcagaagacgcgctccgtgtggacgtggaccagctggagaaggtgcttccgcagctgctcctggacttctagggatctcagccgtggctgaggccacccccagaggagcccctggtccacagaagcaggccttgtgtttccagcggcctctgataagaggcagggaaggacctgaaggatttggagttgattcaaacaagatctctgggagtctccagcctgtgcagaaggggcaggactgcagtgcactgcgggccttggagtgtccagtggggacactggtgtgggaaggggcagcacctggggagtccctgcctctcctccctgggacaatagtgtgcatgccacccggggtcctacaggcaggtgctgggaaaggcctggccagcaggtagcctgtgtgtttgacaaacagcagctggcagcgctgcctcctgcccacattcctgccacccgacatcaaagctggcgtgtgacctttccagccatgcgatattccccttggaagatgcttccccaggctataaatttgttctcacaaagcaacatcaataaatcaaaactgtctctcccaaaaaaaaaaaaaaaaa

SEQ ID NO: 616249 - DNA, 931 bp, Homo sapiens
  misc_feature (9)..(9): n is a, c, g, or t
  misc_feature (11)..(11): n is a, c, g, or t
  misc_feature (19)..(19): n is a, c, g, or t
gcggggttncngtggggcncgcgttgaggctgcggtcatggagggagcaggagctggatccggcttccggaaggagctggtgagcaggctgctgcacctgcacttcaaggatgacaagaccaaagtgagcggggacgcgctgcagctcatggtggagttgctgaaggtcttcgttgtgggtgagcccaggcccacgctccctccgggcacagcatccggaattttgcgtttttccagcgggaaaaccaagacgtgttttcccgtttcccacaagggcctaaacttgggtctcctgagcctgtttgtcagaagcagcagtccgcggcgtgcggcaggcccaggcagaagacgcgctccgtgtggacgtggaccagctggagaaggtgcttccgcagctgctcctggacttctagggatctcagccgtggctgaggccacccccagaggagcccctggtccacagaagcaggccttgtgtttccagcggcctctgataagaggcagggaaggacctgaaggatttggagttgattcaaacaagatctctgggagtctccagcctgtgcagaaggggcaggactgcagtgcactgcgggccttggagtgtccagtggggacactggtgtgggaaggggcagcacctggggagtccctgcctctcctccctgggacaatagtgtgcatgccacccggggtcctacaggcaggtgctgggaaaggcctggccagcaggtagcctgtgtgtttgacaaacagcagctggcagcgctgcctcctgcccacattcctgccacccgacatcaaagctggcgtgtgacctttccagccatgcgatattccccttggaagatgcttccccaggctataaatttgttctcacaaagcaacatcaataaatcaaaactgtctctcccaaaaaaaaaaaaaaaaa

SEQ ID NO: 616250 - DNA, 324 bp, Homo sapiens
  misc_feature (15)..(16): n is a, c, g, or t
  misc_feature (72)..(72): n is a, c, g, or t
  misc_feature (88)..(88): n is a, c, g, or t
  misc_feature (95)..(95): n is a, c, g, or t
  misc_feature (121)..(121): n is a, c, g, or t
  misc_feature (140)..(140): n is a, c, g, or t
  misc_feature (151)..(151): n is a, c, g, or t
  misc_feature (154)..(154): n is a, c, g, or t
  misc_feature (162)..(162): n is a, c, g, or t
  misc_feature (167)..(167): n is a, c, g, or t
  misc_feature (173)..(173): n is a, c, g, or t
  misc_feature (179)..(179): n is a, c, g, or t
  misc_feature (200)..(200): n is a, c, g, or t
  misc_feature (243)..(243): n is a, c, g, or t
  misc_feature (265)..(268): n is a, c, g, or t
  misc_feature (277)..(277): n is a, c, g, or t
  misc_feature (314)..(314): n is a, c, g, or t
  misc_feature (318)..(318): n is a, c, g, or t
  misc_feature (322)..(322): n is a, c, g, or t
gaacttcaggcacanngtgctgatgagttattaaagcgggtgtacgggagtttctccgtaaatccagaatcngatacaatgtctcttngctatangaccttgaaaatcttccggcatccanggattccattgtgcatcangctggcatgtngangcgaaatngtttngcctcngtcttngaaaaatacttccaattccangacgcgggcaaggaaggagagaacagggcagttatccattatngggatgatgagaccatgtatgnnnngtctaaaanggacagagtcacagtagtcttcagcacagtgtttacngatnacgncg

SEQ ID NO: 616251 - DNA, 401 bp, Homo sapiens
atcatttaatgtgggaaaggataatcttttcaacaaatggtgctgagaaaactggatatccacaggcaaaagaatggagttggatccttaccttataccatatacaaaaattaactcaaaatagatcaaagagggccaggcgtggtgtaatcccagcactttgggaggccaaggtaggaggagtgctcgagcccaggagttcaagaccagcctgggcaacatagggaaaccctgtctctacaacaagtaaccaaaattagctgggcacagtggcacacgcctgtggtcccagctactagggaggctgaggcgggcagatcacttgagcccaggaggccaaggcacagtgagccatgactataccaccacactgcagctggcatcagaagtcttgtgtcaaa

SEQ ID NO: 616252 - DNA, 1225 bp, Homo sapiens
  misc_feature (9)..(9): n is a, c, g, or t
  misc_feature (11)..(11): n is a, c, g, or t
  misc_feature (19)..(19): n is a, c, g, or t
gcggggttncngtggggcncgcgttgaggctgcggtcatggagggagcaggagctggatccggcttccggaaggagctggtgagcaggctgctgcacctgcacttcaaggatgacaagaccaaaaggtgcgggtgggggtgcgggcgggaggtgggtccccgtgtctgtcctcagggaccctttcctgcaactctgcagggccaaggcctcgggagggcgggggtatgtctggagcacccagccagagcggtgggtgagggtcccgcataacctccccctgccttgcagtgagcggggacgcgctgcagctcatggtggagttgctgaaggtcttcgttgtgggtgagcccaggcccacgctccctccgggcacagcatccggaattttgcgtttttccagcgggaaaaccaagacgtgttttcccgtttcccacaagggcctaaacttgggtctcctgagcctgtttgtcacaggtgctgtggcctggttctgggggctgcccgtgggtgttggggggggcaccggcccaggctgaggccctcactgggctcgggtttaagatccccccagcatcccccacctctcgcgtttctcaccgcagaagcagcagtccgcggcgtgcggcaggcccaggcagaagacgcgctccgtgtggacgtggaccagctggagaaggtgcttccgcagctgctcctggacttctagggatctcagccgtggctgaggccacccccagaggagcccctggtccacagaagcaggccttgtgtttccagcggcctctgataagaggcagggaaggacctgaaggatttggagttgattcaaacaagatctctgggagtctccagcctgtgcagaaggggcaggactgcagtgcactgcgggccttggagtgtccagtggggacactggtgtgggaaggggcagcacctggggagtccctgcctctcctccctgggacaatagtgtgcatgccacccggggtcctacaggcaggtgctgggaaaggcctggccagcaggtagcctgtgtgtttgacaaacagcagctggcagcgctgcctcctgcccacattcctgccacccgacatcaaagctggcgtgtgacctttccagccatgcgatattccccttggaagatgcttccccaggctataaatttgttctcacaaagcaacatcaataaatcaaaactgtctctcccaaaaaaaaaaaaaaaaa

SEQ ID NO: 616253 - DNA, 206 bp, Homo sapiens
ggatactggtcatgttccggcacttgtgtgcacaggccttgagcaccagtttgctggctaagtagaaaagggcgacaacctggccccagttgaatgttgcctgtcaagaaaacatgtcagctagccactctggacaaaagacctctacgggagggagtctagtgtccactggctggcaagtcatcctactgcatgcatccatgtta

SEQ ID NO: 616254 - DNA, 662 bp, Homo sapiens
attaggcgcgttctgcgtggacgtggaccagctggagaaggtgcctccgcagctggtgcgtgagcgtgggtcggggcgcaagtgggggtgcccggctggctggccctaagtgcttctcttccgcagctgctcctggacttctagggatctcagccgtggctgaggccacccccagaggagcccctggtccacagaagcaggccttgtgtttccagcggcctctgataagaggcagggaaggacctgaaggatttggagttgattcaaacaagatctctgggagtctccagcctgtgcagaaggggcaggactgcagtgcactgcgggccttggagtgtccagtggggacactggtgtgggaaggggcagcacctggggagtccctgcctctcctccctgggacaatagtgtgcatgccacccggggtcctacaggcaggtgctgggaaaggcctggccagcaggtagcctgtgtgtttgacaaacagcagctggcagcgctgcctcctgcccacattcctgccacccgacatcaaagctggcgtgtgacctttccagccatgcgatattccccttggaagatgcttccccaggctataaatttgttctcacaaagcaacatcaataaatcaaaactgtctctcccaaaaaaaaaaaaaaaaa

SEQ ID NO: 616255 - DNA, 568 bp, Homo sapiens
agttcgacggagactctacttttgcccattaaaataaaaaaaaacaaaacaaaaccagaggccgggcacggtggctcgcacctgtaatcccagcactttggaaggccgaggcgggtggatcacctgaggtctgggaattcaagaccagcctggccaacatggtgaaacccatctctacggaaaatacaaaaaattagccgggcatgctcgtgggtgccggtaatcccagctacttgggaggctgagggaggagaatcacttgaacctggagggcagaggttgcagtgagttgagatctcaccattgcattccagccggggcaacaagagcgaaactccacctcataaaaaataaggtatcttaaaagattctagcgccgtgcaaaggagaaaaaaatacttcatggctaagaacggatctgcagctgtggtcatatagggggtgcttgggggaatgggtcgggtaagaaattttcttctacaagctaaaatgaggtgtggggtccacttctctgtcatctttttcccctccacatccttccctagttgggcccccggggattagagga

SEQ ID NO: 616256 - DNA, 272 bp, Homo sapiens
acaaatctaattattattaacatttcatacacttatgaaatataaaccgctttaactatcctgcacgccataatcctattactaatagccctccaatccatacaaattctttacataacagactaggttaaaaatccctcccttactatctaatcaattggcttcccacggtactgaacctactagtacagcgactacgggggactcatgttcaactcctacattcttgccccattattcatagaaccaggcgaactgcaactccttgacgt

SEQ ID NO: 616257 - DNA, 285 bp, Homo sapiens
ccgatttagactaacacacaggaaaacactatggatatgttaaaaatgctcatcgatgggccattaccttaaagagccaaaaaataaaaaacaaacaaaaaaaaaaaattaccaggccagattttattcccggtggaatatttacaccttggaacagcaaacctgtgctcacgataaagtatgaaaacagatacaataaaccatgtgctgtgaaacaatgaccagagatatgccccggctagttactaggttctaccggggtttaggctctaccgtgggcgggat

SEQ ID NO: 616258 - DNA, 714 bp, Homo sapiens
  misc_feature (12)..(12): n is a, c, g, or t
  misc_feature (15)..(15): n is a, c, g, or t
  misc_feature (23)..(23): n is a, c, g, or t
tcttttggtccnccncgagttanttatatcgtcgatccaggcgcgtcgagattataaggagcgcgcagcggcatctataagagaaaagacgtgcctgtgccatcaataaggtgttgatgcggcaggtggtgcctgacagaggtgtgtagacccaatgaaatctgaacctccaccccagagatgccaccgtgtgcagaacgagtgcaatgatggcccccagcagcaaacagtgagtgcctgatggaggagggacgagcgtgggctatgaacattcctcatacggagcgacgaggaggtcatgaacacatgaggcgtggagagtgtggacgtggtggctatgaccatggtggaccgaggtgacggcacgcgacagcagcgaacactaagacatcaacggaagcgctggcacaagatgagagcggagatggctgggacaggagcgtggcatacccaaagcactggtggtataatcgggagaattcaaggtttatccacgccccagggtgcgcctaatcatggatgcgacccaacaagccaagtgggatagggacctaatcaaagggaccggaccgcttactggcatggacctacccaaaaacgatcctatccttcaatataccagggaaggctgtgactacccagggctggcgggactaaacaagacaggaaaccaaaatagcatacccaagaatggatggataaaccattggagaa

SEQ ID NO: 616259 - DNA, 1819 bp, Homo sapiens
gcccacctgcctggtggctccctcccctcccccatccgcatacctcctcctcctgtccccatctatcctctctgtccctacaccaagaccatcccctcatttgccatcatcccacataccactcgactggacatgatccatgcatccacactatctacccaatcctacacaataaaaaagaaaaacaagaaaaaaaacagaaaaacgagcgagcagagagaagagcagcagagaagcgcgacgcggacgacccacagacagaacaacaagagacggaggcgacgagcgaagacgagacgggagaagagagagaaggggagagagcaaaccgaaaaaacaaagacagacaccccacacacacacagaagagagaaaaagagaaagaacgacaaagcagaggagcggaagagccacaccggacggagaccagacgcagagaaggacgaagccaggacacgcgacacgagccgaccgacgagcaagcagaggcgacggaagagacagagagaaccgacgcagggagggaggcagaccgagagcagggagcagaacgagccgagcgagccgaccgcggaggacggcggcgagagcgggagaggcgggagaggcgaggagcgacacccggcagcgcgagagcaagaagagaggcgccgacagagacggcgagtgcagcacacgcagcggacggacggacgacgagaggagagagggggagcacgacggaacaggagaccgaggagcgcgggcgaggaggagaggcgaagacagaagaagaagcggtgcgacgagccggggagggcgagagaggagggagaggcgcgcagacagcgagcgcggaccgccgcgaaggggaggaccgcgaggggaagaggagggcgcggagcgagcgagacaggcggagagagcgagggcgagagcacgggagcaggaggcgaggcgagagaggagggcagcaggagcagaggaagggggaaggcgagagaaggaggggacagaaaggagaggggagagagagggacgcacagagggaacagagagcaagcgcggcggaggccgcgagggcgagaggagcgagcgggggcgagcgccgagcagcccgcaggagcggacggcggcggcgagagggcaggcgcgggagaggcgagcgcgcggcgcaggggcaggcgggggagaagcaagagcgcggcgaagggggagccgccagagaggcgcgggcagggcggagcgcggggcgaaaggcggccgagccgccgaagcgagagcgcaaagcagcgcgcagggcgcgggagagcgccaaggggagcgcaggggcgccagagggaggggcggcacgacacagcgacgcagcgcacagcgcgaagcgcccgggcagagacccgaaggcgagcccagccgccacacgagagcacgacagaagcagaccaacgcggcacagcgaggacgacgcgcggacgccgccgcgagcagacagaccagcccagcacgcgagcacacggagaggccgagccacagagcccgacacgacacagcacgccctccgggggccccttgccacagacgacacgcagacagaggcgcaaacggccgagacccgacctgcccagccgaccacggaagcacgacagaggagcgctagacgagacgcggcccgcacacgcagaagccgaggatcgcaagcacggaagcaggctgagagcctccgagcccacgcccgcccagcaccggccgcacgcacagagtcgcagcgaacctgcccacccggacgcgcagacacaagagaacgcagagaagacaagggagcagacccagagaaagcgcg

SEQ ID NO: 616260 - DNA, 1261 bp, Homo sapiens
  misc_feature (393)..(393): n is a, c, g, or t
tctcatttaactttttaaagggggtcctcaaaattcctgtggtgacaaattttgtgggctcaagttgggttctccatgtaaaagagttagcgtgattttataaacaacttaattacacgtataaaagcgtgcacacagcgccaaaaagagaaacaccaagaggtggctccaacaaaagatttcctcctgtactccttcttgtggagagggttatcacgaggacgtcgcgtgtgggtatttctagtatacaccagagtgtctttatatactatactataacacttatagcatgtggcgcaaaatgtgtggagacaccaaagacagagttgtctgtgagagacaccgggtgttctgttcgcacacacacagcgtgttataacagagagagtgcgncggtgtgcgcagagagttatatcagagcggactatacatatatatctcatatatgaagacgcctctctctgtgagaggctatatacactgtggggggacagcagaaactgtgtgtgtgtcgacacctgtgtgggccagaagcctctctcaggagacagaggcgctctctctgtgtgggtcccaccagcgtgggctctgtgtgagaaggaggacacacaacccgccacacggcgggaaaaagtgggggtgctgtgggtccactccaaattcactcctgcagcggaaacagcagagcccaaaagaggggagaaaacccccaaaaagagggggggggacaataagactctgtgggaagaaagaagctctcctctcaaagaccacacaccaccgagggggggtcttgtgcgccccgagtgagaaacgccatatttattctaacacgaaaaggggggcccagtcattattcacaccccgaagacagtgtctccagagaaaatatctacgaggggcgccgccaactctgtatcccgaagactatattttatcatcaccccgacaaaaaggggggcgacaactacaaactccttatatcccctctagatcaagcctttccacaagccacaacactactcgtgccaatacgacaacatgtggtagaaccgcgccggatggtcggcgcggcaacacccccccacatctcacacaaggggggggcaaataacgccccggcgggcggcaaaaaaatatgcgggcgcagcgggaatgtgggtacccacggagaatagaactcacccctagaagcacatggttagaaaccgcccaggcgggctcccccaacgggggggggggcaccaacacgtgggcaggg

SEQ ID NO: 616261 - DNA, 140 bp, Homo sapiens
aggaactgggaagaggggatcactactggtcaaaggagggggcagaaaacatatgggaaaaggctaagtatatgcgaggagaggaagttttgacagcagcatggaatacctgagaagggcaagcaacaggccaggaagct

SEQ ID NO: 616262 - DNA, 148 bp, Homo sapiens
  misc_feature (45)..(45): n is a, c, g, or t
  misc_feature (69)..(69): n is a, c, g, or t
gtaagaacttttggtatggatatagaaaagtttgccatctgtagnggggaaaacagtatatcacattgnggtagagtggacgggactcatgtaaggactcaatttggggaagagcattcagtggcatgctgttaggaggactaggtgt

SEQ ID NO: 616263 - DNA, 154 bp, Homo sapiens
agactctgtgctcagtgatctcccaccttgtagtttggatacagctcacatgaaccttgctaaaattttttttttgttgagacggattctctatggtggccaggctggtctcaggctcctgggctcagatggtcctcctgcctcagttccaaag

SEQ ID NO: 616264 - DNA, 193 bp, Homo sapiens
aaggtgaatagattatatccaccaacactcatcttaaccagattcagaaatatcaccatgcttttttgtgtcatcccctctaaacaacaagagtaaagactgtgttgtcttcccaacaaaagcctatattatttaagtaatagtgattgtcctttaaaaaaaatataaattttttcataagtccttactgaag

SEQ ID NO: 616265 - DNA, 144 bp, Homo sapiens
  misc_feature (58)..(58): n is a, c, g, or t
tcaagagggaagcaattaataaaggtgggtggcaggaggggaacagggtgccacctgnctggacaatccacacgaaaggcaggcgggctgtgtactggggccctgactgtgcgtccactgcttgtcttccccacctcaccaggc

SEQ ID NO: 616266 - DNA, 427 bp, Homo sapiens
aacacttccatattgcattctcaaggagctaaagttacggttctgcatctctgacagaccatggttatgatgaatctcgtttcttcactgcctcttgtaatctttcaagaaaatgtgcacagggtctacctgctacccttgcgtgatatgtaaataggattgtactggaaccccttcctctggaattgtggcccatgcacatttagcagccagtgcacactgcttattagcagcgtctgggattgccatttgatgttccaggtctgaataagggccattactccatcagcatatcctctgtagtgttctatgtccagtagcatgattctgtctagcctggtctgcacacatttcttcccaatttaaattccgtgttaggtatgcgctagcagacaaacaaatctgagccaaatgctttacatcaaag

SEQ ID NO: 616267 - DNA, 263 bp, Homo sapiens
  misc_feature (84)..(84): n is a, c, g, or t
ttcggcacgagggtctcactctgtcgcccaggctggagttcagtggcaccatctcggctccctgcaaactccacctccacctcncaggttccggtgattctcctgcctcagccccccaagtaactaggattacaagcgtgcgccaccacacctggctaatttttgcatttttagtagagaaggggcttcaccgtttggcctgctgggcttggctcggcgcccccacccctggctaccttgtgggaataaacagacaaattaga

SEQ ID NO: 616268 - DNA, 875 bp, Homo sapiens
  misc_feature (46)..(46): n is a, c, g, or t
  misc_feature (69)..(69): n is a, c, g, or t
  misc_feature (76)..(77): n is a, c, g, or t
  misc_feature (79)..(79): n is a, c, g, or t
  misc_feature (102)..(102): n is a, c, g, or t
  misc_feature (117)..(117): n is a, c, g, or t
  misc_feature (119)..(119): n is a, c, g, or t
  misc_feature (125)..(125): n is a, c, g, or t
  misc_feature (153)..(154): n is a, c, g, or t
  misc_feature (159)..(159): n is a, c, g, or t
  misc_feature (196)..(196): n is a, c, g, or t
  misc_feature (209)..(209): n is a, c, g, or t
  misc_feature (259)..(259): n is a, c, g, or t
  misc_feature (269)..(270): n is a, c, g, or t
  misc_feature (280)..(280): n is a, c, g, or t
  misc_feature (283)..(284): n is a, c, g, or t
  misc_feature (287)..(287): n is a, c, g, or t
  misc_feature (296)..(296): n is a, c, g, or t
  misc_feature (304)..(304): n is a, c, g, or t
  misc_feature (309)..(309): n is a, c, g, or t
  misc_feature (333)..(333): n is a, c, g, or t
  misc_feature (368)..(368): n is a, c, g, or t
  misc_feature (375)..(375): n is a, c, g, or t
  misc_feature (381)..(381): n is a, c, g, or t
  misc_feature (386)..(386): n is a, c, g, or t
  misc_feature (431)..(431): n is a, c, g, or t
  misc_feature (509)..(509): n is a, c, g, or t
  misc_feature (671)..(671): n is a, c, g, or t
  misc_feature (856)..(856): n is a, c, g, or t
ccgcacactcgctgcggcgcttctggctccagaccgccctccggancggacactgcgaatggttttggntatatcnncnagaagggcttcaacaacagagantcaacacagaatcangnacattntgtgtcatggactccggataactcaacnntcagnactttgtgctcagaacaggaacagagacatggatatntcctcttcctcangcgaaatgcccctggtggctgtgtgccaagtaaaaacgaagcaaaaaaanaaaaaaaaannaaaaaaaaangcnnaantggttcganaagatgcnaaaangggtgcatgaatggctttcatgcntgaagcatttgaattcattgcacgggaacatgaanaaaaganaaaaangtctnaacaaaagggtgggaaacttttggaagaataaaacacagattgcnaagaaatgtggactctggctgtccttgggtggtttccatgagcgtggccaagactgggagcagactcagaaaatctanaattgtcacgtgctgctgaacagcaaaggggcagtagtggccacttacaggaagacacatctgtgtgacgtagagattccagggcaggggcctatgtgtgaaagcaactctaccatgcctgggcccagtcttgagtcacctgtcagcacaccagcaggcaanattggtctagctgtctgctatgacatgcggttccctgaactctctctggcattggctcaagctggagcagagatacttacctatccttcagcttttggatccattacaggcccagcccactgggagcccgtctcctcttgagggtgacgtagggcagcaggtcgtggcgagtgatgatgcgcaanctagcagcacctggcgaaa

SEQ ID NO: 616269 - DNA, 246 bp, Homo sapiens
gagatcttagtcgacttctgctctggcgacttttgctctggtcgacttctgctctgccctttcactcctttcgtccccagtctactactccactccctcattcatggtttgctcatgccctttccctgccccagatgagtgagcgtttgccaggtacattgaccaacagatccagggtgggctgattggtggagccctggagtggaaatgctgggggagctacacgcggggccctggaacccctta

SEQ ID NO: 616270 - DNA, 245 bp, Homo sapiens
cgttaatctagcatattgggaggctgagcaggtggatcacctgaggtcaggagttcgagacaccctggcaacatgtaaacccatctctacaaaaattagctggacatggtagtgagtgctgtaattccagctactctgaaggctgaggtgagagaaatccccttgtgcccaggaggtcgaggctgcagtgagcgatagtcatgccactgcactccagccttggtgatagagcaagaccctgtctc

SEQ ID NO: 616271 - DNA, 331 bp, Homo sapiens
ccaagatagcgccactgccctccagcttgggtgagagtgtgacagtccccctcccccgccaaaaaaaaaaaaagaaaaagggaaaaaaaagttgctcagagaagacttcttggaggagatggctttggagcaaagacctgaattcagtcagggagaaacctaggagtgggggtggtgtaaaggctgggaagggaattcccaggttgggcccgacagtgattgtcagggccggaaaagaggatgacctgtttggttaaaaaacggccaaaagcgcagtgttatacccagcactgtgaggttgattggtttgacttcaggggtcccgagctcg

SEQ ID NO: 616272 - DNA, 905 bp, Homo sapiens
ggcaccatcgtggagggagtgcaagagagagacaggggttgattgactaaagacgaacatggcacttcagagggtacgggaagctgctgaaaaggctaagtgtgaacttctcctcatctgtgcagacctgacatcaattggccctatcttacaatggattcttctggacccaagcaatttgagatatgaagtggagccgtgctcaatttgagagggatgtgtcacctgatctaagtcagaaggactatcgctccatgttcaaaaaagctatgcgaagatgctagaagtcagcaagagtgacataggagaagtgatactatgtgggtggcctgactaggatggcccaaggtttcagtcatgacatgtcacgagtgatctttctaggcagagcctccgaagttagcagcgtgtgcaatcctgatgaggcgtgtgggccattggagctgcaattcagggagggtgtgtcggccggcgagtgtccacggactgtgctgctcggttgatgtcatctccccctgtctctggggtatagagaactctaggaggggtctagaccaaagttagtagtaggaataccagtattccacgtcaagaagagccaggtattctctatttgccggtgatggtccaagcgcaaggtggaagtgaagtgtgtcacgggtgacaccagcagatggtggagacagcaaaccccttggcacggtttactccgctgggattcactagccctcgggagtccctcagatgaggtacttcgacattgtgcagggtggcctgtttggaaacaaaggccagcgggcgcaatggacccgccgggggtaccaatgttgtaaatgggaaggcgaatcggaacggcaaccgtgacagtcgggcaccaccacaatgcagccttggcggaaaaggct

SEQ ID NO: 616273 - DNA, 899 bp, Homo sapiens
ggattctgttactctgacactatctgagcacggtccctcacacgtcatgcaggctgcaccctgaccgctacagctgacgagccgagaaggttcacagaggtcgtttgtctgcaagccaatctggaaagtgccggacttcgagctacaggctccccctccatggacctccatgggtcagattatgtgaaatgaaccgtagtacaggtcatggaatgccgctggcctatggcagagccctcgaccattctgcatacgctgaatggctgtcccacatgggaacagggccaggaccgagggatccctccgaggatcacccacagcagtggtacggcagcacagacacggacaggatgccctgtgaagctctatcttgcactggtggtaattaccaggatgacccaggagaggcctaggaaagagtcgttcaaacggcatgggcagccagcccgtagcctgtcaggaaaaatcagttgctccgccgtctgacaaaggtggataggtgagctcgggttgccctgcggctttgatggatgtggaggatgagttcgataacgggaagaggtcatcctgtcgccagtcccatcagtgctcaagtcgcagacagcatcgaaaaccaattgacctctcagtgagcaaaggacatataaagacccttctgtatgggtccaggtttaggtgtttcaatgaagaatggaaacttcagagtttttcctttagtaacacagcatcatgaaaatacggcatagtgcagaacaagggtggtccttgagagagtctctggcagctgtcaccaaggcatgtgtcctaacagaaaactcctgtttgaacggagagtagcaaattacgatctgtgctcagcccggttaacagcttgtaccgagtcaccctcagagctatac

SEQ ID NO: 616274 - DNA, 143 bp, Homo sapiens
ggagtggtggggcacgcctgttgttgcagctactcatgaggttgagctgggagtatcgcttaagcatgggaggtcaaagctgcaatgagctgtgattgagctactgcactccagcttgggtaacagagcaagatcctgcctcg

SEQ ID NO: 616275 - DNA, 129 bp, Homo sapiens
tcggtacctttgagccttcagtagaagcatgtctcagggatagcaggttagttttaggttgagggtatagatagtgtctaataaaaaatagttcattttaatacatttgtcaagcacttactatttgcc

SEQ ID NO: 616276 - DNA, 322 bp, Homo sapiens
ctactactactaaattcgcgggcggtcgacgtcgagcggacacatgacctatgtgtggaggaggatcagaaggtgaagtatgggcagggcgcggtggctcatgcctttaatcccagaggccgaggctggtggatcacttgaggtcaggagtttgagaccagcctgggcaaaatggcgaaatcctgtctccactaaaaatacaaaaattagctgggcgtggtggcgggcgcctgcaatcccagctactcaggaggccgaggcagagaattgcttgaacctgggaggtggaggttgcaggccaagatcgcgccactgcactcca

SEQ ID NO: 616277 - DNA, 520 bp, Homo sapiens
  misc_feature (27)..(27): n is a, c, g, or t
  misc_feature (55)..(55): n is a, c, g, or t
ctgggacagcacattccagggccgctngctacagctcggcccttcccacgagggngatgtctcatagccgctcgggttgcatgagattggccttccggaccaggccccagtggagaggagaatgttgtgttctccgccactggcatgtatgtgtgccttcgaggtgtccgactctgctcagcttagtgattgcaattgttacaagcaagcatgtaccagctgcgtcagaaaaaaagtcacagtgtgtgccccaaatagttaaaaccaacggctgggcgcggtgactcaccctgtatctcagcactttgggaggctgaggtggcgcatcacctgaggtcaagagttcgagaccagcctagccaacatggtgaaaccccatctctactaaaaatacaaaaattaggccgggcacggtcactcacgcctgtaatcccagcactttgggaggccaaggcaggcggatcacgaggtcaggaattcgagaccagcctggccaacacagtgaaaccccttctgtact

SEQ ID NO: 616278 - DNA, 374 bp, Homo sapiens
cgtcgacctataaagcaaccacacaaacaagccaacataataaccagccaacagcacaatgacaagatcaaatctacacaaatcaatactaaccttgaaagtaaatggacaaatgccccacttaaaaggcagagtggcaagctagattaaaaaaaaaaagcgagacccaatggtatgtcgtcttcaagagacccatctcacacataatgacactcatcgtctcaaactaaaaggatggaggaaaatctaccagacaaatagaaaacagaaaaaaagcagaggttgcaatcctaatttcagacaaaacagatttcaaatgaacaataatttttcaaaaagacgagggggcagggactgcttcagtttctgtcgac

SEQ ID NO: 616279 - DNA, 419 bp, Homo sapiens
acatggaccctcctaggcatgggactgcctggcatgcagccttatattattctgttttcatactgctataaggaactgcccgagactgggtaatttataaaggaaagaggtttaattgactcacagttcagcatggctggggaagtctcaggaaacttacagtcatggtggaaggcgaaggggaagcaaggcaccttcttcacaacgcagcaagaagaagtgccaagccaaaggggaagagccccttataaaactgtcagatttcatgagaactcactctctatcatgagaatagcatggaagagactgcacccatgattcaattacctgcacctggtctctcccttgacatgtggggactgcaattcaagatgagatttgggtggggacacaaagcctaattataccattctgctcct

SEQ ID NO: 616280 - DNA, 239 bp, Homo sapiens
ctgtgttgtccacagtcgtatggctgggggaacgtggttcttgggttcatctgcgtcagctcatgggaagcgtctctcagttgattatggcgagaagtccactgctggagttctccatttacccggggccccaggttgccacaggtgtagtggagcccgacaattccttcgtcagcacccataccaccctgggcgcactctgatttgtgccgtcatggtagacaatgaggccatctatg

SEQ ID NO: 616281 - DNA, 616 bp, Homo sapiens
  misc_feature (3)..(3): n is a, c, g, or t
  misc_feature (8)..(8): n is a, c, g, or t
  misc_feature (10)..(10): n is a, c, g, or t
  misc_feature (28)..(28): n is a, c, g, or t
  misc_feature (31)..(31): n is a, c, g, or t
  misc_feature (37)..(37): n is a, c, g, or t
  misc_feature (166)..(166): n is a, c, g, or t
ggnggggngntgagttactgactgaccnggncctggnttggttttcttatccgtgagacagagtctcactctgtcgggagtgcactggtatcatctccactaactgctacctgtgccgtgggggttgaagcaattctcctgcctcagactactgagttggtcgggncagggatcatgaccacacccgggtaatttttggatttttaacaagacggggttttgccatgttggccaggctggccttgaactcctgacctcaggtgatcacccaccttagcctcccaaagtgctgtgattacaggcatgagccactgtgcccagccccttaggaatttctaaaagtttctcatattaccctagaaataattcaatgacttattttaactgtgtatgtgattttatcaatacttctagaactaacaaaactattgtatcacaatgttttttatgaaaaattataaataaataatctaccttcccaacaacaggggaggagttaaataatttacaatgctttagacaagaaattctaaaacacttgggtctcaggggccttttaactttttaaaattattaaggttccggagaattttggttaattgggttatatggatac

SEQ ID NO: 616282 - DNA, 490 bp, Homo sapiens
aattcggcacgaggaatagcttgaggccaggagttcaagatcatcctgggcagcaaagtcatacactcttgagggaagagagagaccttctcatattgttttatattgttttatactcagtacctgttttaagaaaaaaacaaggaagtgaaatcaaagacaggcagcccggcaccaggcctgaaaccagccctgggcctgcctggcctaaacctagtagttaaaaatcaacttacgacttagaacctgatgttatccgtagattccaagcattgtataaaaaaattgtgaaactccctgttgtgttctgtaccagtgcatgaaacccctgtcacatatcccctagattgctcaatcaatcacgaccctttcatgtgaaatctttagtgttgtgagcccttcaaagggacagaaattgtgcacttgaggagctcagattttaaggctgtagcttgccgatgctcccagctgaataaagcccttccttcta

SEQ ID NO: 616283 - DNA, 236 bp, Homo sapiens
ggctgactacaggatcttgcgagttatgcgggagtactactcgattgtcaccgtcaaggagtcacaggtcgcctggttctaggaataagtgggggaagatatgtaggagtagaagattaggccgccgatagtcggtgtactcgtatgttcataaccattggtggccaactgatgtgatgcgtaagggagggatcgtagagctcggctgttatgtcacggctgcgtagtgatggaag

SEQ ID NO: 616284 - DNA, 1123 bp, Homo sapiens
acccacgcgtccggacaccacccccccgccccaccaccatggaagagaaaccatgggctgaggtttctcttccaaagcatcctgatttctcaaatctcttgccatcccatcgaccacccccatgaccacagccgtttgatgttatgtaaccatcaatgtcgaaaactggaacttctgggaagtccaccgtctgcagcagcatgtgtggtggctaaaagcatggcattacaggagagcaacagaacatgcccatgtaatcattggcaaggcagcctagatagacttcactgatccttgatcaaagtcaccggacatcttcagagcctcatttcctcaattacgtaaacaacatacgaaactaggagcaggcgcacgtaggactccacgacctggtaaatcccagcacttaatagacgaggccaacagatggcgaggacatagcattgaagccacaggagatatcaagaccatagcctgaggcaacatagtgggaccctgacctcatacaacaaaatacaaaagccaggatatggaaggagagatagacctggtagtaccccaagtactcgggaaacatgaagcaaagaaggatccactatgaagcactggagaagggtcgacggcatgcagatgcaaggcgtgggtcagagacaactttcaactcacagacatacgcgcaacaaacaccaaggacacatggaactcaaaaatacaaataatcgaacataataccaacagaaagaacaaacagcaacaacaacacaaaaacgcaacacagcgaagaaaaaggcagggcgaaaagagagaacggaaaggagaaaacaggacaagaagagaagaaaagaaagaaagagaagaagagaaagaggaggaggaggaggagagagagaagagaaaagagaggagcaaggagacgagaagaagaaagaaaaaggcgagacagaagaggacgaaggaaaggaagagagagcagaaaaaggagagagagaagagaggagagaaaggagagagaagagacgaagagaaaaaaagaaaggaaagaggagcaagcgcgagaggaagaggaaagaaagacaggaggacggagaggagagacagaaggggagacgaagcagaagagaag

SEQ ID NO: 616285 - DNA, 332 bp, Homo sapiens
aattcggcacgaggcgaggacggacaggaccgcacagcaagcacctgtacacgggccgacatgttcacgcacgggatccagagccgccggcacttcgtcatgttcttcgcgccctggtgtagacactgccagcggctgcagccacctttggatgacctgggagacaaatacacagcatggagatgccaaagtctatgtggctaaagtggactgcacggccactccgacgtgtgctcgccaggggtccgagatacccaccttaaggcttttcagccaggcaagagctgttaagtacaggtctcggcttccagcattggaaactggatgctgca

SEQ ID NO: 616286 - DNA, 534 bp, Homo sapiens
  misc_feature (534)..(534): n is a, c, g, or t
ggaggacacatcatgtggctgaacattgtcaaaggcagcatcccagtcggctctcgagtcttggtgaaaccatccctgagctcatacagggagattgatagaacatgattcttattaccatactctttctctgatgcaggctgagactaagtgtaacccatggatcacagtccgaggcaaacgaatgcactgtccaggattcatttaaaggtgtggatgctgctctgacgagacataactggctagaccaaagtgacagccagtttgtattgcaccgcataactgaagccactaagacggttgcatctgacacgatacattccttcatgtacgaaatcaaggagggtgactgtgctgaacggggtgaagactctcgggactgacatgcaccgatgctgtagaagcactcactgtagaatgcacagcatccgaggagaagaggagctgtactgagacatgccacaacgagagcctcgaatgtgtggcatccctatcctcagagcccagacctggagcccatatttagacacggtn

SEQ ID NO: 616287 - DNA, 117 bp, Homo sapiens
ttactcttgagatccccgcgtggagcctctctcaaaaacagataaagtggacagaaaataggtggtaaggactaatcatttaagggacaatgcccccagaagagtggctactagagt

SEQ ID NO: 616288 - DNA, 1317 bp, Homo sapiens
  misc_feature (56)..(56): n is a, c, g, or t
  misc_feature (73)..(73): n is a, c, g, or t
  misc_feature (253)..(253): n is a, c, g, or t
  misc_feature (414)..(414): n is a, c, g, or t
  misc_feature (625)..(625): n is a, c, g, or t
  misc_feature (675)..(675): n is a, c, g, or t
  misc_feature (740)..(740): n is a, c, g, or t
  misc_feature (812)..(812): n is a, c, g, or t
  misc_feature (887)..(887): n is a, c, g, or t
  misc_feature (893)..(893): n is a, c, g, or t
aacaatcagccatcgccatactgggtgagctcaccctttatactcaaatgttcccnttaatagtctccttccntgaaataaatacttaagggatttcaccagtctctggaggaccactttgaccctttgtaagttaaggtttcctcacccacctgccgaccagtttctcatgtgttcctataattggtcaacggagacttaatcctgaccaatgtttggacaacaagattccaaactatatctggctttaacnccagtttataccagtgtatgctctagacttggaagatgtagaagtttggatgtggattacctatacttatgtttcgtgatgaatccattgttcgcttctcattataagctaattcatccttttgtgaattcttcatagatagtatatataaaagtacattntaatagaaagccaggttttaaggaatttcacatgtataaggtggctccatagctttatttgtaagtaggctggataaatggtgcttaaatggtaatgtactccacttcttcctattggaagattaacattatttaccaagaaggacttaagggagtaaggggcgcagattagcattgctcaagagtatgtaaaaaaaaaaaaaaaaaaaanaaccaaaccactgggaaataatcaattggcaaaaggggtgaacaaattcnataactgggaaagcaaagagaagaacaaggttttgatttgggatggataaagcattggttttaantgggtggaaaacttcacagatcactaatggtttctagaggttaccttcaagtggggcaacgctgggggtttnaaggtagtcagtgggcctagttcctaaagccacagtatagggagtctggttaacctggaattggtctggttgcgnaagttnggtttaacgctggctgggagggctcccttttaaggacaaaactggtgttggtggattaagtggtttggaggggaacctggaagaacctgattgtagccccggtggcagataactggctgatttctcaggatattatttctctggggaaacatttctacattagcaagaggagttaagagtggattatctttttcgaccttaattccagagattatttctgtagtgagaattctggaacctattatgttagggacaattaaagctgcatggcctgacttggtccaattcaatatgggtgatactaaaatttgttgggcagaatatcttggtaaaccgtttattttaagggcgtttttgttcctttgtagaggcttatacagatagtcaatcttgggaattttattgagaagtggtgtatcgcaat

SEQ ID NO: 616289 - DNA, 309 bp, Homo sapiens
cgtcgacagataagcttgttttttgtaaggagtttgtgtgctgttggaaaacatggaaaatgcatccttaacacctgagcctgtggtcatcttcagtattttctgtcatttgcgatagctttcaaagggcattgtgtatccgtaataatgtccttgaagtcatagactgcaaatgttgatctcttagtcttatatagacaaggaggtcaccccggagtgtacgttgtaatagttgcaactgtatatgttgtacagccaaatatacaaacatccggtctatattctcaaaaatcaaaaaagagtcgatgc

SEQ ID NO: 616290 - DNA, 382 bp, Homo sapiens
  misc_feature (1)..(1): n is a, c, g, or t
  misc_feature (91)..(91): n is a, c, g, or t
  misc_feature (93)..(93): n is a, c, g, or t
  misc_feature (110)..(110): n is a, c, g, or t
  misc_feature (117)..(118): n is a, c, g, or t
  misc_feature (155)..(157): n is a, c, g, or t
  misc_feature (165)..(167): n is a, c, g, or t
  misc_feature (171)..(171): n is a, c, g, or t
  misc_feature (173)..(173): n is a, c, g, or t
  misc_feature (176)..(176): n is a, c, g, or t
  misc_feature (179)..(179): n is a, c, g, or t
  misc_feature (205)..(211): n is a, c, g, or t
  misc_feature (240)..(242): n is a, c, g, or t
  misc_feature (245)..(245): n is a, c, g, or t
  misc_feature (253)..(253): n is a, c, g, or t
  misc_feature (257)..(259): n is a, c, g, or t
  misc_feature (261)..(262): n is a, c, g, or t
  misc_feature (265)..(265): n is a, c, g, or t
  misc_feature (268)..(269): n is a, c, g, or t
  misc_feature (272)..(272): n is a, c, g, or t
  misc_feature (283)..(283): n is a, c, g, or t
  misc_feature (288)..(288): n is a, c, g, or t
  misc_feature (291)..(292): n is a, c, g, or t
  misc_feature (295)..(296): n is a, c, g, or t
  misc_feature (306)..(307): n is a, c, g, or t
  misc_feature (312)..(312): n is a, c, g, or t
  misc_feature (319)..(319): n is a, c, g, or t
  misc_feature (332)..(333): n is a, c, g, or t
  misc_feature (343)..(343): n is a, c, g, or t
  misc_feature (347)..(347): n is a, c, g, or t
naaaaaaaaacatttaaaattataaacacaattcctagctcacaggccataaaaagcaggcagcaggctggatttgatccacaggccatantnggccgtctcttaaacangccttcnnacgtcatgcaaagcctttcccattccacacactttgnnnactcttcnnnttcnanatntcncattttaaaacacacataatacaagnnnnnnntctgggtcaatatactcacgagagagaannnttnagaaaaanaggnnngnncgnacnnaanaggggggaaangcganagnncannggggtcggcnnaaaanatatttnggaaatgtaaaannaaagattaanaatnttattccatgcaacataaaataatatgcataaatc

SEQ ID NO: 616291 - DNA, 316 bp, Homo sapiens
cacgactacggcgactccggaagctgctgggtgcttgggtggtccgtcaggctgcgggaaaagggaccatgtcactctcgccctgtatggctgagcgtctggtggcgaggtgacgcaatgtggctatcccttcccacctgggcagatctccttgaacgctccggtgccatctgttggcccgcgctgacaccgcgcgccccaagccttgccgacactgcagcagcatagctccgcgtgtcaagcggattggtcattgtgtgctggcactggtgctcaggcctcaccaggcagaatcactggctcttctcctccggtc

SEQ ID NO: 616292 - DNA, 160 bp, Homo sapiens
tttgaaaacatagttgctgaggcagctgctggagcagaggggctgggtgtggcacgggtgtgaagaggtggtggatgacagtggtgacctgctgccgatctggctccggtgagctggagtgagtgagctgctccctgtgagtgcccactgctaccaccag

SEQ ID NO: 616293 - DNA, 241 bp, Homo sapiens
  misc_feature (82)..(82): n is a, c, g, or t
  misc_feature (214)..(214): n is a, c, g, or t
cgtcaaatatgtttggatttaaagggctattttatctatgctccaaactttatacgttgtcaaaaattatatatagatagantggagagcaagacttgattttaagctcatctgtcaggagatgctatgctactgttctgatatctctaaatgtcagctgttacaccattgctgatttgttcagggatctctcggcacttgattcctctgttcngcgtgtcgacatgaagagtgttgctgc

SEQ ID NO: 616294 - DNA, 721 bp, Homo sapiens
  misc_feature (26)..(26): n is a, c, g, or t
  misc_feature (87)..(88): n is a, c, g, or t
  misc_feature (90)..(93): n is a, c, g, or t
  misc_feature (212)..(212): n is a, c, g, or t
  misc_feature (326)..(326): n is a, c, g, or t
  misc_feature (400)..(400): n is a, c, g, or t
  misc_feature (446)..(446): n is a, c, g, or t
  misc_feature (449)..(449): n is a, c, g, or t
  misc_feature (470)..(470): n is a, c, g, or t
  misc_feature (560)..(560): n is a, c, g, or t
  misc_feature (599)..(599): n is a, c, g, or t
  misc_feature (606)..(606): n is a, c, g, or t
  misc_feature (622)..(622): n is a, c, g, or t
  misc_feature (627)..(628): n is a, c, g, or t
  misc_feature (634)..(634): n is a, c, g, or t
  misc_feature (682)..(682): n is a, c, g, or t
ggtctctgaaatccattgctgttganctccaactccaggccccatggggttgcaccaagctgctcaacctcacctgtttcttgaaannannnngccttccactaggcagatgggtccagcaggagacattggagcaccaaatggaaaagctcttccttccttcccctcttcctcacgttcccaccaccggtccacgggaatgaggccgtgcntgctcaacacggttgcggtgctatggcagagcgccgacagtcttctctcaatactacatttatatttatgcacattttcaatatctgcagggtcctgtagaatcctacttaggncttccaaaagaagggctgccttatgatagcgataaacaatatcttcggctctgctgaaacatctcatccagggntgcagactgaacatttctacagcacaattatagatgagtttctctncanctcacactgcttgattttatnaataaaaccttctgctttgttagagcaagaatcgcattcagccttttctgctaactgttcttgcacatggctgatgcagaatttatatcnttcgttcagattcttgacaacttgtttcacagctgcggntgggctnagctttccgccattgntctgnnctttgncaagatgcagagaagccgcaagcagctgtgctgctttgcatgtacaanaacagctgctccaaccgcccccagtctttgctcagctga

SEQ ID NO: 616295 - DNA, 641 bp, Homo sapiens
gacataatagacgatagaaagcgcagaaggagcgtggatcggaagagaagggatacgtgtcaggactagaaagaagtcagaaatcttcaaaaggtggtagtagtagagatacagaaaggatcgaaggataagaatgcccggtccgacagaaagaggtctatatcagagagtagtcgatcaggcaaaagatcttcaagaagtgaaagagagcgaaaatcagacgaggatagagacgaaaggcgtgaatggaagaatgccaggcatttcttgagccattgcgtttgcagcagaagatgtgtggataaaaacaggattacctttccttgtaaagaggatgctgccttaagaatagcagtgtcgtaaaaaatcttgatggaaaatacagactgtgtgtttaccagacgattcttgtactttggagcgataatttagtgaagagttatttatcaaagattatgtgagggttccaaatatagtgtaaagaatgataatagataacacaatcagattaacatcccttgtcatcttttccaagatatcctatatctcttcaggtaagaagtcgtgtatattttagtaggcaaatctttaagtcgtgttcccgttctaaggtctgtagtcatacattgctttggcagaaa

SEQ ID NO: 616296 - DNA, 120 bp, Homo sapiens
gaattgatagtaaaggcagatatgttctcatcagtagtaagaatctcaaggttatgcttattccccaatggaggtatgagatataatcttttctgcctttacttatcaattcaccaagga

SEQ ID NO: 616297 - DNA, 225 bp, Homo sapiens
gcgtcgacggagtccctggtctgaagttaaaccctgggaacatgttgatgtttgagggttgtgcagaactggccctacccttgggggggcatcataggagagcctgggggtgtgagagcaggagagttcacccctcacccctatcctcagctagctgcagtacttggaaaaacaggccctaaacatcacctagaaaacaaaaagtaaagtcgtatcggtcgacgc

SEQ ID NO: 616298 - DNA, 392 bp, Homo sapiens
  misc_feature (37)..(37): n is a, c, g, or t
gggggaattttttttcccaggggctccatcccctccnacaaatccccccccacaccaattggtggggtctttttttcccttggttaaacatttaaccccaagccaggccctgttttaacccctcccccctcatgttctttccttttttgcgaggtattttgccttaacccactttggcagtgacaaatggggatttgagggggtcccccccgcccttcagcagggaagacttttgggccctggagggccgtttaaaacatgggcttattaactggctgcctgagccatgaaaaggcccaatttttttgaattttttttgaatccccgtaaaaaaactgattttttttggataaagaaccctaaacggataataaaagttgttccaaatggga

SEQ ID NO: 616299 - DNA, 864 bp, Homo sapiens
agcggaattacttataaagaatctgattaaatctcatcctaaatatgtagccacaatatcttttttataatgggactataagaaatgtttgcacttagtttctgagtattccttcatagattctcaggaggcatttaaaaagttggaagctatacttggtagtaactatattagaaaagtccaattgacactgatttttattcacccttgttttatttttatccagccatactacctttatcacttttttttttttttggggtgcaaacgcttaacatttctgcaaacttttttcccccttgagttatgcattggcatttggtcagtgaagagtaaaaagaagtgtaataaacacatcagtcataatgtaaataccggtttggacccacatgggtgggatacagcagggtaaatccaaggctgggttaaaaatacataattgggaaagtctcctaatatttaaagacctagtagtttacaaggccttttaggaggtggtggtaaagactttgggtccacttttacaaatctagccacgagggggtccataatttatttccccaatttaagtggagtatctcaattggtaaaacaaagaatttctgcccctactacacgggttaactggctagggtaaagaccatgtgtctgaagaccactaaaactgggttgttaccagtgtagatgggtaaagggagatgggactacagtgccacatacctgacaacttgggccacccgagaggtacacattagggaagggcaagaataccaggaaaggggttaaaaatgcaaagcgagaacacagtggaagataccatggaaaaccagaatccagagaggatgggattcccacaaagatcag

SEQ ID NO: 616300 - DNA, 1186 bp, Homo sapiens
gtggtggattgtgttagtgtgttttggtagttgttgtctggtgtatgtgtgtttggtaatttggtttgggttgggtgttgaactatgttgagtgtatggagatgtttttgctctgatgatagattgttatttgtagggtgtatgttctctacatataggctgtgtttgtcatagattagggaattttcgatctatgcgtatgtgtttggtgggtgtatatgttcttttctgatgttgggtgttattcatattatattttgtgtgggtctattatttgtgaatgtggctcgaatttatattatattggtataatggggcttgtgttgggtgtcgtccaatggtatatctattttgcctgtgtggagtgggctgctctttgtcctggactcctatattggttccgctgtgctgtatgggtgcgttattgggtggtgttactatgtgatggtatatcttcttagtaggttcacctaggccttttcatgtggctctcggtaatcgtgccatttgtgcgggccctgttcctttggaagaagaaatattgctctgcttacgctatcgagcaacctctagtcctctagttagtatctatcctatcctggtatcggtcctcgtcggcttagtgttcccttccgtgtgttctcacactaccgtttgtaggtgttggtagtgggcactatggctatgggtactctacctagtctcttccccgtttgtgttatcagggcacagttacctgtaggtggtagagtatgagagtccatgtcctctcagccagatataatagagcctctaccgtgctacctctactagtgctaaggcttgttgccaggcatgcccctggcccctcgccattcttattgaatacaagccctgatcgttccatctcgctcagcagaaaaaataggagccctggccccccaacgtttcattgcagagtaatagccgttaagtccttgccctatgctccttaccaaagtacaagtcacagtctttcccaccattgttctgcaaactaggagtgtaccgttcaggtcactttatcaaagaaaagtatctacttgcatttatagaataagagtactagctcatcaccgctcctgcgcctttactatgaaacaggagtcttgattcggcttttgcctatcagagaaggatctgactcataaccccgggaccagataaa

SEQ ID NO: 616301 - DNA, 295 bp, Homo sapiens
atgcgacttcagttctcatgaggcacatggtttcctgtttcttagaccctcagagacttgacctgtttggagtagaagtcgttcatatttgaatgtcgatatgctgaatccgaatcggagtttacaggctctactactttcttctgtgttggggctctcttgggcttagggactgtatccgaagagcggtgttccctttttagcagacttagccgttttgacttggaactttatctgtctgtttcagagccaaatgatggtgaaataacagaagcagaatcttcttcagttactg

SEQ ID NO: 616302 - DNA, 187 bp, Homo sapiens
atattaagccatgtgaataagtagtagtccttatttgtgaaaaattccccaaaagctggggaaaacaaatgggtaacttttccagttacttgacccgattcagtgggggaaaaccagccttttttattctattgaaacccaagcctttttaataaaagcttgttaaatttaagaataaagtttttta

SEQ ID NO: 616303 - DNA, 225 bp, Homo sapiens
agcacttgagtccaggagttgtgacaccagtttggggaacatagtgagactgtgtctctatgaaaaagaaacaaaactagccagtcatggtggtgcatgcctgcagtctcagccacttgggagactgaggtgggagaatcattgagcccaggagatcaaggctgtggtaagctgagatcaggccactgcaccccagcctgggtgacagagcaagactctgtctca

SEQ ID NO: 616304 - DNA, 438 bp, Homo sapiens
  misc_feature (1)..(1): n is a, c, g, or t
ngcatcttcctatatcctcatgtacaccgtatgcagcttcagtggcgaagagtcattggagactttaactctcatgtagtgatcaatacagatgctactgtgtaaggtctgcactgtagtggagttaacgtctgtacagagtaacaagctcatggtcaggcttccaatgtagccactggctggcgctttggatgtaccgatgtagatgtcacatataatatcagtcagtatcagttgagatatgaggctcattatgtggccttgatacagctctagcatactcggcagggagtacttagtggtgcacaattgatccaggtagtttatatgtttcttcttaggtattgtataataaaccctgtcctggaggctctttctatgaggtacgtcgccactgttgtcctgtatggtgatctcagcagccctcagtagaacggc

SEQ ID NO: 616305 - DNA, 288 bp, Homo sapiens
actagtccaacatacgactgtccacatgctggtaattttttgtatttagtagcagacaggtttcatcatgttgggcaggatggtctcgatctactgactcatggtccacaggcttgacttccaaagtgctggggattggggcgtgagccacgcgtctgccgtatctgattctttccccaaaaacagaaacagcacgggtgccagtatgcgttcatgggtgaacggcttctttgggtagccgctttgtctgcagagcccttggactctggaggcctagaactagcaatg

SEQ ID NO: 616306 - DNA, 711 bp, Homo sapiens
tctggaaagggagtctcgctctgtcaccaggcgggagggcaggggcgcaatctcggcacacctccgccttcggggttcaagcaattctccggcctcagcctcctgagttgcgtgggactatgggtgcatgtgccaccatgtgcccagctaatttttgtgtttttttagtagagagcggggttttcaccagtgtgggccaggagtggtctcgatctccgtgacctcagtgactccacccaccttcggccctcccaaaggtgcgtgggatcccagggcgtgagccactgtgggccgggccagcccgtgtgtgtgtcttttcaaagaacctcggccccaggtgaggtggctgatctcacttcccatgtggtctcgttagaaattacacctccttctccgggggactccctctttccgtgcagccttgtccttgggggagtacggggaagtaccgtgcaggtgacccgtgcccccatgacctgggccaggcaggatgatctccagagcccgtacgggggggaatcctcaggtgaccagcccagccccatccgaagccaggttggggccggggcataacttcgcggggctctcccaagaccatcagagtgcatccagccctctgggggttgggctggcatcaggtactcatcaggccttggtctctagcctcggccgaggtgtctggtcccgcctcctggtgttccgtggtgccag

SEQ ID NO: 616307 - DNA, 620 bp, Homo sapiens
tgagcccccccccccccccccccccctctctactcccacccccaccaaaaaaaacaaaatagctattattaattatacgataatctgttaggtaaggttccgtcctttctttcttcccgtgctttacgcgttcagctagtaaggctggggaggtattgacgccagtcctgtttaaagggagcaccatagagagaggtccgggaaagggaaggaaattcggataggtcccctagtatcgagaaactatccaaaatcgacccgtccctagcaatcggcacgctcgaaacgtagggagggaagattacgtcgctagtaactaatttatcccccataggccggtcttagggagaggccggccgaaatggcgcccaaaggaaggagagcggccctattagtccgtctagtctcttcggaataaagatcaaggcgtcatgcgccgtccgccaggtccacatcatggtgggctcggggtcgtaggctcggagcttccgccagcgtacccagcgtcggcgagaaaggcgggttttagctccggatgtcgaagcttctcaaagataaggtagaaatatagttctagacttttttgtactccttatcgaaacaagggggacgcgagaaaa

SEQ ID NO: 616308 - DNA, 256 bp, Homo sapiens
catctgtagttacttcacttacgaataaggtctctggctgggtgcgatggctcacacctgtaatcccagcactttgagaggctgaggcgggcagatcacctgaggtcaggagttcgagaccagcctggccaacatggtgaaaccccgtctctactaaaaatacaacaattagctgggcatggtggcacacacctctaattccagctactcgggaggctgaggcaggagaattgcttgaactcaggatgcttcttga

SEQ ID NO: 616309 - DNA, 314 bp, Homo sapiens
  misc_feature (7)..(7): n is a, c, g, or t
  misc_feature (117)..(117): n is a, c, g, or t
  misc_feature (260)..(260): n is a, c, g, or t
  misc_feature (287)..(287): n is a, c, g, or t
gccctgntatctttgccctgttgagaagccaagatctcagctgtactagtcaggtgttttttcagacagcaagtagaacaggtggtggccaactccagtgctgtaccctggaggagntccgggtcagcactgggcaaggtaggtagctagctgcctgaccctagtctggggttggaacttctgtttgcctgagtaaagggatgtcagtcctaagatttctccacattgtgctttctctgcagtggtaaaagctggccttnattgcctgcatggtaccctaaggcagnccactgctctttttgatcaaggattct

SEQ ID NO: 616310 - DNA, 706 bp, Homo sapiens
agcgggaggactgtggcttggggcatgcagagggtctgccatggggcagatcagtggagtcaaggatgggtgtgtgggtagatggcatgggcggagtcctccactgctgtcatgggcaagagctcacagttggggcctggtggggaggatgctgtagagctgctaggaagatgacgaagcggagctgtggtccccgctttggacagatgagggcaagggaggcctgagcaatgccttagttctagagcagtgacctacacatgtgacccgtcacgaccagtcgagtcctggtggagatgtgcacaccataaatgggggaacatggagaacacccaggaacgtatgattctccatccatttatgcagatcatggttcagctgccagggcactgaggaaggttgctggatcttatctccaatccgagggactctggaaatgccagcaggctatgggcgtggggtgcaccatgaggacaagagaccaagagcagcatttactctcaaggataagctgtgaacaagagcaccagtccctggttcttaaactacagcggtgagtcccgtcagaagggtgtgttgcaagaggtaaggacctccagagcttcatcgaggcatataggaagggtgagatgccctaactccagaagagctggcgttttcaccacgttgggaccaagtttatacctaatgaaaagcaaaagagacg

SEQ ID NO: 616311 - DNA, 168 bp, Homo sapiens
agtgctacctccacaaacagacctcacacaccacacacaccacataccacacacaacacaccacacacacactgaatactacacacacaccacatactacacacacaacacacacagcacgcacacaccacattccactggctatacactgtttgtggaggtagcact

SEQ ID NO: 616312 - DNA, 365 bp, Homo sapiens
  misc_feature (159)..(159): n is a, c, g, or t
  misc_feature (179)..(179): n is a, c, g, or t
ttatgctcttgttatgacgcccaagctgcagtaccgtggttatgcacaggtgcactccccctactcatcaggacaggagttctgacttgctctgtttccagcctggctctgcttcacctctccttaggcaaccttctggtgccctgcacgttcactccngacagccagtgcacataccncctcgacctagtgccctatagcccagcatttctgcgactcaggcgatccctctcgcctcaccctcccaagtagttgggatcacgcgcatgtgccctccccctggcagcagtttttaatatggtctttaagacactcaataacttggcttctcccattcatctagaaacaataacaataataccaac

SEQ ID NO: 616313 - DNA, 586 bp, Homo sapiens
caagaaggaaggagctggctatcacctgatttgctcatggtcggcgtcatgatgggagtcggctacgtgatggcgacttccatggttgatggctgcaacagtgttgtcaataagtcatgtcaacagacttaaaagttgaatctcgaatgttctgctccaggcgaacaacccaagttgttggtaattcgtgaacagcgggttacaggactaatgatttgtattctaatgggcctctctgtgtgcatgacttcagtcctaaagttgattccattgcctgttctgtatggtgttttcctttatatgggagtttcctcattaaaaggaatccagttatttgagcgtataaaattatttggaatggctgctagacatcagtctgattggatataactccgttatgtgccgctctggaaggtccatattttcacagtcattcagcttacttgtttggtccttttatgggtgatacaagtttcagatggtgtagtggttgttcccatgatggttcttgcattagtgtttgtgcgccaagtcatggagctgtgtgtcacgaagagagaaatagttggttgatgatttatgcaga

SEQ ID NO: 616314 - DNA, 374 bp, Homo sapiens
  misc_feature (138)..(138): n is a, c, g, or t
ggcccccctgcccctgggagccccctgccagagtccctcagtcctgacctgcaacacctgagacactgagaaaaagaacaggctgataccctcatgaaattccaagacaaagaagaaaaaaacctcaatgttattggncctaaataatcaaaaggataatgttttcataattttttattggaaaatgtgctgaatctttgaatgttttattctccagatttatgaactttttttcttcagcaattggtaaagtatacttttgtaaacaaaaattgaaatatttgcttttgctgtctatctgaatgccccagaattgtgaaactattcatgagtattcacaggtttatggtaataaagttatttgcacatgttca

SEQ ID NO: 616315 - DNA, 88 bp, Homo sapiens
  misc_feature (62)..(62): n is a, c, g, or t
gccgctctccccctagaccttttaagggttgtttggagttttagatgcaaaattcacaagtnttcaagtgattgttaaagaggttgtc

SEQ ID NO: 616316 - DNA, 851 bp, Homo sapiens
agcggggggaggcgccgggggcgcgcgcgcgcgcgcttgggcgctgctgggctgcgagcggcggcggcggcagggtggttactatcggcgggagtcgggccgtgagcctcctccttcttcccccttgtttgtcctcctgctcgcccggcagcggctgggtccgggggccccctgggtgggtccatggcttctgcttgtgtgctgtgcaccagcgtgcctccaggccaattacacgttgttgagacagatggggcctgcattggtttccattttcaaatctggatgggatggacgcaccatgtgcgcaccctgctatccccaaagtggagctggtccctgccggggaagcccttctactgcctgagctcggaggacctgcgcaaaaatcacagtgcttgctacactgactactgccaacagggatcgacttgagggtgccccagtgggtcacccttcaatggaagccctgaagcaccccggtccatgttgagggagccctgggtgaacatcttggttaagggcaattcaatctgccgttgcctcggttgttccatcccatggtatcacatcattcaattcattcatttggttatacctttggttccatgtcacctaagtccattccaaggcggttggttctagtcacgcaaagccggtccaggatagcgacttggggcaccttttggtacaagtatgtccccttccagtgtgttgacgcactggttgttccttcctcgccaatgaggaaccacagtacccgtcataccaaggggaatttcgttggattccgtacaggacctcttctccccaacgctcgcaaggggtccttggccttcagggtgttaacccgc

SEQ ID NO: 616317 - DNA, 700 bp, Homo sapiens
  misc_feature (412)..(412): n is a, c, g, or t
atcctttgcagtgccctccagaaaataaagtaaagccatgtgacagtaatgtggtctgtcactctgtttaatctgttgtatggagatccaactatttctttcatcagaaaaagtccgaatagctaaccttaatttgaaataacaggacattaaattcattatagccatagataggacgaaacgaacaaataagtcaaaaataatcgtggaaattgagcaagggatgatgaggtacatactcgaagagacgataaatgggtgaaatgcattttgggggtcatcatttgatttagagatagattaatcccatactctcgaattgagttgaaatcgagtaagtctgtcgctttgtcgatcgaagattaaagttagaattttgggacactgcttctattcataggcgtcatatatngtctttgcatgagaaggctctatacttatggagctatatgaaggggctaaatgtaaaacacaagactgtcattagaatttgaattattgggcgtgtgaatataaatcgtaaccgtatgaagtttattttgtatagtagttaagtatgattccaagttactactttgttattgtacctaagtagattttctttaagtcagaagccaattaaaatagttacagagccattgaacttctttaatattatattatgtgaaaactttttgttgtccattgtatctaatatggt

SEQ ID NO: 616318 - DNA, 975 bp, Homo sapiens
tgcctacaggctattctatgtcgatggctcgtctcacgctgggtgtccccgggtatgagtgtttgtgagtcagatagttttaacgaactgtcatgtaatgccaagaagaagagatcacaacgagcaactaacagtgctccacgcagtgacaacactgcgcagagtgtgttgtgccattggttcgctccatgtcacagccatgcaagagagtttcaacgatgagggccattcaacgactgcattggactcatgataacctaggcagattggcagttctatctgtagctagatgtaaaagtagttggtgcacttgcatatgacgtgtgtcctatcttctcaaggggatagaaatccctactgagtgacatactctttggattgccatggctgaatgatgggctccattgcgttctcgagtcatatcttgcaccaatgtgtcctgaccagtgcttggctgaaccaaggttcacccatggtcacgagatgcctgaaggatgtcatgagaacagtgtctttgcttgaattttgagtgaaggaagcaactaggctacgctatgtttcaggaagattatctatgagagactggatgacaagcagtgggggatcggtgttacagatgaggaatgtggatgagctgtacagagaaggtctattgacaaaaaggggatttttcaagtgacatcgagttccagaccgcatctgaaagcattggagggcgcaaagacaaaggatgacgtgaaagaactttagctaaggatcttgcgggatacatgtcgtgtacgtctcttttactgtctcagaaaggttccgccagccttatagaaactggttgcatgtaacttttggtttaaaggggttggctcttctttgtgagggatttattgcaggacctttttgggcgtagttgtgtttatcactggatggggataggggcgatgggtgtaaaatttgcgtaaaagaaaattatcgaagaat

SEQ ID NO: 616319 - DNA, 152 bp, Homo sapiens
tgcaggttgtgacactgttacttacgtgcatcaaaatcagctattgatgcctatgatgattattcattaagagttcaacagatgataccatccctatggcttctcactgggcctcgcatcttgacggcatggacatcctaccatccagtagc

SEQ ID NO: 616320 - DNA, 412 bp, Homo sapiens
gttagcaagagatactagtagcattacagtgatgtaatatatggacatgctagtgtatatttagtattctaccctgcttacttagtatcgctggggggatctctacagtgttacattataccacaacctcatgtctactgtgtatttccatctcactcaatatttcagttgttccactatttcattattcttgcagccagctctttgtgtacatggaccaggttagttaatcaaggttacgaattgttggctcagtctcttttgagtgtggggtgctggaaatagcgctgagtaggaataacagccttaggttccaataaatggtgctcacctgtcttgtgtccctggataattcactatgtgtctgtagacctccttggcacctgtggcagcatggtattatggggggtca

SEQ ID NO: 616321 - DNA, 298 bp, Homo sapiens
gggggggggggccccttttttcccccccaccttcaaggggggtttttggggccccccttttttttccccaaaaaggtgttttcttcccgttgggggtttcccccggggggggggggggtttttcccaaaccccaaaggggcaaaaggggggccctcttccccccccgatttttccccccccccctttttaggggggccccggggggggggggaacccccccattggggtttggggttttttttagggggtttcccctgggccgggggggggggttttttttttcccccccccccccca

SEQ ID NO: 616322 - DNA, 245 bp, Homo sapiens
  misc_feature (33)..(33): n is a, c, g, or t
  misc_feature (46)..(46): n is a, c, g, or t
acaagattctgtagtttgtctctggaaacaggnataggcatctggnaaagtagtacagcttctacaactttgctgatatacagatgggaatatgaagtgcaatgtgcgaaccagggcttggtattaagcctttcccaacttgtgaatatagaatttgataatacacttttgtgcattagcaatggtttttactaatgctaaaacttttaaagtttattttttaataaattgttgagtatcacatc

SEQ ID NO: 616323 - DNA, 337 bp, Homo sapiens
gtagtccagctcttgttttcactctagctttgtgcatcagagtcaggaactgccccaggctttgcgcaatcgagagcaatacctcacgagctcacttatgccagggataatagtattatgctggctgttgtccactgccggaaaacaagagcgtcaacaatggcatccaggtttacagttccttacagtgggagtgctaatttggtaccaatttaatccctctatcatggccagagacagaggtcacataattctttttaacaaagttatcactgtaggacaaattttccaaagttggccgggcacggtggctcacgcctgtaatcccagcgcctgg

SEQ ID NO: 616324 - DNA, 237 bp, Homo sapiens
actggaaacacaaaccctttttttaaaggggcatttcatttccgtgggggggccaaaaaaaaggggcagactgggacaaacctttcccatcggccaaggggtggaacccgacatccaaaacccagggggcagccaagctcagcgcaacctccgggctttttgttttgactccaaaagggggagcacgtcccccttgcccccggggccttttacattggggatgagggatcggctcgt

SEQ ID NO: 616325 - DNA, 204 bp, Homo sapiens
  misc_feature (33)..(34): n is a, c, g, or t
  misc_feature (193)..(193): n is a, c, g, or t
cctctctttttatcctccctttatcccggtagnncgtcgagggccggaaaatgtaaaagtagacgcgcgtgtttaaaatcgtcttaaagaaaggcgaggacggcttatcggcgaagggggagcccggtcctcccttacaaaaggtcgccctcagaaaaagagccgccctcacagccccaatatcggcaccccncagacgagaat

SEQ ID NO: 616326 - DNA, 129 bp, Homo sapiens
ttatgggcattgtaccagtattgctgcctgccttatccgctgcatccacagtgaggcgggctgccgctggagtgggccactacgtcatctacacgggccacctgacatacctgcagcttcactgtcatt

SEQ ID NO: 616327 - DNA, 174 bp, Homo sapiens
gcggaccagcgacatttgcagggtgtagtggtcaccgtgtagtcccagctactccggagtctgaggtgggaggatcacttgagcctagagaggtcacggtcatagtgagccatgattgtgccactcaattcagccttgggccacagagtgagatcctgtcacaaaaaaaaaaaa

SEQ ID NO: 616328 - DNA, 118 bp, Homo sapiens
tccctttagacagagtgtgcactggctcggcgttcattgctagaataccagccagagataggatgaaccgcgtgcttcaggacagggcggagacggaggaggaaaggagtgtggtgat

SEQ ID NO: 616329 - DNA, 276 bp, Homo sapiens
cgcgtatttcaagaaggcaacaattaaggggaaaaggcaggtaggaaattccaaggcccgggcagggctcactcctgtagtcccagcactttgggaagccgaggagggcggatcacctgaggttgggagctcgagaccagcctgaccaacacggataaaccccacctctactaaaagtacaaaaattagccaggcgtggggtggcacatgcctgtaatcccagctactcaggtaggctgagacaggagaatcatttgaaccggcgttgcgacgtga

SEQ ID NO: 616330 - DNA, 186 bp, Homo sapiens
tcgttgcttcacctgatatttcttggctctagtctcctctacattagattggaagaatcctctatagtttccctgcctatatggaaattagtctgtgctcttcggatcacatggaatgttgtcatggtgcattattcatgataaactctgacagcttcaaggttaggtgtgatgctgaatacaaaa

SEQ ID NO: 616331 - DNA, 231 bp, Homo sapiens
gagtcgaaggctgagcggacccggtcgagagccggcgagctccgcgcagggagggtgcgcccaccggtcccgccgggcgcccgtggtacgcgccgtcagggccctctccgccgggggctcggctttcttttacctcttccaaatttaaccattacctaaatccgaagggaaatgagcaaacctctcggattgggtgtcaaggtctcctccgggctggggctgagcaagccc

SEQ ID NO: 616332 - DNA, 179 bp, Homo sapiens
tttccctgggttgataatatgtatattctatgactatccataatgtgtatctattctgtgatgtttccagttttgcactcttatgaatagagcactgctattaacattcttgtactagttttttcatggataaatgtttttatttcacttgaggttaaaatacctagaactggaattcg

SEQ ID NO: 616333 - DNA, 168 bp, Homo sapiens
ctggccgcgagcccagacctacccgtgagaagtggactaagacggtaggtttagcacgcctacagagacgaggccgtagatggttaagcaggaagaagattgagccttaaagcctgatcgccgagggaatccaatgtggatcaatcgggatctcctgtccaagaaagg

SEQ ID NO: 616334 - DNA, 196 bp, Homo sapiens
gcgctaaacagcgcacgccatatggctatgcgagacttctataccgcagcaagactgtggaaagcgcactaattccggcaatgacctggaaatgccgttctggcgcgaccaggccgaggcaacgttcaatcagacaggtaaattgcgcattaccgtccggtaaccgtgaacaggcatggtcaggtgaagcagcctc

SEQ ID NO: 616335 - DNA, 102 bp, Homo sapiens
ccgagatcgcgccactgcactccagcctgggcgacagagcaaggctccgtctcaaaaaaaatatgtatatatattatcatcactgcaatgtagagaatccat

SEQ ID NO: 616336 - DNA, 376 bp, Homo sapiens
gactttatgatgccggctggcatcataatttgacgcgtattctcttgcccacaatttcgcgttgggaaagaccaagtcctcgaaggactggcttcgtgcacatcgtgtcaaaacttttgtctcctgttaaaattttgcttattttttgtacggctttttcgagtcggcttaggcagaattctcctctgagcgataaagacgacatgcttcccactgaactttttctccaattcgcgtactagccggacttggattttctggaaagatttcagttgaggaacgggaacaaagattatgatagctttccgaccaccaccaacttcaatttccttagctgccgtaatattcagctccctgagctgagccttgaggtccg

SEQ ID NO: 616337 - DNA, 144 bp, Homo sapiens
caggatcctgaacaacatagaatggtatgcttgggtgttttccatatgagagcggatggacctctttataaagtaggttgctgcagaatccagttcttccaaaagccactattatttagggtttatatcacaagtcatatacca

SEQ ID NO: 616338 - DNA, 928 bp, Homo sapiens
aggctaccgttttttgggagaatacgggtccgccaaggggcgccaagccggtgcccaagggtaaccgggacgctccgtccacggggaagtggccgtgttgcgaccccccgaaaacaaggagggggtcacccacactttggcgcaaacacacaaaaggtgtgtccgacctctgcagaccaggagtcgtcaagaatatggcccctgtcgaacatgcccacagcggggaagaatctctgtgattcgcccccaccagcaaaaacccgcaccccgggtcaggtggcgccaaacaaagcaaggaacccacacgtctggtgtaacagagattagagtggcacccgcggaaacattcaccggccacggggcacaccaatatggttgcaccgacaatcgaccaccttgaaagaacacgagttgttggtgggcacgaaggcccccctgtcagattcgcagcactttgccctaggaggggtctgcgtagtaaaccaaaatcccgccgcccgttgggagaaaaatcttatatatgctggttcacccttaattgacgtgggatatgtctactctgggggcctggttaaaacaatcacaggggagggctttcccacacagtgtcacacaaaaacaacgttgttatttctttctcaagaacctcactgacagactatatactcccactggcactggaaagttgcacacgcttcgggaagttcacactttctgttcaagcagaagaaaccacgcgtatgtatctttactaaaaaccccctgatagattattagtcttaatcaccaacaaacctctttgcaagattatcttaatagaataatcacgaaagttttttccaataatatgcctacaaatcaaaatcagtaacacatgtaaattcctggcgataaataatcaaaaaaaaaatccccgaaatacaaaaca

SEQ ID NO: 616339 - DNA, 290 bp, Homo sapiens
  misc_feature (188)..(188): n is a, c, g, or t
  misc_feature (218)..(218): n is a, c, g, or t
  misc_feature (222)..(222): n is a, c, g, or t
  misc_feature (233)..(233): n is a, c, g, or t
agaaaactcccagctaaacacccgtaagacttcatacaacacaatactctatactgtgatgatcacagctgccaaggctacctaagaggagacagttatctcatatttggctgccagctttttatcttctctcgaccacttaaacttcagacttcctgtcctgctggtatcatggagaagtccatacntactcgctcagctatagagagctcaccatngaantgcctcacagncagttcaaggctacgaatctatttatcaattctttctcatctaatagtcctcgtcta

SEQ ID NO: 616340 - DNA, 740 bp, Homo sapiens
ctcggtcactgcaacctccacctcccaggttcaagcagttctccctgcctcagcttcctgaatagctgggattacaggcatgggccacaatgcccagctaattttgtgtttttagtagagacagtgtattgccatgttggccaggctgatcttgaactcctgacccccagttgatctgcccacctcggctcccaaagtgctgggcttacaggcgtgagctaccacacctgcctaattttatattttaagtagagatggggttttaccatgttgactgggctggtctcaaactcctaacctcaagtgatctgccctgttccgcctcccaaagtcctgggattacaggcatgagtcactgcgccgggcctatattttatctctctgtcttccatatcatcttctgtattgttcatctctatgccattcttggtattctgacactttctcagatttgtccttatgtcactgattagtttcttaacttttttcccctgaaagtatgtattgtcatgaaggccaaatttagacaacagaatataaaaatcacctattaatccaatatgttatgcttgtagggtacttttaaagaactttttcacaaaagtgtggtctgtataatattcggttataacgggaaacaaaaatcccccttttctgatttgcaggtctacaggtctaaattttttgaacatacttattcactagggaagggtgtaagaaagccttggaggcccataagg

SEQ ID NO: 616341 - DNA, 868 bp, Homo sapiens
ggaggacccgggctggcgctgccgctggttcgtctactctttccttcagccgcctcctttcaaccttgtcaacccgtcggcgcggctctggtagcagcggggggctcctgttccttgcctgagctctctccctattctatacctccccaccagatcccgtgagatctgcccggcaatggcttaacttaactgcggccgcccgggtcttgtgagaaccaaagcaatgccatcttgtcttgttctttgcagaccgggattgccaagtgattcctccacgaatttgaaagacctattgcggaacctgacaccctaagcgagccagtgacagcacattaaggaacttccagcgcagccacacaccgggcccagacacaggtggtgggggcccaaaatacacccggggacccatgatgtactgggtgggccatgcccacggacatgaccggccgactcaggcatcaaatgaacaaccatccagtctggaatccctggatgcagggcgccacccgccaccacggagacactagagacaatcccctgaagtcgccacggactactgtgtacccccaatgagtataatggggttggggaagaccaccctggcctgcagggctaattcatacgaggatgggaaactggacaatatcccgaacaggaggcaacagggtaccagtggatcaacaaaaagaaagcggacaacagcagcgggagcacaagcatacccattgtgtgaccatcgctgggacaacttccagaccagtctcaagcccatggtcgacgtcagttgcacgcggcaacgcctcaccaggcacacaccctgccgagagaagccagggaacaacaccagtacggcgagtcagctgccatc

SEQ ID NO: 616342 - DNA, 361 bp, Homo sapiens
  misc_feature (53)..(53): n is a, c, g, or t
gcgaagacatagataatcttattccatatatgaagacaacaaaccccccctgnattattgactctggatgaggaaatggttattaggaaagatttcaaaacagtactctggatttgtaaggggaatattaaccaatggtgagaaatttgggatccagtttccatttgatcttgatgttaaaattaagcattgatgcttggagcaactttcctcattgaatacatgtattttgaactgtggccataagaattaccctgaaagaatatgtcagagattactggcatttatttttgccagccctcaacaaaactaagcaactttcactgaaaatatctaaataaagttttattttactaaaact

SEQ ID NO: 616343 - DNA, 388 bp, Homo sapiens
  misc_feature (354)..(354): n is a, c, g, or t
gaagacatttatttcttaacacatttatgcctgaggttgcaattttttgaatttttgcaatcagaccttggaaatgaccttgagaggtaggatataaataactcccacatgcgtagcgttccagtaatggaacagtaggcataaataggtttaatgaaggttcagggacagttgctaaccagtgaaagttctggaaactcttttctagagctgtttaaaagcatacttgtacatatatttatttcatgaaatgaattgaggtgactcatgaaggtcatctagtcttatgatcctatgaattgattcaatgcataccatagccaaggatgtaagatcagacatggaaatgtattnttgccaatacttgtcaaataaaagagcaatctga

SEQ ID NO: 616344 - DNA, 630 bp, Homo sapiens
ggctgtcacggcgggtgtgctcgaagaagaccactggccttgtgggattggctgtgtgcaatactcctcacgaggaggctaagaatatggtacacaaagattctggatgttcttgaggaaatcctttaaaatgcagcatatagaaagtatacagaacagattacaaatgatgaagctggctagtggttaaagcggaaccagatgttaaaaaagttagaagagcaagcttcgaaggcggtcaattagaagaggtgattcttcaggctgaagcatgaactatatctgggccagacaaaatgagggaatggcaactatgggagccattagtggaagagcctcctgacgatcaggggaaatggccaatataattatctacggtgacttcggtgtgttcatgggaaacatgatgtaattagaatatgctgttatattaagagcgtgtgcttatgactgacattttggtaatcaagaaaagtgatctacgaaaatatgtaggagactgttaaaataggtgcataatggtaaatatggtcatgtgaatcaattcggattcatagaagtactcacaacaaagtatgttggcaaagcatgatattgctgtgagcagagaaggcatgggaagattggaaa

SEQ ID NO: 616345 - DNA, 350 bp, Homo sapiens
ggcggcggaaacttcgggcccgtaactgggctttccgaggtgcaaaaaaccctttgaggtgaaggtgtatgaaagtcctcaaacccgatgttttccaaaaacctgggaaagggttgggaaaaaactcctaggatcccccggcatgtattgagcatatagggtgctgtaaatgaatgtttttagctgtcatgtttaaaaatacttttgcttcgttcccccaaggggggcatgcagcattttggaaggaaaattgaaaacgggttcaagaaaacatgaacagaagcaaatgatgaaaatgagccttttacttgatgttgataacctcccaataaattatggagaaaaatcca

SEQ ID NO: 616346 - DNA, 208 bp, Homo sapiens
tgattattgggatagtagattaaaagtcaaccgaatactacaagaagaagcaaaaacattccagaatacatgtattttgaactgtggccataagaattaccctgaaagaatatgtcagagattactggcatttatttttgccagccctcaacaaaactaagcaactttcactgaaaatatctaaataaagttttattttactaaaact

SEQ ID NO: 616347 - DNA, 343 bp, Homo sapiens
  misc_feature (42)..(42): n is a, c, g, or t
  misc_feature (55)..(55): n is a, c, g, or t
aaatataaataaaaaagatctaaaaatttataaaagaacaanacaacctttatgnattattgactctggatgaggaaatggttattaggaaagatttcaaaacagtactctggatttgtaaggggaatattaaccaatggaatacatgtattttgaactgtggccataagaattaccctgaaagaatatgtcagagattactggcatttatttttgccagccctcaacaaaactaagcaactttcactgaaaatatctaaataaagttttattttactaaaactattcatatatattctttctgcataataaactatatcaaaaatgtttaacttcaaaaaat

SEQ ID NO: 616348 - DNA, 986 bp, Homo sapiens
gacggaagctaaggctgccgttggggtgatgccctcagttcatccggcgactatcaccggtccggcagcgccagcctacactcgcccgcgccatggactctgtctcctgagctcgcactgcatctacatcgtgccctcattctgcacgacgatagaggtgacatgtcacgtgaggataagatcaatgccctcattaaagcagtcgcggtgtacatagtgttgagccttatcgtgcctggcttgtctgcaaaggccctggccaatcgtcaacattgggagcctcatctgcaatgtaggggcctggtggacctagctccagcagctaggtgcgtgcaaccaagcaggagtgtccgtgtcccctcacactagcaggcgtgctccagctgagcgagaacgaaacgtggaagcaaatcaagagaacgaatcctgaggagtctagatgatgacacatgggctttttggctctatgtatgactaagaacgctctttctatacatcgactggttccaagtatacataatgcttgataccttttagagaacatgaactacacagtatatagccacacagagagacatcacaagaaacactttggacgtttgacactgtgacggcaggataacagagcgaagaggcgcggtcacatagacacggaaaatcaagtccggtactcagtgtgccgactatccagcagagatgtacacgtaaagagtcaaagaagcatgggggccacgtagacagggaagattgcccgcgagtgcgcaaattagcacacgtgtaaatgagtaccaagggtccgaaatgccacagagcgggtacgaagtacaaggtaatacggcgtcgcttaccacttgtagaggaactattctacatagaacagaaaaatggctaatgaggaatctgttcgcatgcgcacgagatcctatcaagtgatgctaccgaacggccatgcgacagagacattcaccataacaatgtagaaaaac

SEQ ID NO: 616349 - DNA, 109 bp, Homo sapiens
catcaggacgacagcaagaacgtgcatttcgtgtttgatgccgtcatttcttacaccataactaacaaactaaaggaacgctgcctcttctgtgggacttcggggcctg

SEQ ID NO: 616350 - DNA, 420 bp, Homo sapiens
  misc_feature (53)..(53): n is a, c, g, or t
gcgaagacatagataatcttattccatatatgaagacaacaaaccccccctgnattattgactctggatgaggaaatggttattaggaaagatttcaaaacagtactctggatttgtaaggggaatattaaccaatggtgagaaatttgggatccagtttccatttgatcttgatgttaaaattaagcattgatgcttggagcaactttcctcattgaatacatgtattttgaactgtggccataagaattaccctgaaagaatatgtcagagattactggcatttatttttgccagccctcaacaaaactaagcaactttcactgaaaatatctaaataaagttttattttactaaaactattcatatatattctttctgcataataaactatatcaaaaatgtttaacttcaaaaaat

SEQ ID NO: 616351 - DNA, 982 bp, Homo sapiens
gcttcggcgcttatcgatctcggaaggacgagagtactcaacgcaagctacagccgaagggtccgcagaagttccagttgtgatggtcacaaagaaatcattcctggaggacattcggaaggcactcgtacgctttccaagagtcatctgtgacgctcaaggcgtttatgcctgctaaggcatggcagccaccgtagttctggctgggactctccaatctatggcggcatcgcccttgatgtggagagggggctgcatcattagaagctgtattcctaggaaagataaacggatgcatttgactcgaaacccggatacttcagaacctcctactggacgacattctctaagtcagctgttgaaaactgccaggactcctggcggcgggcagtcagcactggggtccaggctggcattcccatgccctgtttgaccactgccctctccttctatgacgggtacagacatgagatgcttccagccagcactcatgccaggctcagcgggattacttcggggctcacacctatgaactcttggccaaaccagggcagtttatccacaccaactggacaggccataggtggcaccgtgtcatcctcgtcatacaatgcctgatcatgctgctcctgtcaccctccacgattccacagaccaggacattccatgtgcctcatggcactgcaacctggccctttgccgtattttctgttcagtatttttaagaagtctgtggtaagagagctccttgaggaagacacagcagtttaatttgtaaagtagctctgagagagcgcacatgccgctctgcccttgccttcttgggactgaaccaggagctggctatgtagcgtagagagtagggaaccatactccttgcaggcagtggctctccgcgtgccccgtgtgctggtgcggttccaagtcacgcagacaggaagggtgtttgcgcactctgaacacactggcctctgtataatgg

SEQ ID NO: 616352 - DNA, 304 bp, Homo sapiens
  misc_feature (208)..(208): n is a, c, g, or t
caaagggctttgttggggaacgaaagagagaccagactgttacgtgtgcctatgtggaaagaagaagacataagaaactccattatgttctgtactaatgaaaaattcttctgccttgagatgctagttaatcgtgtaacccttatccccaacgcctgtgctcacatggaacgtacctgtgttcacttcaatggtttaactggatatnagggctgtgcagggatgtgctgtggtttgacaaatgtgtttggcaggcagatatgctatggtcaaatgtcatcaccacttctccacgtcgtcaaat

SEQ ID NO: 616353 - DNA, 985 bp, Homo sapiens
  misc_feature (614)..(614): n is a, c, g, or t
  misc_feature (657)..(657): n is a, c, g, or t
tcccaaagttggctcggctgcaagtgagtgtggacagactcagtagtgagtgggtccacagaaaagatatggtctgttagatctaagtcgcccgattgagcatggtgcaagagagatgtacttctttcccggtcgtggcttgatcacgcaggaagccgggacttgcagaagcacgggtcttccatggaatgcataacgctacctctagtatcgggacgtcttctggcaggcaggctccgacacatgcaagaatgtccaggtcagtggtttgctacaagtgcgcagacaagcatgagcggcacgtgtagctactgcgcaattcgtgcatctcgactcatgtattcttgagatctcaggagatgacaaagaacactgctggacttggctatatccacccttattaacttcgtgccttcgctcgtgacgggcaatttggaccatacttagaccttattggggtcctcaagtcgaggtgtggaggcattgggggcgaaaccagctaggcgatagatcggccagaggacaaggctatctagacatagaatacgcaaaagaaacggaaagcactagcccaaacaaagcatctcggcttgtatggcccaagggtacgaaantcccggaataacacttccgagtacatggaagctgacatgtatnaatacaattcatttcatttgatagtcggatcttttgtgtatttgctcgtataaaaattgtgctttaatttattgactctttttaatgtgggatttaggtaatccatggtaagggaaattaactcattgcacataggcagattgccagggggagaaactaaagataccattttgggatagacatttttattgcgcatcgccagggttatcttagaagtctaaaattacttgagggatcaaataagtttactagaaaatatttgtggggggaatttgttataggggaattaagtaaactcaaacttaaggcctgggctgtaatttccaaa

SEQ ID NO: 616354 - DNA, 943 bp, Homo sapiens
gtgtaagtaatattaggtctgcgcgcgtgttcgattactagcagatgatagaaacgtatgaaatcagcgatggcatgctaccaggatgaagattgaatcatcctcatggcatagtcccacggactcaagtgaagtgacacacatggggcaggcgatagggagtggaccgtcgtgggtacgttatagggcaagtgcggcgtgtcttgcatgatagcaactaggaataatgctcaggtgagcttgcaggtaattcttaaggctacagagagaatatactgaggtatgacagtacagtaactcatgttgttgttcctggtgatgcaggttcaaagataccgttgacagtgtactgctgtggagatgtactgcaatggatgctgggatttctcaagaagactcttgatagtggggctcaaaagccagtgctcctacggacagcaccaagtaatgtgcacaccagtgacaggcaacaaaggtcactggaaacactatcctgaaaacgcgctcccaacgccgaaagactacgcgtgtccacactcgaggatgagacgatccgttgtctgtcgcgaaaacggtcgtgggtgtctgaaactgtggacttggcgtcagcatttccctcactgtgatgttggaggggaaaagcacgtttcagaaacggaacgccattttcccagacaggtgaccccatgcgttatagttcaaaagggctccgtatacacgtttggcgaattgttgtgcgcggggcccaaagaagtggaccttccacggtgaagaaacatgtgccaaaggcacaagaaaccacggttagaagcggttggatcgtccaggaaacccaaatcgaaactaaccagggggtaacgggagattaccagtgacggaaaaactcgccgaaatctcttgacatcagagcggcatttctggcggcatcatggtacttatacat

SEQ ID NO: 616355 - DNA, 561 bp, Homo sapiens
  misc_feature (73)..(73): n is a, c, g, or t
agaaagtacttgtgctcctgatattcacctacctagtgatcaacttggcatcatcaaaatggggataaacaanttctatgtctcctgatgtgagcagtgggaagcatacagcattaactatgtagtttctcaccaaaaatgttaagctaaacctgataatgagaaacaatcagacatggggtattctataagaaaatcagcatggactcttcaaaaatgttgatgtcatgagagaccataaaataaaacaaagaaaagaggattattctagatgaaaggagctaaagagccataacaacagaaaataatgcatgatctttaattggtcctgaatacaaaaacaaacaaacacagctataaataatattattggaacaattgaagaaatttgaaaatattctgcagtaaatagtattatagcaattctaattttcttggggcagtaaggatattgtggttatataggggagcatctttatttttatagaatatatagtaaagtaacatggtgtctgcaatttttttaaacaggccatacacacacatatagaaagaaaaaaa

SEQ ID NO: 616356 - DNA, 165 bp, Homo sapiens
  misc_feature (1)..(1): n is a, c, g, or t
nccccggttattcttgaaagtctgcgagacatgcacctaccagaaggaaccaactctggacataagatcacggttggtgagtgtgggagacagccatgtacaccctgtggctaagtactgggccatctgtactagttgctacatacatacctccatggtgctagt

SEQ ID NO: 616357 - DNA, 268 bp, Homo sapiens
tgcttgccgaagagggagcgcctgtcacccggcgtgagagacccgagagagactgcacttggcacagcgcctccatcccttccagactggtccagacgtcggggaggtgaaacacgtctctatctctaccagctgccggcggggcaaagccccagagcctcactggccccggcggaatgaggagaccatgccgggcgcgcacacacggcagcttctgtatgaaaacggcgaccttcgggcccttttctccagcaactgcagagccatt

SEQ ID NO: 616358 - DNA, 223 bp, Homo sapiens
ctccacccggacgggtggcaaggtgtgcttaaaaagaacaaacaggccaggcgcagatggctcacacctgtaatcccagcactttgggaggccgaggcgggtggatcacgaggtcaggagttcaagaccagcctggttaacatggtgaaaccccatctctactaaaaatacaaaaattagccgggcttggtggtggtcgtctctaatcccgctcctcggaagg

SEQ ID NO: 616359 - DNA, 337 bp, Homo sapiens
  misc_feature (52)..(52): n is a, c, g, or t
gctggtcttgggaggcagggcaacctccgggtttgggcacggtgggtggccnccatagccccagtaggacaaacgggctgggtttgggcagcccctctggcaggagggtcaccctggcctgccagtttgccttccccccaaccccgtgtcctgtggtttggttggggcttcacacccacccctggactgaccctgcaggttgttcatagtcaaaattgtattttggatttttacccaactgtcccgttccctgctccccaaagatacccagatatatacccccagtggatgggcggccaagacaggcagagatctataaacagacaggctttatgca

SEQ ID NO: 616360 - DNA, 192 bp, Homo sapiens
atgcggtgaggtctagatgagttgagtttgctcatttagagactggcatccacaccatctcttttgagccccacataaattgttagtaagcaagtcagtaaaatgattttcactccattttactagggaacggaacaagtggttcaaaacagacaactggaacaacctcaaagatcatttgatcgcaggaat

SEQ ID NO: 616361 - DNA, 332 bp, Homo sapiens
tggaggaacttgccggtagttatgtgacacatgaaatcaaatgcatttcagtctacttttaccgtgggtctatgtggccattcttctgttcaaatctgtttgaaagcatggattgtgccacacacccagtgatccatcctaaaatgatggactgtcagtctatattccaaataccagagattgaacatttacagccttgcgttggggaacatctcgatgtttgaacctttgttgttttttgtacagggcattctctgtactagtttgtcgtgactgtgaaacacctagcggaatagcctacatttgtatttattttctattccatacttctg

SEQ ID NO: 616362 - DNA, 474 bp, Homo sapiens
ggcccaggcaccctggacgccccatcagtggtcatgggatggacagccgaccggccatggccatctttgagctgctggactacatagtgaacgagccacctcccaagctgcccagtggtgtgttcagctcagacttccaggagtttgtgaataaatgtctcattaagaacccagcagagcgagcagatgtgaagctgctgatgaaccacgccttcatcaagcgctctgagggggaggaagtggacttcgccggctggctgtgcagaaccctgcggctgaagcagcccagcacacccacgcggactgcagtgtgacagccagcgcccagcagtctgtgtccttgtccctgtcggcacagtggccgctgcctctggggacagtgatgctgtttgttgtggcaggggacctatgcccatgcatttgaaaaccaaacaaaatgaagaaagagaaagaaagaaagaaagctacaaaaaa

SEQ ID NO: 616363 - DNA, 706 bp, Homo sapiens
gcacgaggaagaatcttcttgaggacaggaaaaagtgccgaaatcactaacacatggtatatcataattgattgaaattgtggtctgtccaccaacggaacccaacttggcttcattcgcatattgatacgccatatatgcggcgtttgaatatgtagatgaatccattagtgtatattgataaaagttgatgttcattccgtttttttttttcgccatctggcaggcatgcttccatacttcctgatgctacgttaagtagctccagaaaggccaagattaccaaaaatatgcagtggtgtgcaattgtcattttttttagtggtgctaatcaatttaaagaaaatcatttgcggaatttactgcagagcaagaaatcatgagggtgctctttttatatttattattttgtcgaaatatgaagcagaataccagaaccgtccagtgattcaaaacgataagactgtgaaagatttaacgtatctcccatgaaaatttgaccagaggaacttctctaccaatagtgtttacacctacgtttatttccattctatccatagaagctactaccttatttcctaccagctcccactaggttttaatgagcgcaaaacaaaataaaagtttacggcctttagaggttaagcgatctacgcatagatgtgtagctcatgctgcatttcgcgtactcctgcatgcaaccaaa

SEQ ID NO: 616364 - DNA, 189 bp, Homo sapiens
tccgtgtacaggagctgggcctgtcagccccgatgaccttgctcccgaacatcaccagtgtgcacaccatcgagatcctccgggagaagggcttcgaccatgcgcccgtggtgtatgaggcgggggtaatcctgcgaatggtgacgcgtggcaagatggtctcgtccctggattccgggaaggtgcagc

SEQ ID NO: 616365 - DNA, 247 bp, Homo sapiens
taggtaggttaacatgcatattagaagacagacagattttttatatgagcactgggcctatcccaactgagcaaggctaaattactccaactcaaagccgttctgtaagaattccaggtcaggtatcccaggcctgtctgtggtcgtagtgtttccacacacaccaatactaccgcacggtggtgtccactctcttgaagtccttagacagctgcaccaagagttacgccaggcccctggtcgacgc

SEQ ID NO: 616366 - DNA, 595 bp, Homo sapiens
  misc_feature (56)..(56): n is a, c, g, or t
tcctattttctttttttttttacccagtaacattattggtaatatgcaatcccggnctgaagcccataagtacaaaggaagtagaaaatgaaagccctactccacaggtatcatgatgcgcatggatatgttcagaagagtattttcaaatcacttaaacagagctgaatgcagagcaaaagcccacagcagcaattaaattacattgggaataaatcttttggcataattttcataacccagatttcagagaatacctccacccatgccaggtgtaccagacaatcccattgtctgttttagccgtgtaggggccgctgtagtagacaccattcaggtttgcagagtgacccttgttaaaccaccagccagactgatctttttctgcgcagttcccttcatagttgtcatgatctctgtcccacgtgatgaattccattctttggtgattagccccccgcggcacctcaggatgaaactcccccgcaagggaatctccagctgtcccagaatattccccaatatccaactcgtaaaatttctttaaatctcccgctttgactttctcattttgtgcatatcgctaactctctcc

SEQ ID NO: 616367 - DNA, 262 bp, Homo sapiens
  misc_feature (38)..(38): n is a, c, g, or t
  misc_feature (231)..(231): n is a, c, g, or t
tggagattggaggtggggggattagaaatgggctgctngagtagtctagatacaaaggtcagctttagggtggcgcgcggtggttctcgcctgtaatcccagcactttgggaggctgaagcgggcggacaatgaggtcaggagatcgagaccatcctggctaacacggtgaaacccgtctctactaaaaataaaaaaagtggtggcgggcgcctgtagtcccagctgcttnggaggctgagacaggagaatggcgtgaaccc

SEQ ID NO: 616368 - DNA, 185 bp, Homo sapiens
ttattgcagagagaactgctagagcggtgtggtatggtgtttgggtgaaagtcatcctcatcatctgagagcccttcaaacaggacgccacctgggatatcccggctatgagctggagggcatgctccgggaagaggagtcagtcccagagcattggggcactgcctgctacggaggtgcaaaac

SEQ ID NO: 616369 - DNA, 411 bp, Homo sapiens
ggcacaaggtgatctccttgaaatggtcacacacctttcacctgccttttctcttaaactcggttgatgtcaggggtgtgcgagccagagacgagctctatcattgatgacgctctgttagctcacataatctccatgtgtagatggggccggaatggcgttgatagcatgtgcatagtgggtcagtattccggactacaggtacatgacgccggctccatgcagcagtcattgtggctacccgagtagcgctgaataactcacacaggctgtggtgctgggttactaggatcttaggtgcacgacgatgcatgtacgcagccccttagtagatgtatggcgactatcgtgtactggtgtaccttaccgtaagctgctggccatatggctcagctggtactagttcagagc

SEQ ID NO: 616370 - DNA, 144 bp, Homo sapiens
agactcagccgggacataggtgtgctactgcggctggagctgcgatgagactcggaactcctcgttttagtttgtgctccatgttttgtgtatgtatggtggtttgtaaatttgtagaattaaatcattctccttgttgtggag

SEQ ID NO: 616371 - DNA, 939 bp, Homo sapiens
aacaggatacacccataatgcactcagcaagcctggtgtaacatctagattgagttagcatttgtcatcaaatgatggccatttgttctgtttcatggttgtgaaccaactgaagacataagcagggcctcagtaacccacaaatagcacatgtgtgcataagctggaaaaatgaacccttcttctgggaggacgccagcccaggccaggtcacccggcttggcctaggcagtaacatgagagtgagatttgggtcccgttctgttccccagtggggtatctatcactttctgcaggggcacaagcctacatggtggctctggtcatcatcattagagaatagacagaaatgggctgcacaccagaatgaatgacttgaattgaaagggcacggagtgatggtggcaaggaaacaaccaagttgatactgatttagactggtgaggaaccagtaagcactgtgtagtacatgcaacacggttaaaattcccgtggaagatgttacataatcctatcaatggctgtccatttatggaaatctattttaaaaattttatgtaatactgcacagtcggtttgcatgatgcttgtacgtagtagcaactcagtaaatactgtttgaatgaactagtataggtatggacttaggtagtgttcatgtatggtttcaaagaccggtcgttaaggtgagcaagaagggcacatccccctcaagaacctttacatccaggtacgcacgcagaaggtgacgacgggcgaaactacaggtcggggtctagaaccctaaaacacactgagcattctgaaataggcgacacccaacccccccccacataacagcgaaccgccaagcggcgcgagaaagcaaagccgccgggcactacaagcagcgagcagcgaacacaccacggcaaacgaaccagaggaaaagccggcaat

SEQ ID NO: 616372 - DNA, 175 bp, Homo sapiens
taaagacgatagtgtcaatgctgtagtccgcaatgagggtgcactacgacagtggtgctacattttctaccccagaaaactaggatagctcttatgaaacttatgggtcgaaggtggctttatcattactgtgagagtagagtggttagttgaacagggccattcaacgcctccg

SEQ ID NO: 616373 - DNA, 204 bp, Homo sapiens
ttttttttgagacggagccgcgtctgtcgtccaggctggagtgcagtggcgcgatcttggctcactgcaagctctgcctcccgggttcacgccattctcctacctcagcctcctgagtagctggggcaggaaggactgcttgagcccaggagagtggggctacatgtcatccactgcactctggcctgggtgacagagcgagac

SEQ ID NO: 616374 - DNA, 148 bp, Homo sapiens
atgagccggtccatgtttgaaggcgtgagagagagagagagagaaagaagagagagaaagaaaaagaaagaggaagagaaagagaaagaaaaagaaaggaaaagaaagaacaaaagcctcatggctttcatgctactatgttttttta

SEQ ID NO: 616375 - DNA, 316 bp, Homo sapiens
  misc_feature (81)..(81): n is a, c, g, or t
aggattttttacacttaaatttaaaaccccccccagtttgtattccttcagcagaacctacagaaattatctactgatttntattagtaattaaatcttttcttcagtctttttagacttgacatgaatacgaagagtttcagaacaggcagagaatgccttaaagctttgcatcagttagaggaggcccgtctcttagttgaacagtgttgagtccaccaggagctactcaaagtctcagtgtgccaaaacttcgttcagaaatactaagttctagagctgctgttaagaaactgtgttaagatactcttcccaa

SEQ ID NO: 616376 - DNA, 239 bp, Homo sapiens
ttatcccccgcctactcgggtaaaggaggggataaaggaatgagtcacggttaaggactctttcattctgccttggcaacaacaacgacacacaagagacggcagcacgcttgcccgccgtagcacgccctgcgcgttcagagcgaagctggtaagcggcgtgtcagttggccatgcagcaatcctggattctcgtctcgcgctggacccaccacgtgaatatcccaccgtttgcccgg

SEQ ID NO: 616377 - DNA, 315 bp, Homo sapiens
aggatcctcgggtcccttgtctctaccataaaattcaaaaattagctggagcatgtggcttctgcatgtagtcccggccactcgggagcggtgaggcaggagaatcaattgaacccggcaggtggaggctgcagtgagccgagatcatgacactgcactccagcctgggcaacgagagcaaaactctgtctcaaaaaatgaataaaaacaacaacaaaagtgaatctggaaaatagcctgagcaacaagagtgaaactccgtctcaaaaaacaaacaccaaaaaaattcaggcataaaaaagggttatttctaca

SEQ ID NO: 616378 - DNA, 110 bp, Homo sapiens
ggaacaaatcaacaacaacctatttagctgtcccacaacactttctcggctatccggaatgccccgaccgttactcggattaccccggtgcaggtgtggtattaccgggt

SEQ ID NO: 616379 - DNA, 285 bp, Homo sapiens
  misc_feature (11)..(11): n is a, c, g, or t
  misc_feature (71)..(71): n is a, c, g, or t
  misc_feature (279)..(279): n is a, c, g, or t
tcacgcctttntgaaccccaaatatctgagaccagtctcagtttattttgccaaggttaaggatgcacctntgacagcctcaggaggtcctgacaacaggtgcctgaggtggctggggatacagtttgcctttatacatcttagggagacacaagatcagtatgtgtatggcgtacattggttcagtcagccttccactgaatacacgattgagtctggcccagtggatccgcattttttatgtaaacagtaagggaacgggggcaatcatataagcgntttgtt

SEQ ID NO: 616380 - DNA, 932 bp, Homo sapiens
ttgaggggcaatgaggagagaacagaaaggaagagaggggggctggccgcatcacattttattcttataattttattagtatgcataaatggttaatggacaggcattaccaacttgactgacctgggttacctaccctgcagagaaagtatatgctattttatctaacttacccaatgccttgtgaacccaatgttcataagctagctaaaactatcatcttggaccccaggtgatatcataaataaatctagcttatataatcacccattatatttttacaaaaagggagaataaaaaccgcctggctgaaaaaatgggccttttttttcaggcttttaaaatgcgctgtccaagtttgcttcctgggagttaaaacaaaaagggtggccaaaaacacttttgttgagaatggtggtggagactggcattatccggtctttttgggatggggcgccctttctgtctgggtggttgaaaaaaacatgtgggagaagaaggagaaaaatacccctttgcgatttttaaatgtcttccccctgtaaagagcaaaaataagaagttttttggtccagggagaacagtgtaaaaacttctggggttttacaatatccgtcttccgcctaaaagcggagttgtatatggacgcgcgtcaaaagagggcgggggaaacgggcaacgaaccctttttttttggggcattaagtgagggccgggggtgaaccccgagaaaaagagaaccttttttctgggggttcccgaaaaggaatatggatctggtgctgacaaagaaagagggacccgttcggtgtgggcacaccaaaaaaaatcagcgcggtgaaagaaaacgcgagaggggggatatatatttggagcaaaggggggtgctcgagggggcggccgtcctccccatgaaagagggaagaatgggg

SEQ ID NO: 616381 - DNA, 421 bp, Homo sapiens
gcagacatcagctaccaataaccagccagattcattgccataagatcgatatcaccagccataggcaatcatcaacatcaagggccatatgatgagcattcaaattatgatccgcagcatgacccctataggccaaaccaggagtcctatcattcacaaagggcaaactacagccaccagacacaagatgaccgtcgcgatgtgagtcggtctggagcagataatagaggatatggcgggtcacagggaggaggtagagggcgtgcggtatatgacaaggatggaagaggtcctatgacaggatcaagtggtggtgaccgcggtggcttccaaaattttggtggtcacagggattatggacccagaacagatgctgcttcagaatctgataattcagataacaacacaatctttgtgcaag

SEQ ID NO: 616382 - DNA, 482 bp, Homo sapiens
cactgggtacatgtggtgtcacagatggcctgctctgcacttctacttctaaagcacagatgggaagaaatggatcttgtctacgatctaccctgtacccaactgggcacttacacagaagcctcactcattcaggactgcattagaattctcatggctaggttggccgtcacttcattttaaaaaaaaattatattttacgactgcattggcataaagaataacatctaggctggccgccacttcattttaaaaaaaaattatattttacgactgcattggcataaagaataacatctaggctggattcattgttacatattgatttttttatatttatttttttttcctgtttgtaaaggaaaataacaacactatcatgtatccctaacagtatctgggcctctggcactgtgtctactaggcctaatggaaaagtagatcctgcattcacccattcaataaatatgtattgaacatca

SEQ ID NO: 616383 - DNA, 170 bp, Homo sapiens
tgttgcttgtttgcttgtaggttgatcggttggctgtatgcttattatgtttatgttacttggctggttggctgaaacagaatcagagtttactaaaagtaccataaagtttgagatgtccacaaatttccttggtataatgtgtataggaaaggtatgcaacaaactca

SEQ ID NO: 616384 - DNA, 141 bp, Homo sapiens
  misc_feature (13)..(13): n is a, c, g, or t
ccgctgcgcttantagactcgagaggatcccccttcgcagtagtatgattatcatcgtcaatcgtaatcggggagagatgttgcatcaactcagacatcttctggaagccccaggaggctgtgcagggagatgtgggattc

SEQ ID NO: 616385 - DNA, 100 bp, Homo sapiens
tgaacattcgtgtcagtgaaatagaagaagggcagctttgaggaacgcgagtaatcagctcataaatcacattgagacagttttcggacaccaatgttcg

SEQ ID NO: 616386 - DNA, 553 bp, Homo sapiens
  misc_feature (252)..(252): n is a, c, g, or t
  misc_feature (265)..(265): n is a, c, g, or t
  misc_feature (277)..(277): n is a, c, g, or t
ggaagttcttttgtatctttcactcttccttgttccttatctccacgtgtccataataactagtatagcagagatagccggtcctcagtaagtattagaaaattgaccatgcttgacattttcaagtactgtaaacatttcctccactgtattttttagaatatatcctctctcactattcctagttatagccttaacccaagtcttaaccatatcttacctctaggactagtgcttccctgttccttttgnctcattctacgcnaacgaaaaaacnaacaaaaaccaatcaacccatgagaccacaatactttaaaaaaaaaagatcatagtaatcatctcggtagattatgataatgtttcttccttttctcacctttacatggcttcattatagttgacatgagattaagattgtggatattcgaggaacgttcctgtcaacttcctttccaaaagttattacaacttccagcctgtcttacctgtttctggcaggtaagcgttatatcttttgaagtctacgttaccattctgatgttggagcggccgc

SEQ ID NO: 616387 - DNA, 157 bp, Homo sapiens
tcagacctaactgtgggacttaaaatgcttcccctgcccgctgacacaccacaccaccacattattaaaggcctatttacagcaattccttttactgagctcatcatgtgtagctatcaagaaaacatcacaggcactttgggaggccaagcagtcg

SEQ ID NO: 616388 - DNA, 792 bp, Homo sapiens
atcttcacttgtcatgttatataatcattattactttgctgtaatgttaatattgatttattaatatatattatcttttcatacattttctaagaaacatttatattgataagatcttttattttgccaagggcataaattattgtttttcttttttttttttaaataaatttcaccaagttatggctcttcgggtgaggttgttttccctccgttggggaattctaatcccaggcactcctcagtctcatggttcattacctatgaggtttcattaactctcttggtaaatttgtacggactttgggagttacttaaaaaaccacagttcctaaaacattttattggggagctcaattttcgggcttcctacttaccaagaggcagtaagtgataacctcgggccttggtcttacacttttcacctttcgggatcccttaacctcgggtcccaagttactaccctggcttataatccattaaccactcactaggtcacaaagttggagggctcgggtttgacccagtgattgagaagtgtctcagatgtcggttttatttttttgcgaaatttttataagggagacaggtgggcgtggtaaaaatattttttaaagagcatatacctataaggggagggaccttaaagttacctttacagggggggggggggtagaagactcatttaatagttagtgtaaaaaagttttcaccagcggaagattttctttattttaaaaagaggagttcagggtgttaacctggcagtataccacaatttaagtgttttag

SEQ ID NO: 616389 - DNA, 372 bp, Homo sapiens
ttttgttttttagagatgcagtcttgctatgttgcccaggctggtcttgaactcctgggcttaagcgatcctctcacctcagcctccgaaagtgctgggactagaggcatgagccaccgcccctggcctaaacatcatctttgattctctgtttctttcatgctctcctgtttgctctgcctccaaaatctatccttagtccatcactttttccccctctgccccttcgtctcttctccaccaggcagacaactgagccttttaaacctccatcagatttgtcctctcctggcttggacccctgcaatgacttcttacctgggtccagcctccgtcgacgcggccgcgaatttagtagtagtaggcgacagc

SEQ ID NO: 616390 - DNA, 238 bp, Homo sapiens
tctgtctcgtcagcctcccgaggtagctgggactactggtgcggcaccacaccggctaattttgtattcttagtagagacggggtttcaccatgttggccaggctggtcttgaactcctgacctcaggcaatccacccgcctcggcctcccaaagttctgggattacaggtgtgagccaccgcacccagcctcttctgattttgaatccagtattcttctcatttgcttgttccgctg

SEQ ID NO: 616391 - DNA, 437 bp, Homo sapiens
ttttcaagcattgtacaattttagactgagtaatttaacaataagtaaaaagtggacatgctaaacaaataaaaaaaaaaaaaaaaaaaaaaaaaaaaaaaaaaaaaaaaaaaaaaaaaaaaaaaaaaaaaaaaaaaaaaaaaaaaaaaaaaaaaaaaaaaaaaaaaaaaaaaaaaaaaaaaaataaaaaaaaaaaagaatattaaaaaaaaaatcagaaacgaataaaaaaaaataactattatgataaaaatatatgatgttaaaaaaaaatattgtcttataaaaatattaatatatataaatttaaatctataatagaaaataccttaaataacaaaaaacgtataaaaattatacataattaaaaaaatatgtaccaattaatatggccaatgcaaaactgaaaagttataattaatgtcaaaaaaaagata

SEQ ID NO: 616392 - DNA, 458 bp, Homo sapiens
  misc_feature (85)..(85): n is a, c, g, or t
agctttatgattaagaaagagttggcaaaagattttgaattcgctcccaaagttgggagggatttttgcccacgtccaacccaanaatgtgaataacgccaggggccccaagaaaaaaactgttaagaaaggatatcgccattccccccccccccaccagaaagtccggtcgataaagaattgggtagtggtggattcttttttaaggccaatccaaaaaaacggccgaaaatggaagccattaaggcttaaccagccgaagccctccgttagaggccagagggaagaaaccaagccttttttccccctaagggaaaacccattgtggaacctaagggagctttttctgaaacttaaatttatgtggcccgcctccaggaaaaggtttaaaaaaccaaaaattaaaaactgggggctctttccgcttaaaaaattgccctttaaatgggggccgatta

SEQ ID NO: 616393 - DNA, 113 bp, Homo sapiens
tgtatccggactgctgaacgtaccagctgtgtagacctgagacaaatcatatccctcacagaacctcatagtccttgtcagtcaaatgcagacagcagttgcaactccaacag

SEQ ID NO: 616394 - DNA, 944 bp, Homo sapiens
  misc_feature (107)..(107): n is a, c, g, or t
  misc_feature (198)..(198): n is a, c, g, or t
  misc_feature (205)..(205): n is a, c, g, or t
  misc_feature (210)..(210): n is a, c, g, or t
  misc_feature (273)..(273): n is a, c, g, or t
  misc_feature (318)..(318): n is a, c, g, or t
  misc_feature (320)..(320): n is a, c, g, or t
  misc_feature (340)..(340): n is a, c, g, or t
  misc_feature (346)..(347): n is a, c, g, or t
  misc_feature (395)..(395): n is a, c, g, or t
  misc_feature (412)..(412): n is a, c, g, or t
tctcagaggatcccctcgaatcgaggtttctcaacatcctggcttagtattgtgtgcaaaatcagagaggggtgcaagatcctgatttttcaggagttcaagcgacnatggcagcccaatacggcagtatgagcttcaaccccagcacaccaggggccagttatgggcctggaaggcaagagcccagaaatcccaatngagaatngtgtnagtgggtaaaaccggagcaggaaaaagtgcaacaggaaacagcatccttggccggaaagtgtntcattctggcactgcagcaaaatccattaccaagaagtgtgaganangcagcagtcatggaaggaancagaanntgtcgtagttgacacaccaggcattttcgacacagaggtgcccaatgntgaaacgtccaaggagnttatgcgcgtgcatttcttttggactccccaggggcctcatgatctgtttcgtgggtgttccaagtgggcgtttacactggatgaagagcacaaagcaagagaagatcctgaaaatgttgagagagggctagaacgttcatgatcctcatatcaacgggaaagatgatttaggtgacaccaaattgggttgctacttaagggaagtccagaagaattcagattgatgggcatttcggtgaccggtaatgtggttaaacaacagggcaaaggcgttggagaggaggcctagtaggcacagttggtgggcttgatcccagggtggtggagggagacacaggaggtggtaccctatggttgcaaaggggggggggagtcagaagaaacaggatgcagatccacattgtgggtggggaaaaatggttaaaaggttgaaaaacaaatggaaaatgggagaaaaactgaaatacaaggtttattgtggagagagagggagaggtaaataagaggcagtttgggcagaaatgttttgaa

SEQ ID NO: 616395 - DNA, 978 bp, Homo sapiens
  misc_feature (107)..(107): n is a, c, g, or t
  misc_feature (232)..(232): n is a, c, g, or t
  misc_feature (239)..(239): n is a, c, g, or t
  misc_feature (244)..(244): n is a, c, g, or t
  misc_feature (307)..(307): n is a, c, g, or t
  misc_feature (352)..(352): n is a, c, g, or t
  misc_feature (354)..(354): n is a, c, g, or t
  misc_feature (374)..(374): n is a, c, g, or t
  misc_feature (380)..(381): n is a, c, g, or t
  misc_feature (429)..(429): n is a, c, g, or t
  misc_feature (446)..(446): n is a, c, g, or t
tctcagaggatcccctcgaatcgaggtttctcaacatcctggcttagtattgtgtgcaaaatcagagaggggtgcaagatcctgatttttcaggagttcaagcgacnatgctgtaaggcagcaaagggcaagaacggaagtggagagtaaggatgggatacttgaattaatcatgacagcacaccaggggccagttatgggcctggaaggcaagagcccagaaatcccaatngagaatngtgtnagtgggtaaaaccggagcaggaaaaagtgcaacaggaaacagcatccttggccggaaagtgtntcattctggcactgcagcaaaatccattaccaagaagtgtgaganangcagcagtcatggaaggaancagaanntgtcgtagttgacacaccaggcattttcgacacagaggtgcccaatgntgaaacgtccaaggagnttatgcgcgtgcatttcttttggactccccaggggcctcatgatctgtttcgtgggtgttccaagtgggcgtttacactggatgaagagcacaaagcaagagaagatcctgaaaatgttgagagagggctagaacgttcatgatcctcatatcaacgggaaagatgatttaggtgacaccaaattgggttgctacttaagggaagtccagaagaattcagattgatgggcatttcggtgaccggtaatgtggttaaacaacagggcaaaggcgttggagaggaggcctagtaggcacagttggtgggcttgatcccagggtggtggagggagacacaggaggtggtaccctatggttgcaaaggggggggggagtcagaagaaacaggatgcagatccacattgtgggtggggaaaaatggttaaaaggttgaaaaacaaatggaaaatgggagaaaaactgaaatacaaggtttattgtggagagagagggagaggtaaataagaggcagtttgggcagaaatgttttgaa

SEQ ID NO: 616396 - DNA, 778 bp, Homo sapiens
tggacttttaaaaaagtaagccttatatccctggtttggcaaataaacggggctaagtgggtggctttgggtgattagtcaaagagacaaatcatatctgtgagatctcggatcttcctgggcttccaaccttagctgggggctggccggcagcagcagggagcacgctggtggttggcagcagccacagggggcaagcagccacaaagggcaagatgggatcagccaaagaagggctggaccttttcagcaagtggggaacggtgtaatccggtctccacagacaaaggcgcaggactcgtttggtcccctgtggatcgatacgacctgggcggtactggatggcaaccacgccggggtacgcccaatctggcaagacacagacatctgggcaacctgttggcggaacaccctccaggaaagcgaagacatcgcagacagttcctccggggatcctcaaagccctaaccagggttgcaccgatgctgccatttgtcggaacccacctgctggatagaccagcccccaaagggcacaaggtgggacacatgttccaccattgtcaccagccagcccgatgggcacttcagcgggactccccacacatgggtctcccagcactaggactccagctgtggcacactcactcccacgcctacacagggctgccccgtggccacatcacagcggacgaaccccacaacccggccacacagcaagctcttcacccaggcccgaaaccacggtcgcggaccggacacaggaaaacacatggcgc

SEQ ID NO: 616397 - DNA, 1072 bp, Homo sapiens
  misc_feature (1072)..(1072): n is a, c, g, or t
ggaaacggtgcgtgagcacgggcctgaggaagagtcaggtaggggacaagggtgtcagaggcctagaagcagccccgcagctcctcttgagcagaaggggaaaccaggaagggaaacaaacccttccgagtcctcgggaagtttccagaaccaggagcacagagagttacagttggatccagactgggggggtctccaagtttgctaggaggtcacagtgtgggagagagccccaggcggctgagtgacagctggctgttgctgacttccatttttcacacctgggaaagggctctgtgtacagccctatgcccccgaccaggtggctcaagtagggacggcttggggatggtggacagtgaccagaggagagactggctatgggaatgttgcagtgccaccctaagtcacaaaaagtctttgctactcacagccccaagccttccctgcctgtgggtactaaacacccaaggactgcccatctgtttctccctggacagcaacggacggcaggggatgtcaggcagagggcagggtgctggttaaactctgcccagctttgggcatctctcatagactcttcctagtgctcaagctggagacatttatgggaccaggaggcgggtcttgagcatctccccttgtcccatgcattgcaacatcaatggtagtgatatccagatggggggtgaatgggtccgaagcaggattgaagtaagaaccaggttctgaatcaggcagttaagaagggatcaaaccccaagaagattacatagccgggtgagggcccaaggcagagaacctgtgattctttaccctcaaggacctgttttctcccatttcttgtgaggagcccaagcaggcaaggaaagggggccctactgtggacacaaaggttggcgacggtcacgcaatagcagagaaacctcgaagaactaaacaggggagagtagaagaacacacattaagtaagagcaaaactagggagagccaaggaaggatgggaaggcacataattaatataggatatcactatcgtcgtccacggtcggtcgtattcgtgtgctatggn

SEQ ID NO: 616398 - DNA, 959 bp, Homo sapiens
agcggaatgtaatgcacatccctgtgaccacagtcttccgtgctctcagacccaagctccgggacgacacggactgggtccaagcacctggcacattgtttgtccgcactgtctttgaagctgcattgtggaacctgctgtgaatggtagcggcgtatcttctgatagcagtgattgtaccagcttttgtatttgacagctgatttgctatctgaccagttctcaagagacgtatgagcgaggataccatggccgttctccccttgattgtggctgtccaagcatagtgcaagcaccacgcggtgttgacgcgaagctactgtacagaagggtggtaggctcagtgctgactgtcctagcacgttcctattgttgtccttgcggcgagtttggagtccgctaggatgggcctggtttgccctagatgaatggttctagcgcgatcaggacgtacccttggatattgcgagcgtcacccggaagttcctatgcgacaacggtagatccttgaccttgcctcgctgacgtggcgtaatgaaacaagcatcggcctcataccttgtagtcttgactgagttggctattgacacatgagattacctctaccaccagttggaccctaaaacaatccttcggaaatgcttagcgccagaactagaaaagagcgcaagaggaccagtggtctccaagcttggagccccacacgaagcaaaaccgaccgtcgcagtccgacccgagatagaaaaaaccgagcgccccgggggccagcagtgaacgcgctcacgaagacaaaacagcacgtgccgagtcaaccctaacaagatgacccgaagagtacggacggccaaggcaatgaccccccaataacgacgaaccatacctcccactcgccatagcgatgaagagacaacggcgggggccccgcgttggaccccccaatgtagcaagaagcctccaat

SEQ ID NO: 616399 - DNA, 124 bp, Homo sapiens
ccggcgccagtccatcgcccagccagtagagcgcgttatccagcgcgtcttgtcgtccaactgccacagggtatcgcaagccgcggtgcggtaatcgatcaccttggtatccgggatcgcctct

SEQ ID NO: 616400 - DNA, 148 bp, Homo sapiens
tttgcttgctggtcgtccctagcacggatcccctatccatacgctcctacacatgatgctcctacaccatgagtgccctacacgactatgctcttcctatcacttgtgacagcggcgcttcaccgacgccgttggacttgttcaccca

SEQ ID NO: 616401 - DNA, 436 bp, Homo sapiens
tggctcttgcatggggcccaataagaaaatcttttccggaaaccctcacaataaagccttaatagccctttttttgttaaaatgccaaagtaggttagcccaaggccccattttcttttgttaaaaaccaaattcaaagatttaattcctgctaagaatttaaaaggtcggccaacccattcatcataaaatccaaataatcttgggacccatttatctagtgattcatcccccaatctgttgaaaaagcataatataaatggtgatgagactagaccctaatggaaatggttaaaaaattcccaacccccaggggggggaatgcctttaaaaaccctaatgggaaaaaaagctggtaaaatttaattggtcaagcaattccctccaataaaatggaaaaacctgaaccttttggaataaaaccaaaatcccgccc

SEQ ID NO: 616402 - DNA, 529 bp, Homo sapiens
  misc_feature (14)..(14): n is a, c, g, or t
accggactcctggntgtgttgcccgtctcggcatattctcataaaaacacacgtgctctccctgctgatcgtgtctgactaatctctcaaaccccaacctcttctacaaaacaacaactcctttctttccggggcatggttggatactttcgcctttggatacctggttttgccatcctaacaaaaccattatatacactcacaaaaggaaacctagctgaccccatagatcctaaatcctttccccactcctctttccgttccttgaagacagctttaaagactgcccccaccctagctttccctgattcatcccaacccttttcattacacacagctgaagtgcagggttgtgcagtcggaattcttacacaaggaccgggatcgcgtcctgtagcctttttgtccaaacaacttgaccttactgttttaggctggccatcatgtctccatgcagcggctgctgcctccctaatacttttagaggcccttaaaatcacaaactatgctcaacacaccaggaaggtcc

SEQ ID NO: 616403 - DNA, 148 bp, Homo sapiens
aggaccctgagtcaatcatatgctactttgaattacattttaatagactcagggtcctatttactcctttgtacaggtattaaataggaccctgagtctattaaaatgtaattcaaagtagcatatgattgactgaacagtcatgtaa

SEQ ID NO: 616404 - DNA, 129 bp, Homo sapiens
gaaaaaggcaagcttttagcccttgaaggaatcatcaaactttgggcctcggtgtgttcccccagggggagaaaaaaacgccatgttcctccaaggggcctccaaaattaaataagcaatgacttttta

SEQ ID NO: 616405 - DNA, 279 bp, Homo sapiens
  misc_feature (42)..(42): n is a, c, g, or t
  misc_feature (54)..(54): n is a, c, g, or t
  misc_feature (58)..(58): n is a, c, g, or t
  misc_feature (61)..(62): n is a, c, g, or t
  misc_feature (65)..(66): n is a, c, g, or t
  misc_feature (81)..(81): n is a, c, g, or t
  misc_feature (91)..(91): n is a, c, g, or t
  misc_feature (139)..(139): n is a, c, g, or t
tccttgagcccactcactcagagggcctgtcactagtccagnattgaatctgcnggtntannagnncaggcagtgtgattngacagcgtgntcttagagtccagcctttgaacctggcgctgaatcctgactttactgnttattcagggggccactagctaagttaatttgtgagcctgaggaacaaggcatgaccaagatttacaattgatactcgagacaccctggaagtggtgcagcaatttagtggttgagaggtactctggaggctgaggcggg

SEQ ID NO: 616406 - DNA, 567 bp, Homo sapiens
  misc_feature (62)..(63): n is a, c, g, or t
  misc_feature (65)..(65): n is a, c, g, or t
  misc_feature (70)..(71): n is a, c, g, or t
  misc_feature (76)..(77): n is a, c, g, or t
  misc_feature (81)..(81): n is a, c, g, or t
  misc_feature (99)..(99): n is a, c, g, or t
  misc_feature (116)..(116): n is a, c, g, or t
  misc_feature (118)..(118): n is a, c, g, or t
  misc_feature (121)..(121): n is a, c, g, or t
  misc_feature (123)..(123): n is a, c, g, or t
  misc_feature (127)..(127): n is a, c, g, or t
  misc_feature (131)..(131): n is a, c, g, or t
  misc_feature (144)..(144): n is a, c, g, or t
  misc_feature (150)..(151): n is a, c, g, or t
  misc_feature (154)..(154): n is a, c, g, or t
  misc_feature (165)..(166): n is a, c, g, or t
  misc_feature (184)..(184): n is a, c, g, or t
  misc_feature (191)..(192): n is a, c, g, or t
  misc_feature (200)..(200): n is a, c, g, or t
  misc_feature (217)..(217): n is a, c, g, or t
  misc_feature (219)..(221): n is a, c, g, or t
  misc_feature (224)..(224): n is a, c, g, or t
  misc_feature (228)..(229): n is a, c, g, or t
  misc_feature (239)..(241): n is a, c, g, or t
  misc_feature (246)..(247): n is a, c, g, or t
  misc_feature (252)..(252): n is a, c, g, or t
  misc_feature (261)..(263): n is a, c, g, or t
  misc_feature (265)..(265): n is a, c, g, or t
  misc_feature (278)..(278): n is a, c, g, or t
  misc_feature (288)..(288): n is a, c, g, or t
  misc_feature (295)..(295): n is a, c, g, or t
  misc_feature (297)..(297): n is a, c, g, or t
  misc_feature (302)..(302): n is a, c, g, or t
  misc_feature (305)..(305): n is a, c, g, or t
  misc_feature (309)..(309): n is a, c, g, or t
  misc_feature (311)..(311): n is a, c, g, or t
  misc_feature (322)..(322): n is a, c, g, or t
  misc_feature (326)..(326): n is a, c, g, or t
  misc_feature (329)..(329): n is a, c, g, or t
  misc_feature (332)..(332): n is a, c, g, or t
  misc_feature (334)..(334): n is a, c, g, or t
  misc_feature (344)..(344): n is a, c, g, or t
  misc_feature (348)..(348): n is a, c, g, or t
  misc_feature (358)..(358): n is a, c, g, or t
  misc_feature (362)..(362): n is a, c, g, or t
  misc_feature (389)..(391): n is a, c, g, or t
  misc_feature (567)..(567): n is a, c, g, or t
ctctggaagcttctggatcctaggctcatctccacagaggagaacatgcacgcagcaaaaannanggggnncctcnnagcncctccctgcacaaagaanaaaaaatggaagggggnantgnanaaanaatnactttaaaacttntggaanntgnaaaaaactgannaagtaataaatgaagaanaaaaaannaaagtgtncgaggggaaggatgtantnnnaantgtnnaaaatttgcnnnaaaannaaacnggcaaaatnnngnaaaaagggaaaanaagggaactnaaaaatnanattanatnaaananagaagaaggtnaaanaantananatggaccggnatanagtggacganaaanagtatattccaatgcatccctgcagannnagaatgtcacccgggaggacgcacggatcctacaccttacacatcataaagcgaggtgatgggactagaggagtaactggatatttcaccttcaccttatacctggagactcccaagccctccatctccagcagcaacttaaaccccagggaggccatggagactgtgatcttaan

SEQ ID NO: 616407 - DNA, 133 bp, Homo sapiens
ccagtgcgagccaggctcccagctggggcccacaccttctgaggcccaggagggacccaccctccctgcacctaccctagctgaggtccctcctgtgaggggcagaatgagaaaggcactaaagggcgaaaga

SEQ ID NO: 616408 - DNA, 425 bp, Homo sapiens
  misc_feature (301)..(301): n is a, c, g, or t
  misc_feature (326)..(326): n is a, c, g, or t
gtgatttcctaaggccaggggtaggggttggcgataatttgggaaagagcatgaaggagccttttggtaggatggatatgttttagatcatcactgtccaacacagcagaactttctgcaatggtagaaatgtcttccatatgcactgtctaataagctgaataacagtcacatatggcaactgaggatttgaaacaaacctaggacaactgaggacgtttttcaatttaaaataagctcaatagacttgaaaaagccacacgcgcccagaggctactcaactggacagcacggtatctanatcttgaatgctgcagcaattgtgngcatggataaatttgtcaaaacttattataaaagacactaaaaataggtgcattttaatgcacataagccttacctgaataaagttgattttaaggaga

SEQ ID NO: 616409 - DNA, 109 bp, Homo sapiens
atgaggcaatttattaacccagcatggcggggtgtaataggtggcgcggacaacttccgcttgtcaggcaagggtgcccatatcatagtgccccttctgtcgtcttctc

SEQ ID NO: 616410 - DNA, 145 bp, Homo sapiens
gcgcggagacgtttctgggaaggaccgccgcgatggctgcgcagggagagcccaaggtccagttcaaactgtaattggttggtaatggtggtactggaaaaacgaccttcgtgaaacgtaatttggactggtgaatttgaggagg

SEQ ID NO: 616411 - DNA, 249 bp, Homo sapiens
atagtctgaaagctgcatctgagttgtctctaactcttcccagcatctctcgtattatatgggtacctagattccttgactcttactaagccaagccaccttatctctgtagttcttattatttggtggactacacttgggggggtacttttttatggtcatgtcactgcgctattaactgggggctgggtgcttttccaccttccccctctgaatgaaagccacggaggcaggaggacttcgcctgtt

SEQ ID NO: 616412 - DNA, 122 bp, Homo sapiens
ttctcttccttgccctgcttcagcaccgagacgtggtagcgatggtcggcgatctgatcgcccagcgccgccagggggatcaccagcgcctgctcgagccggcaactgaatatgcacctgcg

SEQ ID NO: 616413 - DNA, 273 bp, Homo sapiens
acacgagttgatgctgcgggcgacatctagaggatcccgtgtgtacgagataacgggtgtacctatacacgtgtattagaaagaactctggcagcagggtagagcatggacggaactgaaaagctacatgataatacttggcaagagataagggctcgcactaaaggcagtgaggcatgggaatagagaggactgctgacaagaagagaagacaggtcttgagcaccatctgcctaggatgttaaagcactggagcaagataaaagatcacta

SEQ ID NO: 616414 - DNA, 177 bp, Homo sapiens
ccaggcccttttcaggaagaagctgcccccagagaatactctgagcattctttcgccctaaaaaagcaagtttcctagatcttaatgaaaagcccaaccttgtggaatattggtctacactaaaatagttctctgtgtattagctgactacaaataaaatggaagagactacatgta

SEQ ID NO: 616415 - DNA, 535 bp, Homo sapiens
gagtctacccatattacggattcctggcggtcgctcaacacaacgtgacacggcctataatcatgcactagatgataacagggactcgtctgttgtgtcaggccggcacatagaacactagatggatatcacgcatcaagagctcacctggaattgccctatatcacaagcttactgctctataacagtgcagcagcccgcctagaattcacaaaaacatgaacagagcttgggtgacatgtttagagagtcgcaaccttaccacactgtgatgaacatcataccaaatgtctctctacttatcaatcaacaatggtacttgtactaacttggatgattcagctctgatggttactcttcaagccatgtgatgttagtatcattgatagtgaagtgctcaatctgaaatgctacacaggtcctttgactttaggtcaagcttacatatcaaaaggtgtatctgtgtgtcagtgtgtgtcctacagtactgccatatatctgaatgggtaacaaattcagtcttcaccaccagagg

SEQ ID NO: 616416 - DNA, 102 bp, Homo sapiens
catagcatacgatagctcattgttcggtttggaagtagtaaaattgacaaagagctaataaaccgaatagagagagccaccggccaaagaccacaccacata

SEQ ID NO: 616417 - DNA, 272 bp, Homo sapiens
cgtaacgccttcccgcagcgaattccagaactgctggcgagcaaccccagctacgtattcttcagtgcccgccccgacagcaacgaaggcccacgcggttcgctgaacgtgccattgaccgccggctacagtgtggcagtggatcgcaaggtgattccgctgggcagcctgttgtggttgtcgaccaccaaaccagacggcacgccactgtcacgccctgtcgccgcgcaggataccggcggcgcaatcaccggagaagtacggagtaccga

SEQ ID NO: 616418 - DNA, 307 bp, Homo sapiens
tggaaccaaagtccagaagttacgcgtcacccttgctctacagccaaacatgcaggactctagtaaccccgcgaaatgatggggatagacgtttgcaaaatcctttaaaaagaggtcttaacggcaatcctggcctggacattgacttctccacatgcaaccaatcggggttcaattggtctcctaaacccttgccaatggagggcctgtggcacctgagccagccattatcatcaccagcacttccatgagctacaagctggaccccctgcagtcctcctgacaaaatgcaataagagcctccaca

SEQ ID NO: 616419 - DNA, 832 bp, Homo sapiens
  misc_feature (77)..(77): n is a, c, g, or t
  misc_feature (108)..(110): n is a, c, g, or t
  misc_feature (118)..(118): n is a, c, g, or t
  misc_feature (128)..(131): n is a, c, g, or t
  misc_feature (135)..(135): n is a, c, g, or t
  misc_feature (137)..(137): n is a, c, g, or t
  misc_feature (139)..(139): n is a, c, g, or t
  misc_feature (144)..(144): n is a, c, g, or t
  misc_feature (152)..(152): n is a, c, g, or t
  misc_feature (158)..(159): n is a, c, g, or t
  misc_feature (177)..(179): n is a, c, g, or t
  misc_feature (182)..(182): n is a, c, g, or t
  misc_feature (184)..(185): n is a, c, g, or t
  misc_feature (192)..(192): n is a, c, g, or t
  misc_feature (201)..(201): n is a, c, g, or t
  misc_feature (204)..(204): n is a, c, g, or t
  misc_feature (209)..(209): n is a, c, g, or t
  misc_feature (214)..(214): n is a, c, g, or t
  misc_feature (217)..(217): n is a, c, g, or t
  misc_feature (221)..(222): n is a, c, g, or t
  misc_feature (232)..(232): n is a, c, g, or t
  misc_feature (234)..(234): n is a, c, g, or t
  misc_feature (237)..(238): n is a, c, g, or t
  misc_feature (244)..(245): n is a, c, g, or t
  misc_feature (248)..(249): n is a, c, g, or t
  misc_feature (268)..(268): n is a, c, g, or t
  misc_feature (270)..(270): n is a, c, g, or t
cctggcgcatcctgctttattatgctgtggacatgctcaatgctgtattcattccaaatgaaaataactagactgcntgattgtactgtaagataaggaggaacgcgnnnagctgcantatatccttnnnncgtncnanagtgntatggacnggaaanngatagttttatctcacannnccntnnacactanacaacttanttntccantccanaanatcnncattcatcgntncannactcgnnganncatttaagatttgagatantnacaactcctgcaaacggtctgcctcgtggctctccactttagaaaccccccattactgtgaccctgttatatgagtcagctacacggcaagtggactctgaggtgacgtgcttatggaccaacatcacctacccggaccttaggggaatgggatatgctctagagaagcatcaccccatgccactgagtattcgggcacccgaatgggagaagaaagggccctcctgaacagttataccggggaacctgcgcataaggagcggaacggagaacatgctaattcacccgacagctttacccgacatatcgcttgcttattttatgcactccccctgaccgctactatagcggtggtaaaataatataattactgcacaattaacaccgagtatgtgccccgtacagaacatctgaaccccctcacaacttttacgtgcgaaaggcttttctggcccttacagctttttataccacgccacctcccgggagttcccgtccactaattacccctaccgatattttacatctcgtgattcgccccctcttgttgaccaccccaccg

SEQ ID NO: 616420 - DNA, 105 bp, Homo sapiens
tatgacaggtggagaacacgataatatcgcgacagatgggtaccacgcgagagtggcttcccagaagagggaatgatgtgtgtatgggcttgggcggcaagtata

SEQ ID NO: 616421 - DNA, 398 bp, Homo sapiens
  misc_feature (77)..(77): n is a, c, g, or t
  misc_feature (108)..(110): n is a, c, g, or t
  misc_feature (118)..(118): n is a, c, g, or t
  misc_feature (128)..(131): n is a, c, g, or t
  misc_feature (135)..(135): n is a, c, g, or t
  misc_feature (137)..(137): n is a, c, g, or t
  misc_feature (139)..(139): n is a, c, g, or t
  misc_feature (144)..(144): n is a, c, g, or t
  misc_feature (152)..(152): n is a, c, g, or t
  misc_feature (158)..(159): n is a, c, g, or t
  misc_feature (177)..(179): n is a, c, g, or t
  misc_feature (182)..(182): n is a, c, g, or t
  misc_feature (184)..(185): n is a, c, g, or t
  misc_feature (192)..(192): n is a, c, g, or t
  misc_feature (201)..(201): n is a, c, g, or t
  misc_feature (204)..(204): n is a, c, g, or t
  misc_feature (209)..(209): n is a, c, g, or t
  misc_feature (214)..(214): n is a, c, g, or t
  misc_feature (217)..(217): n is a, c, g, or t
  misc_feature (221)..(222): n is a, c, g, or t
  misc_feature (232)..(232): n is a, c, g, or t
  misc_feature (234)..(234): n is a, c, g, or t
  misc_feature (237)..(238): n is a, c, g, or t
  misc_feature (244)..(245): n is a, c, g, or t
  misc_feature (248)..(249): n is a, c, g, or t
  misc_feature (268)..(268): n is a, c, g, or t
  misc_feature (270)..(270): n is a, c, g, or t
cctggcgcatcctgctttattatgctgtggacatgctcaatgctgtattcattccaaatgaaaataactagactgcntgattgtactgtaagataaggaggaacgcgnnnagctgcantatatccttnnnncgtncnanagtgntatggacnggaaanngatagttttatctcacannnccntnnacactanacaacttanttntccantccanaanatcnncattcatcgntncannactcgnnganncatttaagatttgagatantnacaactccttgccactgcaccccgctccggttctccccctcacacccccacattacctgttaccgtgttttgtcagtttagctaacattgtgatgacttttctcctacacccccttccaactaccccc

SEQ ID NO: 616422 - DNA, 412 bp, Homo sapiens
tccaccatgcaagtctcagatatcttagctgtgtagtgattcttgaaattctttttaagaaaaattgagtagaaagaaataaaccctttgtaaatgaggctgggcttgtgtgaaagatcaggcgcaggcgttgggagagaggatgtgagctctctaaaattgtaataatggaaaggtggaaaatatcgtgtgtaaaggaaactacctcatgctctgaaggttgtgtggaagcacaattaaacatctgaaatggctttgttgcaccagagccagcgggtgtggagaactcgatgtttgttgttgttgagagggcgatggaataattttatgggtgctggcaatagacacatgctttattatttgcagattcttcttcaaatctgtaattaggcacattgtcgtttagcaataa

SEQ ID NO: 616423 - DNA, 121 bp, Homo sapiens
ggatcccatttccatgcaggtaggataagaatataacttcaggctgaccgaaaaatcagaataggtgttgcgtactagaatggggtctcctcctaccggcggggtcgaaaaaccgtggtgt

SEQ ID NO: 616424 - DNA, 858 bp, Homo sapiens
cgaggacaacgcaggaggcacaggcctgtactgggtccccgcaggtctgcgcgtctgttgttcccagcgctctgagaggcctgaaaaggaagagcaacctgtccagaatccccgcaggaaaggcacaaaggcaggggcaaatctcgacatggcaaaaactcttcaatgcaaaatgaaggaatgccttcgaatcaaggaaagcatagacaatgaagaacagccaccgcacgagggaaagccagcaagtagcttgtattctggaagacaagaagttagaaaacgagggaaacacagaaaacacgggcacagcagagttgaggaaccgttaacaggatacaagaaaagccagagcagtagcgggcaacaggcaaaaggagcaaggcacacagtccagcagcaggcaagggcacacagtccgcagcatgccagggcaggatccaacagcacagagggcaacagcccagcagagcaggggcgaagggccagagggtgcacaggcagcagccagaccagtgcaccaagagagcccacgagagtgcacgggagaagccagacaagtgaacaacaaacgggctgcagggacaacagcgcccagctgacggatgactatccccaggcaaagccacaaaagaaacaacaccaacaaggggctgggtcagtagctcaagcaaatataaggaagccataccatgatatgaatttcagcaatgaggacatgatacgagaatgggacaacatggctagggtggaaggatcacaagggaaaacaagcaaaaagaaattggggggcgtataaggtgaattgaaagaaattacaggcacccttgtatcctaggagtccagggaattaagggatga

SEQ ID NO: 616425 - DNA, 122 bp, Homo sapiens
  misc_feature (109)..(109): n is a, c, g, or t
tgagacggagtttttactctgtcgcccaggctgagtgcagtgggcgatctcggctcactgcggcctccgccttcccgataggaagcgattctccgtgccgagactcccngggtaccggagct

SEQ ID NO: 616426 - DNA, 1020 bp, Homo sapiens
  misc_feature (1)..(1): n is a, c, g, or t
  misc_feature (92)..(92): n is a, c, g, or t
  misc_feature (103)..(103): n is a, c, g, or t
  misc_feature (108)..(108): n is a, c, g, or t
  misc_feature (136)..(137): n is a, c, g, or t
  misc_feature (199)..(200): n is a, c, g, or t
  misc_feature (206)..(206): n is a, c, g, or t
  misc_feature (219)..(219): n is a, c, g, or t
  misc_feature (246)..(246): n is a, c, g, or t
  misc_feature (280)..(280): n is a, c, g, or t
  misc_feature (359)..(359): n is a, c, g, or t
  misc_feature (406)..(406): n is a, c, g, or t
  misc_feature (495)..(495): n is a, c, g, or t
  misc_feature (627)..(627): n is a, c, g, or t
  misc_feature (630)..(630): n is a, c, g, or t
  misc_feature (754)..(754): n is a, c, g, or t
  misc_feature (846)..(846): n is a, c, g, or t
  misc_feature (881)..(881): n is a, c, g, or t
  misc_feature (894)..(894): n is a, c, g, or t
  misc_feature (903)..(903): n is a, c, g, or t
  misc_feature (956)..(956): n is a, c, g, or t
  misc_feature (1000)..(1000): n is a, c, g, or t
nttttaaaaaaacgaaatgcaacatcctaaaaaagcgcgcaaaatttactattgatactaattcctagcaaggtttggctggtggctagccntagcacaaggngattngggaggagagcgcattggatatttaggnncattcaacatgcaggagggcggtgaaatcgtaactgtgtgagttgcccatcagaaagctacnncctgcnttttttaaaagtntttgctctacagagaatcttatcagcnatacaaaaatctgttcagtttttatactgaagcnagttttgagctgcacttgaattcacattcttagcaaaataattgcctgagcccacacacacattccacacgcatcactnaaggatagccattcattcttcatcttcatcctcttcctcctcatctncatctccttcttcctcctcctcctcctcagcttctggttcgttcttcttctttgagcctgttggcctgccagggcccttctttcctgcntcacttttgcccttggcacgagaggcagcgatatccttttcatatttctcctttagcttagctgctttctgttcatatggttgtgtatctgtggctgactgcgcagaccacatttcacccaatttctttgcngtntccccaatggataggccagggtgtgcacttttgagctttgggcgatgttcagagcaaaacagggagaaggcagaaggtggccttttaggagcattggggttctttttcttccccttcttatcanctttgggagggacgttatttttcatcttcctgttatagcgagctttgttactttttgccatatcttcaaacttcgacttctcctttgcaganatggtcttccatcttttcgaacacttcttggaganttccgcgaaattnacgggagantcgggtgtatttcttgtgccctcccggcaggctgcccgagaaggcgtcgaggncattatgcccgcggcttgtaggggtttctttcccatgttgaaanaacgcgtcaccttgtgcaac

SEQ ID NO: 616427 - DNA, 1191 bp, Homo sapiens
  misc_feature (1191)..(1191): n is a, c, g, or t
cggacgcgtgggtcgacccacgcgtccgtgatttttcttgggtcagtaggaggctggagtggagtggtgattattccccggagctaagctcaggagcccgaagggagagactgagactgactcccttatctcttcatattctttattccctaccagatggatttttttttttttgttgggagacggagtctgcgcccggtcggccaggttgggagtggtgaggggcgatggatctcggaactcacgtggcgaaaatctggcgctcccggggttcaagcggattctcctaacctcaagcctcccgagtagctggggattacgggcattggggccaccacggccaaggctaatttgggatgacttttaaggtaagagagacgggggtttcaccattggtgggccagggatgggtcctgagagtctctggaccctcggggatctggcctggcctggggcactcccaaaggtggcggggagattacagggcggtggaggccaccatggccccggcgcccaagatgggagtttcacatttggcgcctttgggggtgaacgggtccaaaggggtgggtcttcctcgccaaagaggggggagggacttggaactcggagtagtgaactctttaaaaccagaagtgggggggaatatttcccatgtatggggcacacgacgtgcacacggggggaccttccgggaacggggcctccccataaattccaaggggatccaaaaacctcccccggggttggcgcgaagaccctttccccaataaggggggggaacggacagctcccattggagcagaggaagcccactgggggcgcatggagaggagctaacaactatttcctcgtaaatataaaagtgccacgggcaaacaaggggcggcggctccacgcagggcgacaaaaaaaggggggcggggcgggaacagaatacacaaaaaagaggaacaaagatggcggagaggacggcagccaaaaaacaaatacaacaagactcataaaaaaagagggaggaggccgtcccccaacaggaagaacgtccgacgaaacaatccgtaaaaaacgaggcacggacgcaccccaccccgacaaatcgcctagcagtccagtccatgtataagtttttatgtttatttcgtatcattctaatattgcaagaaaaaaagaagagacaaaatacacgan

SEQ ID NO: 616428 - DNA, 131 bp, Homo sapiens
gacttctcagacatagcgtcggactcggaggacactcagtttcactctaaagcctcggaagtcgtcagggatgactaataagtcacagtcgtagtctcggaggacatacagtcttgtcgccttgtaactaa

SEQ ID NO: 616429 - DNA, 1236 bp, Homo sapiens
  misc_feature (178)..(178): n is a, c, g, or t
  misc_feature (1236)..(1236): n is a, c, g, or t
agcgggtggtcatggcgggtgtgctgaagaagaccactggccttgtgggatcgcgctgctgtgcaatactcctcacgagacggctgacagcagagtcattgtgacaccaaagattcatcggatggtccgttggagggacaatccgaatacaaaagatgcagacgaatatagcaacagntatcacagcacacagagttgaccaagatgcagacagcctggcctactggctgtaacagtcggcacaccgagactgtctcaaacaagttagagagactcacggcttactacaggccggtgcagacttaagtagagaagagttcggcattcatctctagagcctggaaaacagtagacacctgataaactcctgcggcacaggcacatagacagtcgcattggcgagaatagggaaagacctactggaggggaagggctccaatgtgacgttgtggaaccgaaggcgcgttccgtagacgcgaactccaaggtaggaacacaatggccccgactatgtacacttgaactctcaccaggcgtggaacccgtgttcgcgagtaggtgctatccagtgggcggagacatcctgacctggctacacgtataaacatataagatgtctcgcggtttgggtacattcaaacgccaaggacgtctgcgtgtgcatgtagatgtaccccttgcaagcgacttaattgggtaacctacaaaggaaactaacagtttggcaattagttaacggacatgagacatactgggtatacaggaagtgaagcttgggactccacacagcttttgaggtcgaacttcacttgggggtgacacttattcggggtccagttggtgggaatgttccaacacttttaccgcggagtatccatctcaagggttacacttcagcggacgcccttgatttggcttttgccaaaaagagattacacatattctccgtgggatcgatacccacgcagaaaggggccatttggggcaacgcacttgggcaaataactgcagtccaaggggaaaaagcatgcccccttagcaaggaattgggccaaagcggcccggaaggacccaataaagccatgcccgaaggttcagcaacgtttgccccgagcacaagggaatgccacctggtaccaatcgagtagaagactacgaagggacacggccagaacccgtgaaggcacaggcgaagaggagccctcatatcgaacaagactagcgccgcagagcgcn

SEQ ID NO: 616430 - DNA, 142 bp, Homo sapiens
ggagttgagctacctgagatttgatattatgactcatagagctatgcaaatgacaagctgagtatgagtttatcagctctggtctcttacctagtgggttattgcacttgtcggaacaaagcttttctgatatgatgggaat

SEQ ID NO: 616431 - DNA, 394 bp, Homo sapiens
  misc_feature (26)..(26): n is a, c, g, or t
  misc_feature (37)..(37): n is a, c, g, or t
  misc_feature (50)..(50): n is a, c, g, or t
  misc_feature (84)..(84): n is a, c, g, or t
  misc_feature (384)..(385): n is a, c, g, or t
ccaatttgagctcaatattccccaanaattgctttanagttccttatgantcaggttcaacattttatgctgattttacttgcnccttaaacaaatagaaagtatattttctgggccgggcgcgggtctcacgcctgtaatcccagcactttgggaggccgaggcgggcggatcacgaggtcaggagatcgagaccatcccggctaaaacggtgaaaccccgtctctactaaaaatacaaaaaaattagccgggcgtaagtgcgggcgcctgtagtcccagctacttgggaggctgaggcaggagaatggcgtgaacccgggaggtggagcttgcagtgagccgagatcccgccactgcactccaccctgggcgacaagaagcnntccgtctca

SEQ ID NO: 616432 - DNA, 360 bp, Homo sapiens
ggaaccccctcccccccgggggatcccccccgggggtttgggtttttggggggtttttttttttccgggggggtccccccccccctttttttggggggttgggggggtttttttttgggagaaaccccccaaccccctttaaaaccccccccctttccccccctgggggggggtgggggggggcgtcttcacccacccccctttttttggaaaggttttcccccccggttttaaaaagggggggggttttttggggggggggacccctttttttttttggcccccccccaattttttttttttttttggggggttgtggggttttttggttttttttttttttttttttcccccccccta

SEQ ID NO: 616433 - DNA, 174 bp, Homo sapiens
ccgtggttgatctacgggaccaggcaacacatacagagctggtcattgagtcacggtttgtagttttgaaagagtagccgcttgtcattcttcatttgcaaagtcatgggtaggtaggctgatgtgtttatatgataaatcatttcacatcagttacaatgaacgaacaatatg

SEQ ID NO: 616434 - DNA, 412 bp, Homo sapiens
  misc_feature (20)..(20): n is a, c, g, or t
tctagcaggatccccggctnggattagcgtttagaaggactttcccaggtagctgggactacaggcacacgccaccacattcagctaattttcgcatctcttgtagagaccaagtacggctgtataggatagctggacacaaagctgtgggctcaagcgatctgtccacctcggcttcccaaagtggtggaattacaggtgtgagccaccgcaccccacccaaaggtatgaatcttgacatttatctgtttctgaaaaaagtgaatttatagtaaagaaaatgtgtatcagtaagattcgggtaggatttcaattaaataaaatttaattaaacattgtaaggaaatactttcatgttcttaaaaacatgtaaactttgtagtgatgctactagtgtctctctgaggcttcc

SEQ ID NO: 616435 - DNA, 2033 bp, Homo sapiens
  misc_feature (750)..(750): n is a, c, g, or t
gtgtttgtgtagttgcgttcgtgtgttctgcttttgcttgtcgtgtccgtgcggcgttccatgttgctggtttttctgtcgttgatgttgttgtggtcgttgtgtgggcttcgctgtccttctgtccgttgtgagctagtgtgtatagtagttggtgctggcttcgtagtgcacggtggtggttgtagcgctcgacgaggctctatgctgtgagtgcgtctatctgatgcgttgggtgcgtgctcgtgtgttgtttgtgtgttgttgttgggtcgttcgttgtggcgttctactgatcgtatgtattagcgtggtgttggtttgtgctgtcgctcgcctagtgtgttggtatattgaatttttgtgagttgattgttgttgtatgttattgtgttgttttggttgtgtttatgtgtggtgacgtgtgtgtgttttgttcgtgttgttgtgtgtttgtatttgtattggtttgtgttttatttgggtatgctgtgttagtgttgtgtcactccactctagtatgttagtatggttcccgggtgccctcacactgttggttgtagttgtctcgtttcactccccccgttgtgtgttgttggctatcagtcaccacatcacccgtctcgcgctgtgtggtttggtggtgggaccacactcctctgtatgattgtgtgacttcgcttcttaggatggggagtgtccctcccaccaccacaacgttggggtggtgcgcacactacctcaaaatgntagttactcctgcagcggttgtgtgttgtggttgtaaataccctcctcgccgctgcccccccccttttggtgtgtattagttgttatcctcgcgtgcgtcgcttcgattatgtgtgttggtcgatagttgcgctccacttcggtggggtgtgtggcaccacaattatgttgtgcggcggcaccccacacaagtgtggtggtggtggtggtctacccaacgaagagagagatgctcgtcgtgcgtcgtctctttgtgtgtggttttacttcttctcgtcggccgctgcggcttcttcacttccatggacgccgcgctcgcgtgtggcgtgtggttgtgttgtgggacactcctcttgtagtgacccaacgtggggggtgtcgtctcatcggggggccgcgtcgttgttgtgttgccgcctcttcgtctcgttgtcccgacgccgtcgtgtggtggtggtgtcgttgtgtggtggtggtgcacaacccccccatcctcctctcgttggtggcggcatcacaacggcgacgccacctcctcactcgtgttgtctccacgacgacgcgacgcgggtggtggttcatctctcgtcgtcgcgggggtgttttcacctcacacacactcgtgtgtggcgccgcgcgcgctctccctccgcgcgataacacacccccccccgcgctttcatctgtcgcgcgcgcgggatacacacgcgggtggtctccgcgcagcacacacactcgtctctctcgtccccctctcgtcgacgcgcgcggcggctcccccgcgcgccacctcgtcggcgcgccgcgtgtgtgtcacacgccgcgcgccacacgccgcgtgcggcgccacacaatattgtgcggcgcgcgcgcgcgcgcgccacataccccgtccttcgctcactccacccacagcgtgtgtgtgtgttgtgcgcgccctcgtcgcgtgtggccgcgcaggcacccgcgggccactcacacacccccgcccacacggggtgaacacactaccacacatgtgttccacacacgtcgtgaacccgcgccacacaagtggggggggagaacacaacaccccacccgtgtgcacgaagaagaacaccccgcggagaccccacccgcggtgtgtggcgccgcgggccacaccacccggaaacacccccccccccggggtgtgtgtgtgtggccccccccccccccccctgtgtgtgtgtgtggggggaaaatatatccccgtgtgtgtggagaaacatatataaaataaataaaaataaaaaaataaa

SEQ ID NO: 616436 - DNA, 152 bp, Homo sapiens
tgacggctctcttagtaactcctgtcaagtgatgatggaattctattctacttttgcagtagatccgagtacaggtgacattgttcatgacacactccaccactaattacccatcttatcaattttctatgtctattgctgctttccttccc

SEQ ID NO: 616437 - DNA, 1826 bp, Homo sapiens
  misc_feature (17)..(17): n is a, c, g, or t
  misc_feature (1691)..(1691): n is a, c, g, or t
ggttgatggtgcagccntaatatctcacgtggtgattcgtacctcaaagcctcgttgatttgccgagatgcacatatgtccccgctgatgcgggactctttatgcgggatcggacgaatgatgaaacgatactcaatcttgaagaccaaggccagaacaacgtctgccctacatcttagagggagactcgaatggttgctgcgagtaggtgtgtgcaatgcggtaattaggcttgtgtgtaccatgcatggcaaggtgtgttcattaagcaaacaagacacaagatcctatatgggagcaaagaagaaaagctgtgcagcccttcgtgcctttagagaggagagactaaagggagggttctaaccgcgaattgagtcttccaagggtccgatgggaaagcaaggctagcaaagtaagttgattgtcaacgagatagcgcccaaaggggaagaccagggtgggattgccgaacgtctagaaatcgaaatcccccgttatcactataggttctccaaaagaagcgatatcatatctttgggtccaacgcttgtaaaaacgaacctatattgtcagtaccgaaggttataacgagcggggtcccgaaatgcgtgtgtgaagggaaccaaaaaagggggcatgggagttggacgtgagggaggaccgttgtcttaacccccaatgttcacctcgttatccaaaaacccctgatgtgtttttgccggtgtgacatggaggacgtgcaaggtgtcctcggaaagcgtaagaagttttcctacctggaggtttgcaatcattagcggcctcggggaagtgcttaggggccggttcccacaaaaaccagagtaaaggaccggaggttaggggggacattgagagggagtactatctgtcggaggctccaaacttaaatggctctttagactcttggttaacggccaacgggtgcatgggcgacccttgagaacctgagatctcacgagaagaggggtccacaccgacaaaaatctctggcggagggctggcgaagagggaagaaagtcgccacccatggaatattgcgctatgtagcccttttccttcagagggggaatacctccgcagtggggccacaaagggttaggccatttttcggcctgtattcaaggcactgtttctggaagccttccgtcattaacaacagcgccttgcaaagacaacagtttcaccatgtgagagagaagcgttcggctgactttttgttctcattcactacaagtggggaagctttgcgcggggtgctattacaccggagaaaattcctcttggttatcacccctcgaggccccctgcgggtcacaagtagctccaacgaagttgtctttaaatagatagtggtcgctcagaggtatcccacagctgctccatgggtggcccacctagagcggccactgtgcgtcaccggggttataggggcatcatatcaacaaacatgggagtttgtttataggccgccaaaagttaaaggggcgagaggaaaaaagcgggtgttgaaatccaactgttgttgtcagaacattgttgtcaagacaggggtcttgtgtgtcagaaatcaacagaggaatgttaacccatctcatgtaggacaacaatattgagaaggattgagcgactaatatgtgtgggtagaacaacaaagttgtggtgggagcacncccaaatcggtaggtggggagtagaagataattatatcagtatgaaagaagatagtatataaaccagggtgaagtaggaagaaaagaagaagtgtgggttgtatactaggagacgtgctgcatggatgtaggata

SEQ ID NO: 616438 - DNA, 341 bp, Homo sapiens
ggctgattagaggatcccctcctcaggaagcaggagctcaggctgatggggcattaggcctttttatttacctgaaatgatggcccaagctgggtgaggcttcacagatgtgagaagcagctggcatcacagtgggtggagcggggagctggcagcaaggcttggttggttcttggccccacctgtgcagcttctgcggccccgggtgtccatttccacctcccgagattccttgggcccaggcctgtagtggacacaagcaggtcccggacacacagccaagcagatgcgcagccatgtagacaaggagcccaggaagcacacaggctgaccccgtgaca

SEQ ID NO: 616439 - DNA, 168 bp, Homo sapiens
  misc_feature (9)..(10): n is a, c, g, or t
  misc_feature (20)..(20): n is a, c, g, or t
cttcttaanngcgtcctttnttgcgaagaaaataatcaaaaataatcaaaaagttttctagtctttattgtcttacaaccctcttctatttagacggaaaactttggtttataaattataaaagtattacaagttatgtgagtccgtttacgtgactctgtcgtctta

SEQ ID NO: 616440 - DNA, 198 bp, Homo sapiens
ccgctctcggaactcatataccacaagtgcagccctaaaaagcaaaaaaataaaaataaatcaaatagttgaccttggaaatagacaattaaattggtggttaccagaggaggttgtttcacttgggccgcgttggtatacaaactacttgcttgcctgatggtgatacttacgcattgtgttagcctatttcctctc

SEQ ID NO: 616441 - DNA, 593 bp, Homo sapiens
aatttatggggagccaccccacctttattgcagcaaaaagggggtaggaacaggcaccttaggactggcccaggggtgttctaaagcccccctggggttggaaaaaaacggatcggaaccaaaaatggggggaagggcggctcccaagtcccaacaaaaatcctaaaaagttaacccggtcccctccacccttcaagaaaagggggggcaacggcccccttaactttaaaaaaaaaaacctggccccggccctaaactctgggactttgaccctttcacaaaagcccttcccaaaccaccacacggggggaataacctgaaaccaacctctccccaaaaggtcctttaccgtgaccaaacaaaattcttaaaggttcaaaagtggggaaaacaaaaaggtccaaaaaacactcattggaaaacagggagagggcgcccaacaaaggttcattaccccgggttctcgcccccccacaaatgcccaaaatcgcggaacaaaaaaaagggaccctccccaaaaaaaaaaaataaagcccgcccaatcccgggcgcaggcggaaacagggcaaaaccgttatcccggaaaaaaaccg

SEQ ID NO: 616442 - DNA, 338 bp, Homo sapiens
ccgcgtcgacatcagcgcccaagcagcgtgaatcatgctggtggttgtgatgtcttgggcctgtcgcgccagcatggagaaattgtgctgaaccaccttgttggtcagaggctgatcaatgaccggaggaagagtcgggaaaggcagagactcgcaagaatccagcatccttcgccagtacacagacatcgcttcctcatcttgggccctaacatgtttgatgaaagactgaaacagaggacctgaatcaatggaaccgccttgaaaggctgttcgcatcgcgtctttgatcaatccaatagaccacccgtcgtacaatgcatggtgcgcgtcgacgc

SEQ ID NO: 616443 - DNA, 141 bp, Homo sapiens
ttggccgctccgtcttttggctgtgctttcttgagtgcttgaacctggatacactctactggcttctgtgcagtccttcctaacatgcaacgctgtgagtccaactcctcagtgcaatgccctgtcttcaaggtggatcct

SEQ ID NO: 616444 - DNA, 682 bp, Homo sapiens
cctgcaatcattaattagcaagtattgaatgcccccacccttcctcttcctgtaaagtgctctccgttttgttgttgttccccagcccaggcccccgccagggcagggaaggaaaggtatggccccggaatggtgggcccccaaacgtatgaatctactttcaagcaatcttttggtgcagtaattgttggtcccagccagcagcctgcacatcgggcccagtcggagttcagcttccgcctctcatctggccgcttcttcatttaccacaccactcctcccacatcccatattttagaccacaagaccagacctccgtccttcctccacaacgctccccccccccccccccctccgtcagcaagaaagaaaaaatataattaagcagagccaaagcaccacatgattaacaccatagttaaagagattactcacacacagaggactgatatttctgatcactccgctgtgtatttttcttccctatctatgctactgagtgagcgtgtgtagacacacgcctccccccccccattgtttgtttaaaacacacacactgatagtagtttctgtcttctcacacccacttttctccgctacctatctcgctctcactgagtgtgtctctctccaacaagacaaaaaaaagagagaaaaacttccacaacaaagacacagaaaa

SEQ ID NO: 616445 - DNA, 106 bp, Homo sapiens
tattacagtatgcggcattcggctaccttaacatgagtcatagcttgttccctgtgttaaaccgcgcttcattgaatttcttcactttgacattcagagcactggg

SEQ ID NO: 616446 - DNA, 671 bp, Homo sapiens
ggccgcgccgaggattcagcagcctccgcttgagccctcgttccgagtcgacccctgcgccctccgcacgcgcgcgctcgaggcgttcacgagaaaggatcgtcgttcgtatcagaactccatctttcgacctttgtgatgcaagtagggtgatgacctgctcctgctggcactgaggattatatccatatagaattcaacagaaaacggaggaagaccttactactgtccaagggatcgctgatgattacataaaaagaactatgaaggcgttacaaaagtttgctgcaatggtactgtaatgagcatcggaatatggagaagtatcagctacggtgacaagcaaaacatatgccatctcgaagatgactgtaggacgatcatgacaggtcatggtcagtgcttgtggctcactgaagcttagtgaggattccttgcaatgagtagaattcccttctctccttgtcacaggtttaaaactcacgctgtatagtaccattgggtccgtttacttgatatgtaactcttcatcataactgaagagctcaaaaaaaaaaactcgggctctattcgtgcggaaaaaggtagaggcactgcctgctttccctgaccgtttttgccattgtaaactggggcccaataggagcgataatgaagcaggacctgctata

SEQ ID NO: 616447 - DNA, 169 bp, Homo sapiens
ttcagcaaagcaaaaaaatcagcagcgcacagataaaagagaacgaacggcacacagaagacaaggccagacgaaattaacaagcggttagaagaacccgaagaaactaaagtgctaacaccacgaagaacacttagcagataaactgcgactgcttggattacaagga

SEQ ID NO: 616448 - DNA, 192 bp, Homo sapiens
tccccccccccccggggggggggggggggcccccccccccccctttttttccccccccccccccccattttggggcccccccccgggggggggccccccccccgggtccctttttttccgggggggggggggggtttttttttttttttttttttgggggggttttcttccccccccccgggggttttttta

SEQ ID NO: 616449 - DNA, 122 bp, Homo sapiens
tgtttccccatcttaattgtattgttttcccaagtgtcattttcatgcgttttatatcttcctaattaaggtgtgagtccgtttgtctgaactaagctgtctagactttctggagtgataat

SEQ ID NO: 616450 - DNA, 326 bp, Homo sapiens
aagaaaaaaaaaaaaagaaaaaaacgcaaacccagccaaagggcaaaggtgccgggggcagagtccgggagcaaaccaggtgcacgtccggagagtctctccccagcagagccacccctcacacacggctcagtagggcagccacaagccacacgtggccggagagcattaatttcaaaaggggcgggggtgaatcgagatgcgatacaagcataaaagtgcataggtgggtccaaagaacttagtatgaaaaaaataacacagaaatagctcagtgaataatttaaaaaatggggttagttgaaagtggtcgccaactccgggga

SEQ ID NO: 616451 - DNA, 490 bp, Homo sapiens
tggattttcatttcttcgcacttctgagacggcaaagccaaccacttagaagccttccacatctttgtcacctgcctggctcctgctctctgatgtacctctgggtagtgagatgaaaatggtgcctgcagaagttggggaaaaggatactttttgcccagcttccatgatgtctttattgcaaatatggatgacaagggtctcttgttacaggggccctcagaagcacctttcgtattcttcctctaagaccaagggacagtgtgtatagtataaggatctggcaatccagagacctcagacatcacaaagtatggatctgaacgtgggtatgtgctgacagggcacaataactatacggtgaaagaggaattttcatacaatacgagtttattgttttgatgggtaaggagggctatatacatcacacactgacttattataatcctgccaataaaatagtcttaaaattaaagatgtttacgctaaa

SEQ ID NO: 616452 - DNA, 113 bp, Homo sapiens
cactcacaggtagcgcccactcacagcagtagccgcatctgttgttcagatgctcttgatgaggttcagagcctcctgcaggcggttggtctggttgtcctcccggctgacca

SEQ ID NO: 616453 - DNA, 1058 bp, Homo sapiens
  misc_feature (212)..(213): n is a, c, g, or t
  misc_feature (217)..(217): n is a, c, g, or t
  misc_feature (242)..(243): n is a, c, g, or t
  misc_feature (247)..(247): n is a, c, g, or t
  misc_feature (253)..(253): n is a, c, g, or t
  misc_feature (259)..(259): n is a, c, g, or t
  misc_feature (276)..(276): n is a, c, g, or t
  misc_feature (373)..(373): n is a, c, g, or t
  misc_feature (375)..(375): n is a, c, g, or t
  misc_feature (396)..(397): n is a, c, g, or t
  misc_feature (448)..(448): n is a, c, g, or t
  misc_feature (468)..(468): n is a, c, g, or t
  misc_feature (637)..(637): n is a, c, g, or t
  misc_feature (719)..(719): n is a, c, g, or t
gtaggattgaggaataccctagcacgatccagagctctcgacattcagtttgcctccttcatcgactaggtgcggttcctggagctgtacaacaaggttctggacaccaagtggaccctgctgcaggagcagggcaccaagactgtgaggcagaacctggagccgttgttcgagcagtacatcaacaacctcaggaggcagctggacagcanntgtnggggaacggggccgcctggactcannagcncacgancatgtnggacctggtggaggacntcaagaacaaatatgaggatgaaatcaacaagcgcacagcagcagagaatgaatttgtgactctgaagaaggatgtggatgcgtgcctacatgaacnanggttgaactgcaagccaaggnnagacactctcacagacgagatcaattctgagagctgtatgatgcagagctncccatgcgaccacatctcangaccattgtggtgctgtccatggacaacaaccgcaacctggacctgacagcatcatcgctgaggtcaaggccaatatgaggagatgctcaagaaccgggctgaggctgatcctggtaccagaccaagtacgaggagctgcaggtcagcagcagacatggggacgactgngcaacacaagcaggaattgctgaatcaaccgatgatccaggctgatctgaatcgacacgtcaagaacagtgcgccaacctgnggccgcatgctgatgctgaccgtggggagatggcctcaaggatgccaagaacaagctggaagggctggaggatgccctgcaaagccaagcgactgccggctgctgaaggagtaccaggagctgatgaatgtcaagctggcctggacgtggagatcgcactacgcaacgtgaggtagatcagtgatggaaggtggaagtaatccgtgtgcaccacgccatgctatggggcatgtgtgcgtgctagtggtgagagcgtatctatgagtgctgggtggagtggttcgtccacagtgcaacctgggtgctatctgtgaggcgtcccataataacaacttcttc

SEQ ID NO: 616454 - DNA, 331 bp, Homo sapiens
cccatgtgctaggacatagggttgctagctagagagtttgcagccatcttcccccctcctaggtgctaatgcctaatttcctaaagtaatcggaatccttataagccaggtagctcaggaggttctatttacttatttatttattttgagacagagtctcactgtgtcgcccaggcagatctcgtctgggcccgagtctcgttgcagtggtgtaatctctgctcactgcaacctctgcctcccaggttcatgcaattttcctgtctcagcctcccgagtagctaggattacaggggtgtgccaccacgcctggctaatttttccattttta

SEQ ID NO: 616455 - DNA, 598 bp, Homo sapiens
acggtctgtaccgccaggcggatgctgtccaggcgcccggcctggtattcgcgcgccagcaacgaggcgagccggtgaggatgtcattggcgaagttattggtggcgccgttgcgcgcaaattcttcggcggggataaaggctcgcacttcctccgggcacggctggcccttgaggtgcgcagccaggcaattgacgtaagccacgtgacggcgcaacagcgtcgacttcaccgggttcacctcaccaggggcgtcatcgagcagggtcaacacttgccgagcaaaactgcgcgagttgttgaccatcgcaccccacagcgtgcgtgcttcccaccagcggttgtaggcgctgctgttgcgaaaactgatcagcaccaccagtgccgagccgagcaaggtcaggggcatcagcggcaaattgatcttggcggtgagaaacagcatgaaatccaccgtcactgccacatcccacaacaacagccagaacaacgcccagcccacatagcccatggtcttgatgatcaggcggtatttcttcagaagggcagctttcaaacgagaacctcgcggtggggcggtgggcacaatcccctgtta

SEQ ID NO: 616456 - DNA, 1006 bp, Homo sapiens
  misc_feature (160)..(161): n is a, c, g, or t
  misc_feature (165)..(165): n is a, c, g, or t
  misc_feature (190)..(191): n is a, c, g, or t
  misc_feature (195)..(195): n is a, c, g, or t
  misc_feature (201)..(201): n is a, c, g, or t
  misc_feature (207)..(207): n is a, c, g, or t
  misc_feature (224)..(224): n is a, c, g, or t
  misc_feature (321)..(321): n is a, c, g, or t
  misc_feature (323)..(323): n is a, c, g, or t
  misc_feature (344)..(345): n is a, c, g, or t
  misc_feature (396)..(396): n is a, c, g, or t
  misc_feature (416)..(416): n is a, c, g, or t
  misc_feature (585)..(585): n is a, c, g, or t
  misc_feature (667)..(667): n is a, c, g, or t
agctcaatgtgtggtgtagttatgttataataggcggagattatgcctaggttcagaggcgctgtgttatcatgtgtcagggcaccaagactgtgaggcagaacctggagccgttgttcgagcagtacatcaacaacctcaggaggcagctggacagcanntgtnggggaacggggccgcctggactcannagcncacgancatgtnggacctggtggaggacntcaagaacaaatatgaggatgaaatcaacaagcgcacagcagcagagaatgaatttgtgactctgaagaaggatgtggatgcgtgcctacatgaacnanggttgaactgcaagccaaggnnagacactctcacagacgagatcaattctgagagctgtatgatgcagagctncccatgcgaccacatctcangaccattgtggtgctgtccatggacaacaaccgcaacctggacctgacagcatcatcgctgaggtcaaggccaatatgaggagatgctcaagaaccgggctgaggctgatcctggtaccagaccaagtacgaggagctgcaggtcagcagcagacatggggacgactgngcaacacaagcaggaattgctgaatcaaccgatgatccaggctgatctgaatcgacacgtcaagaacagtgcgccaacctgnggccgcatgctgatgctgaccgtggggagatggcctcaaggatgccaagaacaagctggaagggctggaggatgccctgcaaagccaagcgactgccggctgctgaaggagtaccaggagctgatgaatgtcaagctggcctggacgtggagatcgcactacgcaacgtgaggtagatcagtgatggaaggtggaagtaatccgtgtgcaccacgccatgctatggggcatgtgtgcgtgctagtggtgagagcgtatctatgagtgctgggtggagtggttcgtccacagtgcaacctgggtgctatctgtgaggcgtcccataataacaacttcttc

SEQ ID NO: 616457 - DNA, 107 bp, Homo sapiens
caggattcgcaaacggtggcatcttcgaacaggagcatgaaggcagcatttattacccccattgtaagttcatagctattaacattagaatcaagaagtgcatccat

SEQ ID NO: 616458 - DNA, 231 bp, Homo sapiens
gtctccccactctctggaagcccaggacacctcccaaggggcgcccacaagacctccacaggggcagtctcctcagtaatctaggattcattgacaggcagtgaattagacagatgaccagtgtttcacatgccttgaaacatatatgttgatcatgctctaactttcatttacccaataaaattaatccgattgcggtgttttggggtacccggagctcggaaattcggt

SEQ ID NO: 616459 - DNA, 265 bp, Homo sapiens
  misc_feature (93)..(93): n is a, c, g, or t
ttaaaaaggattaaataggcagtagcaaatattattgtacagaaaaaggtttctgtggtcatccactgtgcccttctttctaatcagacacanctggaggggtgtacagttcactataggggcactcggcgaatcttgaccattcctggaaaaacagctcgaagtatgcatcttattaacaacaggtcattgatgtcatctttggtttcaaaaatcaccaccgttcctccatgagaagagtgaactattctttcaggggttctgt

SEQ ID NO: 616460 - DNA, 454 bp, Homo sapiens
ctctacaggatccccctccacacagcactaggattactagcgttatgcctctgtgcctggccatactctactttgtcatttgtctgtattgatctgaacaatttttcacctggttcaagtgtttttgcagcttcgtggtgttgcggagctcttggacttgtttactccttttctatttcatgaagcccacagttactgaatgggatattgagttataaactaggattcgagggagaggaccacaaggatacagagttatacctgtcatatcttcttatgcactgagcgtcaccatatattgtttgttgcgtgacgatgctcaggttgtcttaagatggcgtcacacgctttgacttttaagttcgactcttctatgtttgaattttggctgtgatacttgctatgtgattttctgtcacttactttcacctttggggccctagttgctgtgttg

SEQ ID NO: 616461 - DNA, 144 bp, Homo sapiens
taccctcgttttggacttggtggttcttccattgaccacattctctctgacttcaaaatcatgctcattcagcatttttctttctttaatagactgggtcagccgagaaatagctaactacccattttcctcccgcaattcctt

SEQ ID NO: 616462 - DNA, 893 bp, Homo sapiens
agcggaattgctcctgagacccaacaggcagcaacggtcccaagggtgagggagtgggcagggagaggctgatggggcttctacacgttccctcccgtagctgggctgctgcagctcgttcgccccagaggcgcgcggtgtccttgagtccaagtattcagcgcggacgtttgggggacggagggagaggcgctaggggaactggcacctaagactgtgtaataggacacaggtcttgcaagtcctcctccccaggcaccgcccctgtgctcccagcgcctctttgcagctttaattatcctttcagcgccgttcccccgcggctgcgtttccgtggtcagaggaaaaaggctctttcgcctcccggttctcaccctcatacagaccctcctttcagacccgccctcctgttcacagggacccatttcggagccctggctcacgctgggcgggaactgccgtgacgaattccccccaaggtgttgattatccatcccaaccagcctctggctttcctcccactccaacccagtcccaaggccctcgcccgttcatcggtggggctcgagaggcgcccccagatctcccaacggcagggtcccagctgcagctgagagaagaagcgcccggcgtgcgcggtgccacgtcgaattgggcctggggacgccggaaggtggccgagagagcacgggggcccccagacggccggctacgggcggaacgagggggggccggaacgaagaagggatgaggcccacaccgacatatggggccccgcgggagggacggccaattggcccgaaacaaaacttgccacacaaacaacaacggtgggcaagcacagtgagagcgacacagagcggccaacaggagcacacgaggagaaacgagca

SEQ ID NO: 616463 - DNA, 356 bp, Homo sapiens
atggccgggtcaggaaggagatggaggaggaggattgagcccagaattaactaggttcgaatccagagagcagtgtggaaaaaaaaaccaaaaaccaactgaccagttgtggatacccactaagagtctctattaaaattacggatgcagaaggaccgtgtgtgaaattctctttcctgaagtcccatggaggaactttacctgaaacaacccaaggggcccttttctttcttctgaggatggcagaggatatagttatcaatctctagtggtaactttcctcttccactttgataccatggggtcatggaatataactttttccaaataaagttttatgagaaaggccagtgtgc

SEQ ID NO: 616464 - DNA, 474 bp, Homo sapiens
catctgccggtccaactacgccgagtcctccggctacaactataacatcggcttgtccatgccttacgacacactgagcggcccttagactccatggggctcttggatgactggtattgctacctaaggacaatctggggtcacatcgctttaaagtcattttaacagtaatgtatgtgttttatggccagattatagatatatgcgtgcctgtgttaacaggccatttcaaacacatgactttgattctacatttagtgtttttacttattttatcattttctgtgcctgtacattttagtgtacagtaatattagatctccatttaggatgataaagaacacaaatgatgcaaaatgaagttttgttggtttatttactgtcaataattcaacagacaaaactcagtcattgattgtttaggatattaatagtattaggtttctaaaataaaagaagacgctccaatatcga

SEQ ID NO: 616465 - DNA, 348 bp, Homo sapiens
tacatgatacgactcgagctcggtacctgtgggtagcaagcaacctagggatcatttgcaggtggtaaagccatttaccaagatagttgtaggtaagaagggcagatttattagagaaattgtgaaaatatgttgcagtgggcagctcagcagagaaggggctacctgcaaagaggcaagggctggaggaaagttttatagggtcctgctgaagggtgctacgtgtggaatgaggtcattgtgcccgcaggctgtttgtgattagctgtctctaacaattgttcatacaataattgttcattattgttctcaacttggggctctccccaacctggggacccttcctta

SEQ ID NO: 616466 - DNA, 121 bp, Homo sapiens
cacagacttcatccacacttcaggggtgtctaggccaacaagcgcctttaagagatgctggtttgttattggcatcacggcgagatgacagcagccactgcttcatcacactgactcacat

SEQ ID NO: 616467 - DNA, 631 bp, Homo sapiens
acgcagacctgattttggcgcatactgcgagaattagcgtatcaccgctagcgagctggaccgattgcacaatgtcatgaggatcaagttactgatggctaactagatctggtccgaggctatgaatggaccagcgtgcagtggtaagtttgtactcgactctgtaaagcttgcccgcatgctgattatgcgagagcatgatcagagccgtgacgatgagctgaccagcatcatagtacacgtgatatcagctacagaatgttcacgtggatcaggtaacaatggccatggatgtgtacgtcatcattttctagaaaggacctgtgcagctgcatatatcatggtcgcagggtatattagttacagagctctagcacgcgcaggccttgagcatgacgggttcacggctctacttctaagatcagcattcatacatgagcagaattgatcatgaatttgccagttcttcgaagtctcccctgaatgggttttactaacactgatgaacttaactctggcccttggcctcaaccttgcacacttgcccaaccactctaccacacctaggcactacctcacctctgtataaccttttaccttagcaccctactctccccttgcgcttctcccc

SEQ ID NO: 616468 - DNA, 314 bp, Homo sapiens
catttgtcaacccagatttctactgaacctccagctttgcttctgtagatttggcatttggtttgaaaattttgctgattgtcctaatttcaagagactttacgtggaaatcaccttttaaacccacagctagcaaacaactattttatttgcactaaatagctagctttaggctctctctgggttagtttagtatgcattgccttggcttcagtgttgacagcaggagagactgtgataaagagcagaggtaggtggggtgcagcccttccttctggaaagttgaaaggagaggaaagggcggggcatagtgc

SEQ ID NO: 616469 - DNA, 756 bp, Homo sapiens
ctcgtgccaccctagcagtgtacactgtacccaatgtatatttatccctcacccccctcttatcctttcccccgagtcctcaacacccattgcattattcttatgcctttgcatcctcatagcttacgtcccacttatgagtgagagcatacggtgtttggttttcgattcctgagttacttcacttagaataatggtctccaaatctatccaggttgctgtgaatgacattatttcattcctttttatggctgagtagtattccatggtattccatggtatatgtatgtgtgtgtgtgtgtgtatatatatgtatacacacacatatatatatacatatatatacacacacatatatatgtatatctacatatatacgtatttacgtgtatatgtatatatacatatatacgtatttacatatacacacacattattccatggaatactcttatatatatacttatattttctctatccacttatcgattgatgggccatttggctgcgtccatatttttgcagttgcaaattatgctgctattaacattgctttggaaatatctctcttgaataatgacttcctttctttgggtagatacccagtcttgggattgctggatcaaatggtacatctactggctacttgcagttaactttacattactctaccttacggtcctctctatcttcagatcgatcctgccctttacccatgacgtaaacctttcagtgcgcccgaacttcccatgcttt

SEQ ID NO: 616470 - DNA, 169 bp, Homo sapiens
cctcccccgcccctacccctcagggataatgagttcattgctgggctagatgttttagccatgattctgcctctgttttatacctgcccacggccttatctttggtacatatgaaaaatcctggatcccgggtgatattgagaacaaataaaggtggagaggccttcca

SEQ ID NO: 616471 - DNA, 247 bp, Homo sapiens
tttccaagggctaatcttgagacagaaagacaagcctggagaaccagtgcaaaattccagagattacctcaaggcagctagtcaacaacccggccattgttgccagggtggactgagacccaagatagcaaccaaacaagacacatggatcttgtactcagcacaactcctgcatgcttcacatgtcaagttcctcttattttttttttttttttttaacagaattggttcgggcgccagggatgac

SEQ ID NO: 616472 - DNA, 498 bp, Homo sapiens
tactcaacaacttcaatcagatcactaaatcatacaccttttacttccaaatgatgactgttcttatatccggagttatttacttcattattttggatcacaatccacaaacgattttttttttttccacaatgttttttttggaccaacttctattatcaataccaacactgtgcacatcattccaccacaatattttataggaggagctatctgcaaccacacacatgtgagcttttcttcctcctcgactaatatcaccaatcagtgatatcaacaatctccttgattccatcaacaataccgttttttctcgcccgcaagagtgggtttctatttcgacacacggggctcccaacgtttgttgtagatagacacacaccgcgccaccataatattgttatcaccccagggcgttttacaaaatttttgggggggctttttttgccccctccccacacgactttattgaatataaaaaaaatataaattaattta

SEQ ID NO: 616473 - DNA, 630 bp, Homo sapiens
gcagaggagggctttacccaggtcacccgcaagggtggccgagggcgaagaaacgacaggctgaacagctgtccgcagcaggagagggcggggatgcgggccgcatggacacagaggaggccaggccggcgaagaggcccgtcttcccacccctctgtggggacgggctctgagtgggaagagaacagaaatcagtccagtaaagatacacaccattgaaagaaaactggatgaagatatttactcctattgggaacattgggacttcagatacgcttaattgaaatcaggaatgtgaaatcaggactgtaaggaaaccaaggatgttagtgctctgacaaaagcagctgattgtgaaagctttatctcggttcaggtggaggatgcacttgcctcatcaggtgatgactcttcctagagtctttgaacttaagatgttaagccctaaggggagaccatctatccggcataggaagaacgctggaaaggaggaaaaacaaattcccataagaatgtgaccggacaaggatagttggtgatgtgaagttcacatcttggtcttccaaatatcgatggaagaatgcattgacctaatcttggaatctcctccagtacaggatatcgagctgg

SEQ ID NO: 616474 - DNA, 109 bp, Homo sapiens
acagctgaggcaggacagcagtgcctctgcttgtcctgcctctgctgcttgtcctgcctctgcttgtcctgcctctgcctcccaagtaactgggattacaggcatgtgt

SEQ ID NO: 616475 - DNA, 221 bp, Homo sapiens
  misc_feature (7)..(7): n is a, c, g, or t
atcgagnatcaaggtacgggggcagagatggagagtcaaaggaagacaaggcaaggcaggatatcaccaccaacacctacacatctcaagagctcaagagtgcactggcaaaatgcaaggagggggcagagatggagagtacaaaggaagacaaggcaaggcaggctgaggtaaagcggctcttccgccccattgaggaactgaagaaagactttgatcag

SEQ ID NO: 616476 - DNA, 146 bp, Homo sapiens
ccaatctgaagtggtctttttaggttgcctgagtggtaacatgtgcttttcttctaaccttccggcccaagatgacagcatattaaagtgagtgaccctgcgacccactctttggaccagcagcggatgaataaagcttcctgtgt

SEQ ID NO: 616477 - DNA, 2529 bp, Homo sapiens
  misc_feature (1348)..(1348): n is a, c, g, or t
  misc_feature (1420)..(1420): n is a, c, g, or t
  misc_feature (1423)..(1423): n is a, c, g, or t
  misc_feature (1429)..(1429): n is a, c, g, or t
  misc_feature (1432)..(1432): n is a, c, g, or t
  misc_feature (1434)..(1435): n is a, c, g, or t
  misc_feature (1488)..(1488): n is a, c, g, or t
agcggagtggcagccccgatccttgctacgtttgcgtcgctctgccaggagcagtcgcctcctccttggcaaatagtcctcggcagggtccgagttcttggataattcgagagaaaaggcacgataagttgcagtacgaggacacggaaacgaccaggagaggaggacagggagcgaagtttcctcaatagtgtgtgaagttagttaaaaactccctccttcctcaggatccctccgcctgcggtagcggtggtgaggccgagggagccgccattttggatgttcggttcctgctgccactgctgccgccgcccccggagctgctggtttcattcgaggtttcgggccgaggatgccagcccccatcagattgcgggagctgatccggaccatccggacagcccgaacccaagctgaagaacgagaaatgatccagaaagaatgtgctgcaatccggtcatcttttagagaagaagacaatacataccgatgtcggaatgtggcaaaattactgtatatgcacatgctgggctaccctgctcactttggacagttggagtgcctcaagcttattgcctctcaaaaatttacagacaaacgcattggctatttaggggcaatgctgctgttagatgaaagacaagatgtccatcttctcatgaccaactgtatcaagaatgatcttaatcatagcacgcaattcgtacaggggttagcactttgtaccctcggctgcatgggctcctcagagatgtgcagagatcttgcaggagaggtagagaagctcctgaaaacctccaactcttacttaagaaaaaaggcagcactgtgtgctgttcatgtcatcaggaaagttcctgaacttatggagatgtttttaccagcaacaaaaaatttattgaatgagaagaaccatggtgtcctccacacatctgtagtcctcctcacagaaatgtgtgagcgaagcccagacatgcttgcgcatttcagaaagcttgtgccccaattagttcgtattttaaagaacctcatcatgtccggatattcaccagaacatgatgtttctggtatcagtgacccctttttgcaggtacgaattgggcggttattaagaattttaggacgaaatgatgatgattcaagtgaagctatgaatgatatattagcacaggttgccactaatactgagactagataaaaatgtaggaaatgctattcttaatgaaacggttttgactatcatggatattaagtcagagagtggattgcgagtcctagccataaatatcctgggtcgtttcttattgaacaatgacaagaatattagatatgtggctctgacatcttngttgaagactgtacagacagatcataatgcagtacagaggcacagaagcacaattgtggactgtcttaaagnttnggatgnctnannaaaacggcgtgcaatggaattgagttttgccctggtaaatgggaataatatcngaggcatgatgaaagaattactttattttctggattcgtgtgagccagaatttaaagcagactgtgcatctggaatctttcttgctgcagaaaagtatgcaccttccaaacgatggcatatagacacaattatgcgtgttttgacaacggcaggaagttatgttcgtgatgatgcagtccccaatttaatccagttaataactaatagtgtggagatgcatgcctatactgtccagcgcctgtacaaagcaattcttggtgattattctcaacaacctttggtacaagtggctgcatggtgtataggtgaatatggtgatcttcttgtatctggccagtgtgaagaggaagagcctattcaggtaacagaggatgaagtgttggatattttagaaagtgtcctaatctctaatatgtccacctctgtgacacgaggttatgccctcactgccattatgaagctttccactcgattcacttgtactgtaaaccgaattaagaaagtggtttccatctacggaagcagcattgatgtggaactccagcagagggcagtagaatataatgcacttttcaagaaatatgaccacatgaggtctgccctacttgagagaatgcctgtcatggaaaaagtgaccacaaatggccctactgagattgtgcagacaaatggagagacagaaccagctccactagagaccaaaccgccaccctctgggccacagcccaccagccaggccaatgatttattggatttgttgggaggaaatgacataacacctgttattccaactgcgcctacaagcaaaccatcttctgctggtggagaacttcttgatttgctgggagacatcaaccttacaggtgaggcagtctggagctatttaatacctgggaaaagatagaggcctcagggaaaaactaaactgaacccagactttccagcacgtgaatcatttgaagatgggagaggctaaatcagaagcaagagtcaaatcttcacaatatccgggttatatgttgtatactaataatgctcta

SEQ ID NO: 616478 - DNA, 764 bp, Homo sapiens
  misc_feature (429)..(429): n is a, c, g, or t
  misc_feature (445)..(446): n is a, c, g, or t
  misc_feature (458)..(458): n is a, c, g, or t
  misc_feature (460)..(460): n is a, c, g, or t
  misc_feature (474)..(474): n is a, c, g, or t
  misc_feature (477)..(477): n is a, c, g, or t
  misc_feature (481)..(481): n is a, c, g, or t
  misc_feature (486)..(486): n is a, c, g, or t
  misc_feature (488)..(488): n is a, c, g, or t
  misc_feature (495)..(495): n is a, c, g, or t
  misc_feature (504)..(504): n is a, c, g, or t
  misc_feature (507)..(508): n is a, c, g, or t
  misc_feature (512)..(512): n is a, c, g, or t
  misc_feature (525)..(525): n is a, c, g, or t
  misc_feature (533)..(533): n is a, c, g, or t
  misc_feature (539)..(539): n is a, c, g, or t
  misc_feature (541)..(541): n is a, c, g, or t
  misc_feature (547)..(547): n is a, c, g, or t
  misc_feature (554)..(555): n is a, c, g, or t
  misc_feature (562)..(562): n is a, c, g, or t
  misc_feature (568)..(568): n is a, c, g, or t
  misc_feature (571)..(572): n is a, c, g, or t
  misc_feature (575)..(576): n is a, c, g, or t
  misc_feature (583)..(583): n is a, c, g, or t
  misc_feature (585)..(585): n is a, c, g, or t
  misc_feature (593)..(594): n is a, c, g, or t
  misc_feature (601)..(602): n is a, c, g, or t
  misc_feature (605)..(605): n is a, c, g, or t
  misc_feature (608)..(608): n is a, c, g, or t
  misc_feature (612)..(612): n is a, c, g, or t
  misc_feature (616)..(616): n is a, c, g, or t
  misc_feature (618)..(618): n is a, c, g, or t
  misc_feature (624)..(624): n is a, c, g, or t
  misc_feature (628)..(628): n is a, c, g, or t
  misc_feature (631)..(631): n is a, c, g, or t
gagctccgcctttgcctccaaggctttgctggcttgtgcggcatcctgctccgtctgcaggttgtgcttccggtgcggaggtcagggacaagatggtgccaccggtgcaggtctctccgctcatcaagctcggccgctactccgccctgttcctcggtgtggcctacggagccacgcgctacaattacctaaaacctcgggcagaagaggagaggaggatagcagcagaagagaagaagaagcaggatgaactgaaacggattgccagagaattggcagaagatgacagcatattaaagtgagtgaccctgcgacccactctttggaccagcagcggatgaataaagcttcctgtgttgtgtgaaaaaaaaaaaaaaaaaaaaaaaaaaaaaaaaaaaaaaaaaaaaaaaaaaaaaaaaaaaaaaaaanaaaaaaaaaaaaaaannaaaaaaaaaacntngtgggccgcttggnccnaggnatttnanattgggnaaggtttanccnngcgnccgaatttggggncaattggncaattncnccctanggggggnngattacnaatcanggnncgnngtttaanancggggganngggaaannccnggnggtncccnanttaaanggcntgnaaaaaaatacccttttttgccggtggggggaattaccgaaaagggccccgacccgaagggcttttccaaaaaagttggccacacctgaaggccaaatgggaaatgtgagggcgttaattttggtttcggcggt

SEQ ID NO: 616479 - DNA, 2436 bp, Homo sapiens
  misc_feature (1255)..(1255): n is a, c, g, or t
  misc_feature (1327)..(1327): n is a, c, g, or t
  misc_feature (1330)..(1330): n is a, c, g, or t
  misc_feature (1336)..(1336): n is a, c, g, or t
  misc_feature (1339)..(1339): n is a, c, g, or t
  misc_feature (1341)..(1342): n is a, c, g, or t
  misc_feature (1395)..(1395): n is a, c, g, or t
agcgggtcgctcccggcgctgagagcatattgctgcttttgccccgccgctgccgcgggcgctcgaccggaagcttcctttcagtttcaggggtccagtcccaggctgtgggtgttgagaagagaagacagagaagctgggccaggagaggccgggagccccagggctgctccgacttctggagggcagaccccgaggcctcggaccgggaggttccgcgcgccgcggcgttccgtgttgtggcgttgccccgccgaggatgccagcccccatcagattgcgggagctgatccggaccatccggacagcccgaacccaagctgaagaacgagaaatgatccagaaagaatgtgctgcaatccggtcatcttttagagaagaagacaatacataccgatgtcggaatgtggcaaaattactgtatatgcacatgctgggctaccctgctcactttggacagttggagtgcctcaagcttattgcctctcaaaaatttacagacaaacgcattggctatttaggggcaatgctgctgttagatgaaagacaagatgtccatcttctcatgaccaactgtatcaagaatgatcttaatcatagcacgcaattcgtacaggggttagcactttgtaccctcggctgcatgggctcctcagagatgtgcagagatcttgcaggagaggtagagaagctcctgaaaacctccaactcttacttaagaaaaaaggcagcactgtgtgctgttcatgtcatcaggaaagttcctgaacttatggagatgtttttaccagcaacaaaaaatttattgaatgagaagaaccatggtgtcctccacacatctgtagtcctcctcacagaaatgtgtgagcgaagcccagacatgcttgcgcatttcagaaagcttgtgccccaattagttcgtattttaaagaacctcatcatgtccggatattcaccagaacatgatgtttctggtatcagtgacccctttttgcaggtacgaattgggcggttattaagaattttaggacgaaatgatgatgattcaagtgaagctatgaatgatatattagcacaggttgccactaatactgagactagataaaaatgtaggaaatgctattcttaatgaaacggttttgactatcatggatattaagtcagagagtggattgcgagtcctagccataaatatcctgggtcgtttcttattgaacaatgacaagaatattagatatgtggctctgacatcttngttgaagactgtacagacagatcataatgcagtacagaggcacagaagcacaattgtggactgtcttaaagnttnggatgnctnannaaaacggcgtgcaatggaattgagttttgccctggtaaatgggaataatatcngaggcatgatgaaagaattactttattttctggattcgtgtgagccagaatttaaagcagactgtgcatctggaatctttcttgctgcagaaaagtatgcaccttccaaacgatggcatatagacacaattatgcgtgttttgacaacggcaggaagttatgttcgtgatgatgcagtccccaatttaatccagttaataactaatagtgtggagatgcatgcctatactgtccagcgcctgtacaaagcaattcttggtgattattctcaacaacctttggtacaagtggctgcatggtgtataggtgaatatggtgatcttcttgtatctggccagtgtgaagaggaagagcctattcaggtaacagaggatgaagtgttggatattttagaaagtgtcctaatctctaatatgtccacctctgtgacacgaggttatgccctcactgccattatgaagctttccactcgattcacttgtactgtaaaccgaattaagaaagtggtttccatctacggaagcagcattgatgtggaactccagcagagggcagtagaatataatgcacttttcaagaaatatgaccacatgaggtctgccctacttgagagaatgcctgtcatggaaaaagtgaccacaaatggccctactgagattgtgcagacaaatggagagacagaaccagctccactagagaccaaaccgccaccctctgggccacagcccaccagccaggccaatgatttattggatttgttgggaggaaatgacataacacctgttattccaactgcgcctacaagcaaaccatcttctgctggtggagaacttcttgatttgctgggagacatcaaccttacaggtgaggcagtctggagctatttaatacctgggaaaagatagaggcctcagggaaaaactaaactgaacccagactttccagcacgtgaatcatttgaagatgggagaggctaaatcagaagcaagagtcaaatcttcacaatatccgggttatatgttgtatactaataatgctcta

SEQ ID NO: 616480 - DNA, 728 bp, Homo sapiens
gagctccgcctttgcctccaaggctttgctggcttgtgcggcatcctgctccgtctgcaggttgtgcttccggtgcggaggtcagggacaagatggtgccaccggtgcaggtctctccgctcatcaagctcggccgctactccgccctgttcctcggtgtggcctacggagccacgcgctacaattacctaaaacctcgggcagaagaggagaggaggatagcagcagaagagaagaagaagcaggatgaactgaaacggattgccagagaattggcagaagatgacagcatattaaagtgagtgaccctgcgacccactctttggaccagcagcggatgaataaagcttcctgtgttgtgtgaaaaaaaaaaaaaaaaaaaaaaaaaaaaaaaaaaaaaaaaaaaaaaaaaaacaaaaaaaaaaaaaaaacaacaaagaaaaaaaaaaacacccccagcggcggagagcaccagacaaagagggggcgacttatcaatcatagagggcgggcgggccggacgaacaagcggagggccctctacaagaggggggagaacaacagcgcgaagcggggggaaccccgagcggcagacaatacaagcgtaaccgaagcgagcggaacaaaatgtgtaccgccccgcgaaaagatccccacaaaaaacaaggagacacacaccccgccgcacgaccataccacaaccacctccacgacacaacgccgacgaa

SEQ ID NO: 616481 - DNA, 235 bp, Homo sapiens
tgccacggttcccaagtgctgggattacaggcctgagccaccatgcccggccccattcctgtttctatcaagagtcacaaagatcctcattcacaaggcctctaatgacattcatgaacgcgcggatgggtattatttaattggtatattacttgttaggaattgtttgtatgtttgttttcgagatggagtctcgctctgtcgcccaggctggagtacagtggcatgatctctg

SEQ ID NO: 616482 - DNA, 1350 bp, Homo sapiens
ctccacctccagggttcaaatgattctccatgcctcagcactcccgagatagctgggattacaggcgcccaccaccacacccagactaattttgctatttttagtagagacggggtttctccatgattggtcaggcagatctcaaacatccccacctcaggtgatccaacccgcgtcggcctcccaaagtgctgggattacaggcatgagccaacctcacccagcctacatacaattttaaacacctttaaagcttatctataagccacactcagaaatgaaccattcaagcatctgcatcaacatgtcattcaaccatcgctttccaaaaggcattgcaacacccattcacccgcatcatatcacacatgcagcaaacacatttccacctggtcccagctcatcagagcgacatccatttactagggaaacaactacgctccacttgacaaggtcatttcacatttggccatgcacttaaagcactggcactccactatctagctccattggtctactcttcaccgatcctaatggtcatttccccacctccttttccattggcacccaccacatacatggcgtacatgtgttcacacacaacctcccaacaacctctcaacaccttcatttcgacgcacgatggctcacaaagtgtacaatgcacttcacttggtaaatcagtataaacaacacccaagcaggggacttcctacacgatcaaccgtcacttaaggctccaatatcattacaccccaccaagactaaattacttatctcgtcaccacacacacgtattatgtacaacccgcaaccaacatggtgcttacacaggctatatccacaacaccagtttatatttggcacgtacttaaatatccacactatcgcaccgtagtcttatcaggtacaaacaggttcatgtggcacaaacgaccataaatggcggaacgaaccaaaacaccagccgtataaggtaaaggactcaacgtcttttcacagccaacactgaatactgagaacaccacgtatacatccaagactgggacaactaaacaacaatcaaacgtttcactcggcccaaagacacaacacaaatcagctacacgaacaaataccaaccacagtgacacgcaaggccacagccgccccacgatacaacacatcaacacacactatcaaccgggagccagccacacacaacatagcgagccacggcagcacaacgagagctcataccacaaacagccaacctactagcccgcggtcgcatgtccccacaaagaacaccacaggtagcacaaccagtcaccaccaaacgacaatccagagacggtcccacagacagcc

SEQ ID NO: 616483 - DNA, 2011 bp, Homo sapiens
  misc_feature (830)..(830): n is a, c, g, or t
  misc_feature (902)..(902): n is a, c, g, or t
  misc_feature (905)..(905): n is a, c, g, or t
  misc_feature (911)..(911): n is a, c, g, or t
  misc_feature (914)..(914): n is a, c, g, or t
  misc_feature (916)..(917): n is a, c, g, or t
  misc_feature (970)..(970): n is a, c, g, or t
ataatttgtaataaagttgggataaacattttctgcaacaaataatcctattgtttttgttattggagaaatcttgagtcatcctgaactagtttgaaattgtgaagctgcttcttggggagcaccaggcttgttcctaccttcctcttttcttttgcagtgatcttaatcatagcacgcaattcgtacaggggttagcactttgtaccctcggctgcatgggctcctcagagatgtgcagagatcttgcaggagaggtagagaagctcctgaaaacctccaactcttacttaagaaaaaaggcagcactgtgtgctgttcatgtcatcaggaaagttcctgaacttatggagatgtttttaccagcaacaaaaaatttattgaatgagaagaaccatggtgtcctccacacatctgtagtcctcctcacagaaatgtgtgagcgaagcccagacatgcttgcgcatttcagaaagcttgtgccccaattagttcgtattttaaagaacctcatcatgtccggatattcaccagaacatgatgtttctggtatcagtgacccctttttgcaggtacgaattgggcggttattaagaattttaggacgaaatgatgatgattcaagtgaagctatgaatgatatattagcacaggttgccactaatactgagactagataaaaatgtaggaaatgctattcttaatgaaacggttttgactatcatggatattaagtcagagagtggattgcgagtcctagccataaatatcctgggtcgtttcttattgaacaatgacaagaatattagatatgtggctctgacatcttngttgaagactgtacagacagatcataatgcagtacagaggcacagaagcacaattgtggactgtcttaaagnttnggatgnctnannaaaacggcgtgcaatggaattgagttttgccctggtaaatgggaataatatcngaggcatgatgaaagaattactttattttctggattcgtgtgagccagaatttaaagcagactgtgcatctggaatctttcttgctgcagaaaagtatgcaccttccaaacgatggcatatagacacaattatgcgtgttttgacaacggcaggaagttatgttcgtgatgatgcagtccccaatttaatccagttaataactaatagtgtggagatgcatgcctatactgtccagcgcctgtacaaagcaattcttggtgattattctcaacaacctttggtacaagtggctgcatggtgtataggtgaatatggtgatcttcttgtatctggccagtgtgaagaggaagagcctattcaggtaacagaggatgaagtgttggatattttagaaagtgtcctaatctctaatatgtccacctctgtgacacgaggttatgccctcactgccattatgaagctttccactcgattcacttgtactgtaaaccgaattaagaaagtggtttccatctacggaagcagcattgatgtggaactccagcagagggcagtagaatataatgcacttttcaagaaatatgaccacatgaggtctgccctacttgagagaatgcctgtcatggaaaaagtgaccacaaatggccctactgagattgtgcagacaaatggagagacagaaccagctccactagagaccaaaccgccaccctctgggccacagcccaccagccaggccaatgatttattggatttgttgggaggaaatgacataacacctgttattccaactgcgcctacaagcaaaccatcttctgctggtggagaacttcttgatttgctgggagacatcaaccttacaggtgaggcagtctggagctatttaatacctgggaaaagatagaggcctcagggaaaaactaaactgaacccagactttccagcacgtgaatcatttgaagatgggagaggctaaatcagaagcaagagtcaaatcttcacaatatccgggttatatgttgtatactaataatgctcta

SEQ ID NO: 616484 - DNA, 617 bp, Homo sapiens
ccccgcccccatgatcctcgccccgtgaccctcgcccggcgaccggacccccacccctcctgcgacctctgcccagcgaccccgccccccctcctcccgcgacccccgtcccgcgagccccgtttcgcgccgcctctgaccaacctctttcgcagctcggccgctactccgccctgttcctcggtgtggcctacggagccacgcgctacaattacctaaaacctcgggcagaagaggagaggaggatagcagcagaagagaagaagaagcaggatgaactgaaacggattgccagagaattggcagaagatgacagcatattaaagtgagtgaccctgcgacccactctttggaccagcagcggatgaataaagcttcctgtgttgtgtgaaaaaaaaaaaaaaaaaaaaaaaaaaaaaaaaaaaacaaaaaaaaacaaaaaacattagtgtggcggggcccgcccggcgcgcccacgcgagaaagagttttacaaacacaccaccggtggggggcggggcggcgcgccacaaggtgtaggaacacgggggacaaagggggtcccagaaggaaaaccgggggaccaaaagggggggggtatcccacccaaaaaaggc

SEQ ID NO: 616485 - DNA, 2197 bp, Homo sapiens
  misc_feature (1348)..(1348): n is a, c, g, or t
  misc_feature (1420)..(1420): n is a, c, g, or t
  misc_feature (1423)..(1423): n is a, c, g, or t
  misc_feature (1429)..(1429): n is a, c, g, or t
  misc_feature (1432)..(1432): n is a, c, g, or t
  misc_feature (1434)..(1435): n is a, c, g, or t
  misc_feature (1488)..(1488): n is a, c, g, or t
  misc_feature (1737)..(1737): n is a, c, g, or t
  misc_feature (1741)..(1741): n is a, c, g, or t
  misc_feature (1745)..(1745): n is a, c, g, or t
  misc_feature (1751)..(1751): n is a, c, g, or t
  misc_feature (1791)..(1791): n is a, c, g, or t
agcggagtggcagccccgatccttgctacgtttgcgtcgctctgccaggagcagtcgcctcctccttggcaaatagtcctcggcagggtccgagttcttggataattcgagagaaaaggcacgataagttgcagtacgaggacacggaaacgaccaggagaggaggacagggagcgaagtttcctcaatagtgtgtgaagttagttaaaaactccctccttcctcaggatccctccgcctgcggtagcggtggtgaggccgagggagccgccattttggatgttcggttcctgctgccactgctgccgccgcccccggagctgctggtttcattcgaggtttcgggccgaggatgccagcccccatcagattgcgggagctgatccggaccatccggacagcccgaacccaagctgaagaacgagaaatgatccagaaagaatgtgctgcaatccggtcatcttttagagaagaagacaatacataccgatgtcggaatgtggcaaaattactgtatatgcacatgctgggctaccctgctcactttggacagttggagtgcctcaagcttattgcctctcaaaaatttacagacaaacgcattggctatttaggggcaatgctgctgttagatgaaagacaagatgtccatcttctcatgaccaactgtatcaagaatgatcttaatcatagcacgcaattcgtacaggggttagcactttgtaccctcggctgcatgggctcctcagagatgtgcagagatcttgcaggagaggtagagaagctcctgaaaacctccaactcttacttaagaaaaaaggcagcactgtgtgctgttcatgtcatcaggaaagttcctgaacttatggagatgtttttaccagcaacaaaaaatttattgaatgagaagaaccatggtgtcctccacacatctgtagtcctcctcacagaaatgtgtgagcgaagcccagacatgcttgcgcatttcagaaagcttgtgccccaattagttcgtattttaaagaacctcatcatgtccggatattcaccagaacatgatgtttctggtatcagtgacccctttttgcaggtacgaattgggcggttattaagaattttaggacgaaatgatgatgattcaagtgaagctatgaatgatatattagcacaggttgccactaatactgagactagataaaaatgtaggaaatgctattcttaatgaaacggttttgactatcatggatattaagtcagagagtggattgcgagtcctagccataaatatcctgggtcgtttcttattgaacaatgacaagaatattagatatgtggctctgacatcttngttgaagactgtacagacagatcataatgcagtacagaggcacagaagcacaattgtggactgtcttaaagnttnggatgnctnannaaaacggcgtgcaatggaattgagttttgccctggtaaatgggaataatatcngaggcatgatgaaagaattactttattttctggattcgtgtgagccagaatttaaagcagactgtgcatctggaatctttcttgctgcagaaaagtatgcaccttccaaacgatggcatatagacacaattatgcgtgttttgacaacggtaagtagcttctttcagacagcatatacgaagtgctgggatatactgatgttatcatgaagtttatgttctagtcagggaggtaagaaattcacaagtnaatnggtnacattnatgtcagttaggaataaatgccatgaagaaaaacctaaancagcatggaggaatattatgatggcaggataaggtgggatatagggcaactggccaagtgttttagattagagttagtcaggaaggtctctcagaggagataacatttgagtagagacctaagagacatgaggtagcagccatgcagagatcgtgaggaatagtgtaccatacggagggaaccctaagtgcaaagacctgaggtaggaacaagcatagcttgcttggagagcaacaggaaggcaagtgaagccataaagtgagagaggcagagaatggtaggatggatgtcagagacataagcggagccagacaatgtaggcctcatgggagcttgcactttaatttggaatatgtaaggaagccattgcagaggttttgaatggctaaagtaactcaggattatg

SEQ ID NO: 616486 - DNA, 783 bp, Homo sapiens
gagctccgcctttgcctccaaggctttgctggcttgtgcggcatcctgctccgtctgcaggttgtgcttccggtgcggaggtcagggacaagatggtgccaccggtgcaggtctctccgctcatcaagctcggccgctactccgccctgttcctcggtgtggcctacggagccacgcgctacaattacctaaaacctcgggcagaagaggagaggaggatagcagcagaagagaagaagaagcaggatgaactgaaacggattgccagagaattggcagaagatgacagcatattaaagtgagtgaccctgcgacccactctttggaccagcagcggatgaataaagcttcctgtgttgtgtcgaaccaaaaacaaacaacaaaacaaaacaaaaaaaacatttgtgtgggcgccggctctggcccctctggaaaacggcttccaaagaacctatccgtctggggccgccggggcccccagatctggtcacagcgggacatttggccccataagcgcgggttccccctaaggaagaatcccgggcgcccatgggccaacagagggcgcggggagtctccccaccccaatttaaaaaacccgcccgcggggggaacacccggggagcgtgttcgctgaaacacatattcccagagggggcggagttccgggggagtgtcacataccaggggggatctataatcacacccagggagtctaccacaaacggcagacaccttccagaattttacccaaatattaacgcccccgcacccgcgggggat

SEQ ID NO: 616487 - DNA, 684 bp, Homo sapiens
aacactctgatcagcactgaggcgatggtaagatgctgtctagctcatcagcaaagcggaaaaacgtgcactgcctcaaagatgggcacacggcctgtctttccagggtgcgactctatcctcagcgccacagcttcgctccaggcctccaacaccagtcgacgccggggcagacaggagcattttgtgcgaggctcatatgtagtcacccatccgtcatccgagttcactgctccaggtagatcagtctgtcaccatggaccttgggtgccatgatgtgaggcaccgctgagaattcatccacggcccgtggcgagtcacatggagtaactgtgctgagcttgctgtgcccaagccccgacgggtgacgccgagcttcagcttcctcctccacttctacacagtacccatacccaaaaccggcaccctcagctgcacggtagccctgcgtcccaagaccgggtctcaagaccaggaagtccataggactgtcttcatgcgcttgaacatcatcagccctgacctgtctggttgcacaagcaaaggcctcgtcctgcccgccgtgctgggcatcacctttggtgccttcctcatcggggccctgctcactgctgcactctggtacatctactcgcacacgcgttcccccagcaagcgggagcccgtggtggcggtggctgcccg

SEQ ID NO: 616488 - DNA, 381 bp, Homo sapiens
  misc_feature (15)..(15): n is a, c, g, or t
  misc_feature (70)..(70): n is a, c, g, or t
  misc_feature (110)..(110): n is a, c, g, or t
  misc_feature (119)..(119): n is a, c, g, or t
  misc_feature (129)..(129): n is a, c, g, or t
  misc_feature (131)..(131): n is a, c, g, or t
  misc_feature (136)..(136): n is a, c, g, or t
  misc_feature (141)..(141): n is a, c, g, or t
  misc_feature (149)..(149): n is a, c, g, or t
  misc_feature (156)..(156): n is a, c, g, or t
  misc_feature (165)..(165): n is a, c, g, or t
  misc_feature (178)..(178): n is a, c, g, or t
  misc_feature (185)..(185): n is a, c, g, or t
  misc_feature (191)..(191): n is a, c, g, or t
  misc_feature (193)..(193): n is a, c, g, or t
  misc_feature (201)..(201): n is a, c, g, or t
  misc_feature (203)..(203): n is a, c, g, or t
  misc_feature (207)..(207): n is a, c, g, or t
  misc_feature (222)..(222): n is a, c, g, or t
  misc_feature (271)..(271): n is a, c, g, or t
  misc_feature (274)..(274): n is a, c, g, or t
  misc_feature (277)..(277): n is a, c, g, or t
  misc_feature (297)..(297): n is a, c, g, or t
  misc_feature (365)..(365): n is a, c, g, or t
gaatgcactacgcanatcacgagtaaatactgtgtcggtaaaacttgtttcagtaaaatatgtacgtgtncgtgcatgttatgattaaatatccttcttatcacagtcancctaaaganccaaagcttngnactanggacncaaccatntagaaanagcaggganaccagacactctnggttganatgatntntttaatgncncagncgacacccacattcncacttttggctccttcagacaacttgatctttgggacttgaatttgtanagngtnaaacacctacatatgaagcncgttggccgccacactacaacactcctttttagtgagagggacaagatacctatgtctcatgatcaangtactcttttattctt

SEQ ID NO: 616489 - DNA, 749 bp, Homo sapiens
agcggagtggcagccccgatccttgctacgtttgcgtcgctctgccaggagcagtcgcctcctccttggcaaatagtcctcggcagggtccgagttcttggataattcgagagaaaaggcacgataagttgcagtacgaggacacggaaacgaccaggagaggaggacagggagcgaagtttcctcaatagtgtgtgaagttagttaaaaactccctccttcctcaggatccctccgcctgcggtagcggtggtgaggccgagggagccgccattttggatgttcggttcctgctgccactgctgccgccgcccccggagctgctggtttcattcgaggtttcgggccgaggatgccagcccccatcagattgcgggagctgatccggaccatccggacagcccgaacccaagctgaagaacgagaaatgatccagaaagaatgtgctgcaatccggtcatcttttagagaagaagacaatacataccgatgtcggaatgtggcaaaattactgtatatgcacatgctgggctaccctgctcactttggacagttggagtgcctcaagcttattgcctctcaaaaatttacagacaaacgcattggctatttaggggcaatgctgctgttagatgaaagacaagatgtccatcttctcatgaccaactgtatcaagaagtaagtcttacttttctttcttctaacaactgttaactactttgttcttttttgtattttctttgagacgg

SEQ ID NO: 616490 - DNA, 817 bp, Homo sapiens
gagctccgcctttgcctccaaggctttgctggcttgtgcggcatcctgctccgtctgcaggttgtgcttccggtgcggaggtcagggacaagatggtgccaccggtgcaggtctctccgctcatcaagctcggccgctactccgccctgttcctcggtgtggcctacggagccacgcgctacaattacctaaaacctcgggcagaagaggagaggaggatagcagcagaagagaagaagaagatcagcgactgtgtgtgagctccagggaagtgaataagtttcagagtggttattcaaaactctttagagctaacatggatgggttgaagaagagagaaaaaagaacaaattaagaagaccaatgcagcagagcaggcagcaagcaggatgcaaccttgctggcaggacagaaacgtgggagcaaccaacatggcagcaaacaagcagcgagcaacaaggcagccacaggtaacagggggcattaccatttcccttgctttcaccaatttaacccatcttgaaattgctattttttccctttgtgggcaagaataggctaggtttcgtggtccccccacggtaggtgtttccacattacggatacgggtccttgtggaaaggatacgttgcccgtgtgtattgggatagtcgtggtacagactccaggtcattctggcattggccctattgggtcggtgctggagtggtatattcgtcctggattattagaatagacgtctccgaagacctctctgtgagaagccaggctatcattaaccgttttgtttcccaccaagcacaaccgaccaacacac

SEQ ID NO: 616491 - DNA, 346 bp, Homo sapiens
tgttccttattatcgtcttattataaagtgaaacgatggaatgttacgtagtaattatccatggaatggttccatcctgccatcgcgatactgtaacactcgtggtccagagcttcacgaagattactaatgtttttcatctctatgcctctgtcaaacttttattccttataccactgttttcacaccaagaccaccataacagccttagcattatgcatttgcaacttgcgtacctccctgatgtttcccgtcccctctctccctgtacaggaagcaattacttgggccaggcacagtggctcacctattaattgtattacttttaagacagagtctcactcca

SEQ ID NO: 616492 - DNA, 435 bp, Homo sapiens
tactaggaagtttgttctctaggcaagtgatcttagccagccagatctggtagtataaatctatgaatttagccaagcatcatgcaatggtggaactctaggaaggatgctacatttggttgtaatgtaattgctaccagagctggagagcagatggctccttttctgcctcagctagttcctcgactttatcgttaaccagtttgatcccaaccttggcattcgacaggccatgaccaagtatttgggaatgcgttggtcactgacaaatccatggtggatacatattttgaacgaaattcttcaagatttggttcagaaccttacaagcaatatgtggcgagttcgagaatccagctgtatagctttgaatgatttattgagaggaagacccttagatgacatcattgataaacttccagggtaccgagctcg

SEQ ID NO: 616493 - DNA, 497 bp, Homo sapiens
ggtgactctagaggttcccgagtgtcttcaagagtatatagactgttctacttcatgctctactcatgccatatcccttcgtggttcctgagactcaggtgaaattaccttccaatattgctggagaagggtcgtctcctcctcagtgtctcataaatcctttattagtaccaataactgcaagaaaccaggtgctgtgccatcctctggcagattaagctctctgcgaattgttttgtggactgccccagcaatgacttggtctaggcgggcctgattcacagcatctctctcaattgctcctctctgtaccagcttctgtaacaaaggctccagccttagtacataagccgacaacttttcctcatccttctggtaagtggttagatatttgacctgcaactccctaggattatctgtaaccccaaatacctcctcaagagcctgcagacattcatcgacagtaattaaaggattgtttatcttgaagaacactc

SEQ ID NO: 616494 - DNA, 898 bp, Homo sapiens
  misc_feature (107)..(107): n is a, c, g, or t
  misc_feature (255)..(255): n is a, c, g, or t
  misc_feature (261)..(261): n is a, c, g, or t
  misc_feature (295)..(295): n is a, c, g, or t
  misc_feature (305)..(306): n is a, c, g, or t
  misc_feature (310)..(312): n is a, c, g, or t
  misc_feature (314)..(314): n is a, c, g, or t
  misc_feature (318)..(318): n is a, c, g, or t
  misc_feature (327)..(327): n is a, c, g, or t
  misc_feature (350)..(350): n is a, c, g, or t
  misc_feature (360)..(360): n is a, c, g, or t
  misc_feature (366)..(366): n is a, c, g, or t
  misc_feature (395)..(395): n is a, c, g, or t
  misc_feature (440)..(440): n is a, c, g, or t
  misc_feature (477)..(477): n is a, c, g, or t
  misc_feature (506)..(506): n is a, c, g, or t
  misc_feature (514)..(514): n is a, c, g, or t
  misc_feature (517)..(517): n is a, c, g, or t
  misc_feature (523)..(523): n is a, c, g, or t
  misc_feature (526)..(526): n is a, c, g, or t
  misc_feature (531)..(531): n is a, c, g, or t
  misc_feature (551)..(551): n is a, c, g, or t
  misc_feature (556)..(556): n is a, c, g, or t
  misc_feature (599)..(599): n is a, c, g, or t
  misc_feature (824)..(824): n is a, c, g, or t
  misc_feature (893)..(893): n is a, c, g, or t
cgacccccatttcggctgcagcctcggacctagctccggccctcggtctatccggttgcatcctccctccctgttccggatcttatcttgcgccacgcctactccangatcccgtagccagacctcaagccatggctggtcccttctcccgtctgctgtccgcccgcccgggactcaggctcctggctttggccggagcggggtctctagccgctgggtttctgctccgaccggaacctgtacgagctgccagtnaacganggaggctgtatcccccgagcgctgagtacccaancatccgaaannacannnantgcntggccagtnaccttaccccagcagtctatgcncggctctgcnacaaanctatactcactggttggacgctagatcantgtatccagactggcgtggacaaccctggccaccccttcatcaanactgtgggcatggtggctggagattaggagacctatnaggtatttgctgacctgtttgaccctgtnatccaaanacnacaaantgnatatnacccccggacaatgaagcanaccanggatctagatgccagtaaaatccgttctggctactttgatganaggtatgtattgtcctctagagtcagaactggccgaagcatccgaggactcagtctgcctccagcttgcactcgagcagagcgacgagaggtggaacgtgttgtggtggatgcactgagtggcctgaagggtgacctggctggacgttactataggctcagtgagatgacagaggctgaacagcagcagcttattgatgaccactttctgtttgataagcctgtntccccgttgctgactgcagcaggaatggctcgagactggccagatgctcgtggaatttggcacaacaangagaa

SEQ ID NO: 616495 - DNA, 124 bp, Homo sapiens
aatggtctacactctattgcacaggcctctccagtgaacaggttctgttcactactgcgaacttcttggctcctgcaacattgtgaatgtactagcaataacccacacatagtgcagcgtctga

SEQ ID NO: 616496 - DNA, 767 bp, Homo sapiens
  misc_feature (89)..(89): n is a, c, g, or t
  misc_feature (104)..(105): n is a, c, g, or t
  misc_feature (213)..(213): n is a, c, g, or t
  misc_feature (215)..(215): n is a, c, g, or t
  misc_feature (220)..(220): n is a, c, g, or t
  misc_feature (235)..(236): n is a, c, g, or t
  misc_feature (248)..(248): n is a, c, g, or t
  misc_feature (279)..(280): n is a, c, g, or t
  misc_feature (300)..(300): n is a, c, g, or t
  misc_feature (310)..(310): n is a, c, g, or t
  misc_feature (312)..(312): n is a, c, g, or t
  misc_feature (334)..(334): n is a, c, g, or t
  misc_feature (336)..(336): n is a, c, g, or t
  misc_feature (391)..(392): n is a, c, g, or t
  misc_feature (429)..(430): n is a, c, g, or t
  misc_feature (437)..(437): n is a, c, g, or t
  misc_feature (448)..(448): n is a, c, g, or t
  misc_feature (452)..(452): n is a, c, g, or t
  misc_feature (454)..(455): n is a, c, g, or t
  misc_feature (526)..(526): n is a, c, g, or t
  misc_feature (566)..(566): n is a, c, g, or t
  misc_feature (580)..(580): n is a, c, g, or t
  misc_feature (584)..(584): n is a, c, g, or t
agctgttcctgagataaccatggagtcggctgctgcatgccaaggcgcatggggtccgagtgattggaagctccacattggcactctgncacctggcctcaggnnccgcggatgcctattaccagtttggcctgcactgctgggatctggcggctgccacagtcatcatcagagaagcaggcggcatcgtgatagacacttcgaggtggaccncntcganctcatggcattgcannagtggttgcggncagcacctcgggagatggcgatgctcatagnntcaggcccttacagacgatntaactatggncngggatgatgagaagtgactgcngngtgaggcaaagctgctcccaaggcctccctgggctgctgtgggctcctggggagnntggccctcgtggcccacgctccatgccagtggctctnngctctgntcctggctacnccananngggagttgtcacgctacagtgagtggctggccttttaaatcgacgtctctctcaccaggatttggtgttangctgtttctctcttaatctcacgtagcctttttcaggttngtacgtgttcttcngtcnaggcgccataactcaatatgctcctgtgaagatacgtcattgataattccagtcgttgattttttgcccccccagagatataggatctcaggtgataaggctttagaactgcgtgatacagcggatcgttctcaggccctcccgccggagtacttgcagactgcatatggtcaaaactaatgg

SEQ ID NO: 616497 - DNA, 1147 bp, Homo sapiens
  misc_feature (358)..(358): n is a, c, g, or t
  misc_feature (403)..(403): n is a, c, g, or t
  misc_feature (423)..(423): n is a, c, g, or t
  misc_feature (434)..(434): n is a, c, g, or t
  misc_feature (437)..(437): n is a, c, g, or t
  misc_feature (457)..(457): n is a, c, g, or t
  misc_feature (466)..(468): n is a, c, g, or t
  misc_feature (501)..(501): n is a, c, g, or t
  misc_feature (504)..(504): n is a, c, g, or t
ggaatacgatgggatcgtgcggaggagcggggtcaccgtacatgtctcccgctggcgcatcgatgtctgttgagaccgtggatggaacggtgctgactccgtggacccggaatacgacatatattgctgtggtgcgaatgagctcacatacacaatcacacacccatgagagagagctgtataagcgataatacagattgctggaggggcccccatgagtcgatgggccgaggccgagactggaatgttgaccgtgattcccgaaattcctcatggcgtaacgggcagctggtaaagatgctactgtatacagaggtgactcgctacctggacttcaaggtggtggagggcagctttntctacaaggggggcaagatctacaaagtgccgtccactgagactnaggccttggcttccaatctnatgggcatgtnganaaacggcgcttccgcaagtncctggtgtnnntggcaaacttcgatgagaatgaccccaagaccnttnagggcgatagaaccccagactaccagcatgcgatgacgtctaccgagaagtaagatctgggccaggatgtcatcgatttcaacatggccatgaccactgagcgctctaccgacactgatgactaccttggaccagacctgccttgagaccgacaacggcatccacagttggtacagtgagtccctggacccggtatgggaagagcccatatatatacccggctctacggcttggagctgagctgcaccagggttttcgaaggattgagtggcaacatattggggggacatatcatgccgagcacaaaacaggagagacgagacacacaatacatgggacaacagagagaagggctagtggagcgatctaacaacaggagaggacataagctagaccggccaggagaacagacggaactcggtgaacccccgcacacaacaccggaaccagtgtgccagacagagggctgcacagggtaacacgcgctcaccagtaaaccataagaacccccacaacaaaaacacaaaatagacacataatgggcaacaaaagatcaccacgagcaaggtcagagaagcgacaacacagcagaaacatcgaaagcaacgagagcaccgagcgacagcagtgtaacactgagaac

SEQ ID NO: 616498 - DNA, 367 bp, Homo sapiens
tcagatatttctttatagcaatgcaaaaatggactaacacacttgagttctgtctttttcttatggcatattttaatctaggccagacacagtggctcatgcctgtagtcccagcactttggaggccgaggcgggtggatcacttggggtcaggagtttaagaccagcctggccaacatggggaaaccctgtctctactaaaaacacaaaaaattagttgggtgtggtggcacacacctgtggttccagctactcgggaggctgagacacaagaatcgcttgaacccgggaggtggaggttgcagtgagccgacatcacgccactgctctccagcttggggaacagagcaaacctccgtctcaaaaa

SEQ ID NO: 616499 - DNA, 129 bp, Homo sapiens
gtagctagaggatccccgtccttcatcatgctacccgtccttcatcatacctacctcagcctcccgacgtccttcatcatacctaccccgattgaagagggagaaaaggtgaaggctgaaatctcgttt

SEQ ID NO: 616500 - DNA, 593 bp, Homo sapiens
aaaaaaaaaaaaaaaaaattgtgggcggctcgggccccgcgaaaaagttttttaaacaatcggtggggcgcgcgggcgcccaggacgggacaagcgaagaacaggggccaataggcgtggtcccattagggaggactccggcgctcaatgaacaataggggcgtggggagttcctccaccaacaataacaaaacgcgccggggcggggaaacccggagcggtctgcgagaaaaaatctcccagaagggggagtctcctggaggcgctcaataccaggggatctcatactacaacaagggagaggccgcaacagggggaagggctctcggacatatctctaaaacatttatacgggccccccggcccggtgggggagaaaatcggaacgggaagggaaactaacaagagagataggcaacaagctcgactgaagcaggagaaagtacatgcgagagagcgaaacccgtggcaacgcaacgcactactagctagcaaggcacagacgaacagtagcaccgaccacccagtagacaagaagccaaccgaatcgcggaacaactgaacaacaatctgagccggccgtagagctaaat

SEQ ID NO: 616501 - DNA, 867 bp, Homo sapiens
ccctaatgagacgcagcgagcagtacagagagtgaaccacgagggtgacaggcactcagctcggcgtatagtagtccgacaccctgctgtggaaggggcgtcaaatagacacccgacggcgtgagaaaaaacaccgcgggggttcaccaatagggtctcttggaaagttgtccccgcccccgagaaaaaaatggcccacgccagactgggaacaaagcgggggccgcctctctctctcataaccgggagcgccgctaacagccttctcaggcaccccccagggacacctttttgcgcgggccaagaaacaaattcgctggggacacaacaccacaggacaggggggtggccccacgccgaaaatggaagcgtccctatgatccccaggaggactttcggaaggacgtggccccagagcccatgcgacaacatgtgcccagtagacaccgggaatctaacccgggccccactcttagggaccaccaccgagcagtcctcgtgaaaaggcggaacccgggcttgataatcataagcccgcgcccagcaccaccccttccgacatactggaaagcaacttgctcaaaccgctatggtggcaacaccccagagaggaaagcaaaaaacgggtttaaacagggacactccaagctcgcggggacattaaggcctcttctaccaccagactgccagccacggatggtcatccgcacaataactctcagagggaattattgccctttcaaagaactatgacacgttttgttgtcaatcctcaccggccttccaagaccggtacctaagacaaatgccacggcttataatctttcgggcagtccccccaaaaccattggacttctacgggacaaa

SEQ ID NO: 616502 - DNA, 332 bp, Homo sapiens
  misc_feature (38)..(38): n is a, c, g, or t
ggtcgtccggtcagcgggtggccttcaagcaggatggngccttgctgaggatcgtagaaacgcagcaacagatcgaagatcgtcgattttcccgcgcccgacgcgcgaccagggccagggtttcaccggcattgatgctcaggctcaagccgtcgatagcaaaacgatccgggcgcgacggataggagaaacgcaaatcctggacttccaggcggccgctgacccgctccggcagcttgacgacgtttgcctcgggcgccttgatctcgttgctcgactgcagcaactcgccgatccgctctgctgcaccggccgctcgttgcaagtcgacg

SEQ ID NO: 616503 - DNA, 171 bp, Homo sapiens
cgtacaaaagcgctttggagatgccagaaaaaaccctacgggagggttatccccctgacgctaggccatgacacaactaaacttcaatacaccaggactaaggcaagtatgaagaagcaaaatatcgtaacgacgcaccctcgagatctaccaggcaaaaccagaacctga

SEQ ID NO: 616504 - DNA, 582 bp, Homo sapiens
agcttggggtattgtgagttcgtgtgcatccccatctgttacatgcacagcgagacaaaagaacattgtgcttggcacacaacttttttcccccttttaataatggtcatgagagccttaagtcttggggcagattttgaagctgtgtgtggcaaacagtcacagatgcggacagtacagtttactcacttaagtgcttctggtgccagcatagaattatcagagggacttcagtccaggtttaactcaggataaattccctggctggatactatcctagaatttgccgtatagttaaaacattaaacagtttcagtgccagtgcaggaaatttgcctctgcgtttgcattccttcattgtgggtggttgagaagcctgttcaggggccgggggtctggacgttactggttgtcttgtctagttgtgcagcttgtgtgtggcctggtgcgcttatggctgaagagggggtggtactggcactgggggcaagctcacttcagctgaaggcagagccttggagtggctcatcccttgggttgttcccagtgcagtgtattgtcttgaccggcgctgggcttgct

SEQ ID NO: 616505 - DNA, 591 bp, Homo sapiens
caattccatgccagcgtagggactagctttgggagtatgagaaaaaaaatcagatatacttcctcaggaacaataaatcactcacttgcctcacctgtttttaaaacaaacacatttacattatagctcaagggagcagagcattttttttttccggggatctcaaagattattggaaaagaaatagatcatactcattatgctgcatgggaaaaaacaagatctagtcggcctaagcggccaggtaacagactccaaatgaaatataaatcaaatataaatagaaacagtgggcaattagaatttagaaagggtgggagattatgcggggcgggtgactagggtacattaggggaaagcacatttggcagtgggagacgggggcttaatttgtctggactcgattctagcttcaatacatgtacaaggagcctcactaagaaatatgtataacggggttggtgaaaccagatgggatggtgcaatattcacgtaatccttacataagggatggagttgcccatgtaaaaggtatcctataaaaatcggttaggagtgccatatggtacgtgtgtgtgcattactagtggt

SEQ ID NO: 616506 - DNA, 155 bp, Homo sapiens
cagtgtcctagacctcgcagtggtcctgccagtgttttattaccatactttgagacttcgagaccagcctgggcaacaaagcgagaccccgtcactacaaaaaagttaaaaaattagctgggtgtgtttttacccgcctgtggtcccagctactc

SEQ ID NO: 616507 - DNA, 409 bp, Homo sapiens
tgagacaggctggagtacagtggcgcgatcttggctcaccgcaacctccatctccagggtgcaagtgattctcatgtctcagcctcctgcgtcgccgggattacaggcgtgcaccaccacacccagctaatttttgtatttttagtagagacagggttttgccatgttgaccagaattgtctcgaattcctggcctcacgtcatcagcccgcttcagtctcaagtgatcaacttgcctcagcttcccaaagtgagttaggtattttaaactaccataaacttcaccatggctgcgttctgcctccatttccctgctggggtaggggagtgcttctgcccacggtacagcctggcacctcctggccatcccatggagacatcgggtctcttctcagccagacaggcccca

SEQ ID NO: 616508 - DNA, 130 bp, Homo sapiens
ccagaacataaagtgaggagaaaggccatgaccatacaaggtgcatgcagatcacatgatatcatccatcaacgtttccgcacagtgcccaccagaagtatgtccagacaagcctggccagaaggcagac

SEQ ID NO: 616509 - DNA, 441 bp, Homo sapiens
cagcgggatgatcgacgcgcgccacgtctgcaggaacaggatcacgaccagcaccaccagcgcaatcgcctcgaacagcgtgtgcgtgaccgcctcgatactgtgccgtacgaactgcgtggggtcgtagacgatgctgtagtccacgccgtccgggaagttctccttgagctcttccatggtcttgcgcacatcgtccgagatctggatcgcgttcgagcccggggcctggaagatcggaatcgccaccgcggacttgttgtcgagcagcgcacgcagcgcgtactccgacgcgcccagctcgatgcgggcgacatcgcgcagataggtcacgccgccgtccggcgaggtgcgcaagatgatgccgccgaagtcttcctcggtgttcaggcggccctgcgcgttgaccgagagctgcaggtcggtgcccggcaacgacgg

SEQ ID NO: 616510 - DNA, 109 bp, Homo sapiens
aagcccactctttcgagacatctggacacactgcggtcttggtgccccaggttcaatcttgcgttagctcttttgttgagaaggaaataaaccaaaccagccacttgca

SEQ ID NO: 616511 - DNA, 224 bp, Homo sapiens
gtctcatacacggatccccgcattgaaccctggctggctctaaactccttgatctgatgtgatctacccgccttccaaagtactgggattacaggcatatgccaccataattaattttaattattattttaattatttttaatcttgcaaatttacaaattattttagaatgcagaaatacctttgtcttatctatactctatgaacagatatgctacatttgt

SEQ ID NO: 616512 - DNA, 172 bp, Homo sapiens
ggcacgaggagaaagagaagtagaagaacggctacagaaggaacaagagaagttcagcgtcactggaatgagccaaaactggacggcggccttgggggaacacccaagctggccaagttaggaacttaggcccgggaccgtccgaggccaaaaattatttctcacaaattgg

SEQ ID NO: 616513 - DNA, 544 bp, Homo sapiens
  misc_feature (19)..(19): n is a, c, g, or t
  misc_feature (74)..(74): n is a, c, g, or t
  misc_feature (163)..(163): n is a, c, g, or t
  misc_feature (219)..(219): n is a, c, g, or t
  misc_feature (243)..(243): n is a, c, g, or t
  misc_feature (249)..(249): n is a, c, g, or t
  misc_feature (276)..(276): n is a, c, g, or t
  misc_feature (342)..(343): n is a, c, g, or t
  misc_feature (352)..(352): n is a, c, g, or t
  misc_feature (354)..(354): n is a, c, g, or t
  misc_feature (396)..(396): n is a, c, g, or t
  misc_feature (412)..(412): n is a, c, g, or t
  misc_feature (421)..(421): n is a, c, g, or t
  misc_feature (443)..(443): n is a, c, g, or t
  misc_feature (455)..(456): n is a, c, g, or t
  misc_feature (500)..(500): n is a, c, g, or t
  misc_feature (521)..(521): n is a, c, g, or t
  misc_feature (528)..(528): n is a, c, g, or t
ttccattgtataaaaagtnatccttatgtaacaaaaagacttcttagaagaagaaatatataatttcaggtcanaaataatcagcaaacatacaactgtgggcaaccaaaaaaaaacccaacactggtattttccatcagtcctgaaaacaaacctgcttaanaaatatttacaggatagtacagtactcaaaaacaaaaattgaggtatttggttctnctaggagtagacaatgacatttgnaaaggnagaaacctacacaaaaataaataaggnatattctcatatgtatatgtatggtcgggaataatactggtaggtatgtaaagcatgaagaaattnnacaaaaaanangggcgagcaaaaagaaaccggatcacacactgagtcctttcnctcctgccccatttcnccagacggncttgatgtaccccctatatatnggccccgaatgnnctgagtccagcaaatgtcttgacgctaagtaatcaccataactncttagaaacccagaggaactngggtgangttaaataaataagga

SEQ ID NO: 616514 - DNA, 239 bp, Homo sapiens
tctaatgatgctcattttatcttcatcgagatggtgtcaggatctctgctgaaagtagtctttccgtttgtaattaataagtgtttcatgagggagtaagtagaaatgatataagcatacaatcctcatcctttccactttattcatttatatatttaataccatatggatgcagtatctacctatatttttggggcggtaccgggggaaggggtacccgcaggctcggaatttcgtaa

SEQ ID NO: 616515 - DNA, 860 bp, Homo sapiens
tggaagagtgtttgagtttcattcccacaaaactgggacatcatctgtgaggctctgtcccaaaaagacagggccatccctcatgtctgttatggggtggtagataaacaaaatgttataaatcaaacaaactggcaaattactctggtctctattcgcctaaatcaatacagcaacagtcctcaggggtcactggccacccactctgggaacaaaatggccttcaggtacccttacccatcccccaaggcagcagcaaatccttccgtgtgtacggcctacctaactgggccaagggcacgccaaatagatttgagaaatgttctatgggctcgtaaaatggcgccaagataccgttaaaggatctattccctggtatagagtctcaccacctgggcacttaaatctaatattcccccaattgagcgctggagataactatccagtcccattgtccctgggctaagcagtctggtaaataccgatataatcccaaaagggccctacaatggtcctatttttcttccaggtaatacggggcttaggggcgctatttcacaaagggtcccgaatcacggtttttagacccgcacaaacctgagtaaggcacgcagattatttcccataccccggagaagtcgcctgggctgtggcttacaggcaccctccctggggatccccagaaaatagtaacgcggggtacgggtggaccgcggattcccagcaggcccaaaacgtatggggcgggggagaaggcaaagacccatggggggccctggcaaggccggagatggcccagaacatcttcaacaaaggcaggcggcaaggcccgttagccatctgggtgcccgaacccctaa

SEQ ID NO: 616516 - DNA, 582 bp, Homo sapiens
cctactagaggatcccgcctcatatagttcctgtcccagcaatgcacatgagacgagatggaggcaccacactgacttcgccagctaatggctgggaattcgttgcatcttctctttactttgctacattccatctgggtatgcctcacgaggatcaaagtaagacctggccaaaatggttctccagatgaatattcgctctgctgagtatgtataacatgatcatgggctcagtctgtctcaaaagtgacctggcagcacccaattcacgggctctatcaattccagaacaacctgttcatagaggtcaatgagggtaaagtctggcaatttccagagactgtatagcctgcaacacagtatcccaattgccactgttaatgtcagccacaaaactctcaatgctgtccacagtattcagagacacagtagtctcctcctgcaaggtggcttacgcctgatgtaaactgttctccttcaagtactgcataataaggcggatcacatcccaagattcgatttcgaacgaaatagccgtatctctccagtagcaggacccatttttccctcctaacatttatg

SEQ ID NO: 616517 - DNA, 191 bp, Homo sapiens
gtactactatacaaacatacctacataccacctaccagccgatatgaccaccccactaggtagagcatagcggtttgtctcccagcgactcgtaatacctacataagatactagtctaccgtctagacgctagcaaatagcagctatctagctatctagtaatatagacaggtagctagctaccacgcact

SEQ ID NO: 616518 - DNA, 116 bp, Homo sapiens
ggtcttcctaggaatcggtgtggcctagtccatcgctgccatctaccacgcagccaatggggaacaatcaaagtgtccctagcacactagcttatctcatgtcactctcttcacca

SEQ ID NO: 616519 - DNA, 678 bp, Homo sapiens
gccaaatagctcttcttcgttggaatcagtcatgcgtagcggactatcgatggctagaatttcagtctgctcccgaccacgatatatctgccactgctagccaagacctctcctgtccctgtctgagaacgatccagcacggcttgcggttattgtaatggcattagtcaaatttgctcctaaccaacgttaccacgcagcagaagcagtgtcccgtgagacataatctccttcatcaacatcgctcttgctatcatcacctacccccgccatgagacccaccatttcccccccctcctctatccgcctgcttctctcagcctgtgctccgttgcccgctcgaccactttcgtcacgcacactctactcacctctcccgcactaccacccgcccctctcccacacttctcctctcctctccccattctcacccgccaccctaccccttcacctcgcgcccctcccccccctctccccccttgccctcccattcccctctgccctccctcctacccctgcctccctcctcccctcttctctccctccttcctcccttcccactccctctcctcactctcctccgctcctcctctccccccctcctcccatgctccagccccatcacccccctctccgccccctccctctccccccttgactcctccgctctcccgtcct

SEQ ID NO: 616520 - DNA, 130 bp, Homo sapiens
  misc_feature (69)..(69): n is a, c, g, or t
  misc_feature (97)..(97): n is a, c, g, or t
  misc_feature (119)..(119): n is a, c, g, or t
ccgtttggtttccgcaactccctggattatcctcgccaaggactttgcaatatattttcccgcctttcntggaaggatttcgctgcttcccgaagtnttggacgagcgctctagctctntgggaaggttt

SEQ ID NO: 616521 - DNA, 182 bp, Homo sapiens
ataggaggagcacaatgccatttcaggacccaagtgagtttgctgaattctataatagactcaagcaaataaaggtaattccaccggaagcacccaagatgagatctgtgtgccacgtgtcacgtggaatttgatggaactcctagaaggctcgtagagaatccaagatgaagcaggcacaa

SEQ ID NO: 616522 - DNA, 427 bp, Homo sapiens
  misc_feature (1)..(1): n is a, c, g, or t
nctgcactgtcagtacgttggagatctgtgtcggtgaggcatagatacttgttatgaagtagacttcttggcgcaatcatgttcagcagtcagcatgatgggctttagcattgtatcatccaggttgtcatgatgatcattcatgggccttgttgacaactatccgatcattgacagtagcactctgtcagtgatccagatcatgcttgccatcagtaagcaccactggtacagcactaggtaccagtacattatgtggtcagacactggcgtaacgatccatgtcattggcgttatcctagatacccagactgtatggactctggtcgccaatcctcagcacagaacgatacttgccaaagcctacgccatatgtcgtgatctgtgcagagcgctctgagagaccatcacgacaatagatagtggt

SEQ ID NO: 616523 - DNA, 298 bp, Homo sapiens
taaggcctgacggtactgctggctcctactagtagtcacacacctaatgctagtaaagtgatacaaaatgcatcacatattttaggcaggacctagattttccctatcaacctaagatagaaaataatttcagtagtagatacagaacctagaacatataagtaaggccctacgtcctagcagttggccactatagagtgtttatgtatttgtttattatattttataaggtagggcatatttcctatataacctactaactattttacaaaatggcaacagaatggtggcctacaac

SEQ ID NO: 616524 - DNA, 1279 bp, Homo sapiens
gcctacgcacatcgtacaacatgccttctctgcaaaggatctctcgttcatcccatcgtccgagcaagaggagaagtaggaagacagcaacgaagaaacgccgtggtgcagagccctcgaagtacctacttctcgatggatgtctgtcacacatgcccagtgatgctataacgatcaaccacggtgtcttgtagcctagtgcacaaaacgggtctaccttttgtgctgtgtggctgctccactggtccctctgggcaggcctacaagggagcgatacaaggcaaggtgcttcaccagtagacgcgatggttatccttgcagcgcaggaacgcacggcacctaaaatgtcactctgcagttccaacgactgagctgcgcaaagaccactccggcaactaacagcagcattgtccgcgactacccaacaagaatccagagacaaggtccgcacggcccctcctagtgatccggaggcgggggccctagacaagggggataatgcgagaaatgggacctctttcgcttgcagttagccggtgatggcccctcagaccccaggatgtcctctggtgttgaccgaaattggcgtgaaaagaatgtcgtgacctctggtgctgcgctccttaatacgaaagacgatcggtacatgacttcttgctacaagtacatgccctgtgggttgacatccttgcaattaaccagacgagtggggaacaccccatgggtagaaaggaaaaggttaattgtttcttttcccctgggaacccccccccctttggcttggggttggcctgttaaacaaaaagaaccccaatgggttgaattgccttgggggggccaaggacgaccaagaagcgccacgaacgcgcttggtttgtggaataggcccccccttttgttccacaatccaaggcaacggaaaggaagaaagccaaggcttgggaaacccacgcaagtggtcccccaaggagagaaactctaacttttccttatttgtcggcccaagaacccctggggcccatgggtgccccttggaagcattctgactcgtttcccaattcccttaaaccttgtcgccttggacacttggacccccgggcaatttggccaaaaacggaacctccaattgttaaccatttggcccgaaccctggtggccccccggtgcatttggcccccgcttcttggcccccctgggcaaccaatttccagaaaactggcgccaacctttcacaacccacttggagggtaagccacgaaggcctcttcaaagaccttac

SEQ ID NO: 616525 - DNA, 321 bp, Homo sapiens
gaggattacggtcgacggaagcatttatgggagatatgagcagtgaagatctagtgcttgtctacaaggcacatctgaatcacgaatatagaggacatcagtagaaggattagtggagggttggaaggtattttactttttcccatcattgaagaaagatagataccaaagggtttttggtcccagagagattgaaatcagattagaattcatatttctttcccccagagatctgagaatcaggttaaggtctggatccggtagccaacttttggcaaaaacatttctatctctcagctatattccagtccttgcttcggg

SEQ ID NO: 616526 - DNA, 629 bp, Homo sapiens
  misc_feature (627)..(627): n is a, c, g, or t
catggtggtttacacctgtaatcccaatactttggaaagccgaggcaggcagatcacctgaggtcaggagtttgagaccagcctggccaacatggtgaaaccccatctctactaaaaatacaaaaattagccgtgcatggtggcagatgcctgtactcctagctactgaggaggctgaggtgggagcatcacttgaaccggggaggcagaggttccagtgagccgagattatgccactgcactccaacttaggtgacagagtgagactccatctcaaaaaaaaaaaaaaaaaaaaaaaaaaaaactttttgggcgcgccttgggccctgaaaaggtttttaaaaaccttctggttgtgggcgcgcggggccccattgggttaggtgggaacatggggccctacgagctcgggttcccagaggaagaatccgcgggcgcaagcaacactgagctgctggggatttcctccccaatataaaaaaaagcgccgcgggggggagccgcgcgaggtttctgggaaaccaattcccggaagagacgtcccggagggcacataagcgggtatcctatcaaccgggaggttcaaaggaaagtcccgaaaatgcaatattaggcccgcgctggggnga

SEQ ID NO: 616527 - DNA, 242 bp, Homo sapiens
gtaggctgagacaggatgatagctggaacccgggaggtggacggttgtacgttagccgacgatctacaaagaaatataaaaaaacacacgagtggatggggagctacgagacaaccagctgaatagctatactctgacataagaatttactttcttgaaattcattcaatggaaataattacgaatgtttgtaagtgatgtcctccacagcattattcataaagcagtgcagcgtaccacaa

SEQ ID NO: 616528 - DNA, 864 bp, Homo sapiens
gccggagcctgccgtccccgcgctcgtagcgcggcctgtggactggggatcccgccgccgggcgcagcatggggcgcttccgcgggggccctgcgggtgcttccagtaccttgcttgttggtttcaaccttgctcttctggctggctggatcggccgtcattgcttttgggactatggtccggtccgcaggtgcatacaggcagttctccatcaggaggacaatgtccccagagtatttcctatgtggggctgtatgtcctggtttgagccgggccctgatgattggcccggcggggggttccttcgaaattgctgcggagcccattgccggaaggtcgcaaattgtgttgcttggggactcactcttttaaccctgccttcctgggtgaatatttgcgtggctgacaggtacccacttgaaggttattgtgctattaactaggccaaggggggttacgctatccgaagtggttcagacccattgttttgaccgcaggcttaccaatgatttcaccttttaaagcacgggggggacaagtcgggcacttggggcacaccttcaatcaccttttccattcaaaaatttcaggtggcttggtggaaaacaaggaaaggcctccgaaacaggtcacaccctaaattgccccaaagggacgttcttaggacacaacgaatttgtcttcgctggaatttgcagaccataatccggtgtaaaggccaccagctcaattgggattggccggtatggcaatggcgggtctgcgaatcttgggcatgatattcagatgggccctctggtgtgcggacaggagacccacggaagatgtggtgttgaagcactactaagtgaaagttgcaccaag

SEQ ID NO: 616529 - DNA, 764 bp, Homo sapiens
  misc_feature (387)..(387): n is a, c, g, or t
caaggctccttgggcccaaccggaaaattggtcgcgattgtagaggtttggatcagaacaggctttgtcgatggacctgcactcaagtgaggagacagcccatgcctttcaagggcatgcagctcacctgaggttcatcctccaaggttccgcaacagggccccacagaagtatgtccgacacagcctggcaagaaggcagacatccaaaccaaatgggcagccacccgatgggcccagaagattgagcccgagaaagggaagcccagatgaccagattttgatcgttttaaagttatgaaggccaagaaaatgagggaccagcgataatccagaaatgaagttaagaagcttccaaaggcagctctcctgaaagcttctccccccnaaaagcacctggtactaagggtactgctgctgctgctgctgctgctgctgctgctgctgctaaagttccacgccaaaaagagtcaccgccgcgagtaaaaaggctccagcccacgaaggttcctgcccacggaagccaccacggccacgaaagcacgcgcctgctcccaaagctcagaagggtccaaaagctccacgcccaagaaagcacctgctcccaaggcatctggccagaaagcataagtggccatcataaaagttattaaggttctttttgacctgttgaccaatgtatttaagcctttggatttaagcctgttgaggctggagttaggaggcagattgatagtaggattataataaccatttaataatcca

SEQ ID NO: 616530 - DNA, 267 bp, Homo sapiens
cgcactaatctttttaccctaacagagtcaacctcgcttccacctcctctcatagaattcaggtcttctagtaggcaaaggacactttaatagatattagccatggcaatactatttccatacaataccagtacaataggctagcctatagctagaagagaagggtcatacaatatgatcactagtatgtcctacctccctatatggcgttatcctagtagtacctatgtactagtaataaataggattatatacaaatagggtata

SEQ ID NO: 616531 - DNA, 859 bp, Homo sapiens
ctacaagacgagatacttcaacgtctgtcttactgatgtacacatgaaggaggtaattcagcagttcattgatgtcctgagtgtagcgaggtcaagaaaggtgtctggtgtatacctcaggggggaatgcaaaaccatggacgaggcaagatgaacgatttgtcgacacacaccgttgtgcatgagtgaaatgccaagatgttgcacatgctgtgtgctgggcgagcattgattccatggatttatttcgcaatcccttgtcttgacccgtacagtattccttttagagtgaaccaattgatcttcttgaatgtagcttacatagcgtgacacgaaaaagacccatgccaagtaccttgtacacaggaagaacgggaataaacagaacgactacttttgtggaagagtagccgttgcagaacgaagttctctgagaaggatgttgctgctgctgttggttggacagtcctaagtaagacattgtcagtgtaccagatccgaactcacaagtggaagggctgggcacctaagggaactacacggcggttagcccttcccgagacttcggaatttcgttcgaaactcaatgtttctattggagacgaactgctgaaattcaagacgaggtcgaaatatggtcactttaattgcgggcattggatgacagtgcggggtgatagcatgggttgtagagactggttttggtgctagaggaatgtgggtgggttaggggccagggaaggaggtgaaatcctatagagcatgcaaaggtagttctccactgggattggtggaatgagattggggggtaatctcggcacgggcgagtaagaagggggggggggtggaaggaaaggtg

SEQ ID NO: 616532 - DNA, 999 bp, Homo sapiens
ggagccctgtgtgtgaccaatggcatcttcgaagagctcacgagagacttcctgccgcagctctcgtgagaagatgcaggagctggtgtggtgatctccacgcatctcgctgtcctgtgttcctgacccctcttcctcagcgtcatgcccttcgatgagctgccgtggtcatcgtcgactgcttttctctatagacgggcatcaacggtgatcctgcaaggtggccctggcacgtcctggaccgccaacataggagcatgcatgcttgggcttgcaagcgacagacgcggcgaggcccatgacacatgactggcgcaagaaacctgagataactgtggctcaaccaagcagcagtgtctcatcctacctatcccgcacctaccgtgccgtagcctgacgccacgcagcagaatgaccgcccgctgcgaagagagatggaacatcattagacggctccttgaaaacgtgtacctacgtgcagaaactacgaggcagccccttgaggcggcccggaaacgcaccaactccgcacgcccagcatgaccgggattccaaaccaggacgcgccctgccaacgcctgattcccaacgctcgccttggcgacggagaaccacagggcccaacagaccggaacgatagaagacaccacagaaaagccatatacaccgcatggcagagaagcaattcggacacttgacgatacccaatatcgcacacgcacggaattggccaagcaaccgcctaacagaaaaaattagccttagaacaacagaagagcagcggcacccaacaacctggaacaaagccgcgatgagaccctacaaacagacccaagcagggcacacacagatgcgcccagacggtgatgcagcaaaacagcacccgagcaaaacgcaaaaacgaatgcgagcaacaagagagagatacactacgccacacagaacacgcgaaaaccaacccacacaacgacacaccactattgactacgcccagagtac

SEQ ID NO: 616533 - DNA, 792 bp, Homo sapiens
  misc_feature (20)..(20): n is a, c, g, or t
  misc_feature (25)..(25): n is a, c, g, or t
  misc_feature (39)..(39): n is a, c, g, or t
  misc_feature (194)..(194): n is a, c, g, or t
  misc_feature (403)..(403): n is a, c, g, or t
  misc_feature (405)..(405): n is a, c, g, or t
  misc_feature (411)..(411): n is a, c, g, or t
  misc_feature (625)..(625): n is a, c, g, or t
ccgggcaggggacacttaanagacnagaatagagcctgnaacatatctgaacacacagtagctaagacccaaactgggattagataccccactatgcttagccctaaacctcaacagttaaatcaacaaaactgctcgccagaacactacgagccacagcttaaaactcaaaggactttgctcgagggggatancccacaagaggagcctgatctgtaatcgataaaccccgatcaacctcaccacctattgctcagcctatataccgacatcttcagcaaaccctgatgaaggctacaaagtaagcgcaagtacccacgtaaagacgttaggccaaggtgtagccaatgaggcggcaagaaatgggctacattttttaacccagaaaactacgagagccctnanggaacngaaggggcgaaggtggattaagccagaaactgagagtagagcgctaaattgaacagggccctgaagcgcgtacacaccggcccgacacccttgctaagtatactgcaaaggacatttagctaaaacccttacgcatttatatagaggagatcaagcggaccatggaagtgaactggagtgcactgggacgaacacaacaacaaaaaacctcaanaaatacctggtggccggctagggccaaaccgatttaaatggagaaagttatgcatggcgggccattttcagctacttgggcaattgacctatagggagtcggttaccatcactggccgggtttcaaaggagtaatgggaaccctggctgaccaataaaagattgcaa

SEQ ID NO: 616534 - DNA, 213 bp, Homo sapiens
gcccttgccttttgggaatgaccaggagctggtcatgggggggagagggggaaccatttccttggggcagggggttccgggggccccggggggtgggggggttcccatcacgcaaacaggaagggggtttgggccctttgatcaactggaacctttggatcaagggggggaattccctttttcctttactcaaaaaaaggtacatccccctga

SEQ ID NO: 616535 - DNA, 475 bp, Homo sapiens
aaggtggagttggaaagaaaagtgcagtataccattcattgtaaagtgtttccaccataacagatacagtagacaaaaataactcccagaacataatgatggtaaatatacagtcaaataattaggaagtgatgagttctgagtatttactacttttgttttaaatatagctttatttatttatttatttattttagagatagagtcttgctgtgccacttgtgctggagtgcagtggcacaatcatagctcactgtaacatcaaactcctcagctccagagatcctcttgcctcagcctcccgagtagctaggaatatgggcatgccactacacctggctcatttaaaaatttttttgtagagacggggtcttgctatgttgcccaggctggccttgaactcctggcttcaaaggatcctcctgccttggcctcccaaagtactgggattacacacgagtcactgcacttggcc

SEQ ID NO: 616536 - DNA, 348 bp, Homo sapiens
tttttgtttcccagttttgacaacctcgccatgaaccctcctagaccctcagttcctgcaataggaaggtgggtgccaaaggccaggggggtccctgaaaacaaaccctgcattaaaaaaaaagttcttgggggactccttaagcctgaggcacccttggggcaccagggggtcatggtttccattggaaaggtaaggggggtttttggtttcccgtttaaaaaaattaggtttttactggggtttttgccaaacatttgtttttgaagccccctaaacatttaggattgccgttttttatttgggtttagcaaacaagcattaagggaataaattgttcccctttca

SEQ ID NO: 616537 - DNA, 644 bp, Homo sapiens
atactgagtgggcctttaagaccatgtgacccagaaggcctacccttgaggggaacgtcacgtgcaacactaaggagaatccaggcctgagggggaggtttcctgagaactccgtgccccaggctggcctgagctgcctgggcagaggcctgtgcttggcaacaggcattgccgtggcctgcagctcagagggtcactgggactgagggcgatctgtggcctgaaaagcaaatgcacagttagtgcagctcctgaccaggccttcagtggtggacatgatgtggaggatctgtgtcatggcagccacacctgggcctggccttgctccagggacactgccatgacgtgagcttggccttggctcctgtgctctgccctgccctccatgtgatcgcagtgactgtgtgtgcttggcgatgtggtagtcgacttgggtgacacatgtgtgcagtgtgttagttgcaggaccggaagggtgaggtggcctggtcctcggggctcctggcctgggcttggctgagcgcaggactctgccaaaatgtcccctgccaggcctcatggtggtgctcctggtggcagtggctctctggccgcgggccctgtctgtgtctccgtggtggctctcacagggctctccagacact

SEQ ID NO: 616538 - DNA, 181 bp, Homo sapiens
agtgagggtcgctgtctgccccttgataaaggccagattgttttggaagttccaaagttgcaacgatttttggctagggccccgaggtttacttgactgttgtgtgaaaagctgataaaaaaaccctccagaaaaaagctttttgttttacaaacatgaaaataaaacatgtaattttgga

SEQ ID NO: 616539 - DNA, 1737 bp, Homo sapiens
  misc_feature (102)..(102): n is a, c, g, or t
  misc_feature (285)..(285): n is a, c, g, or t
  misc_feature (373)..(373): n is a, c, g, or t
  misc_feature (403)..(403): n is a, c, g, or t
  misc_feature (406)..(406): n is a, c, g, or t
  misc_feature (414)..(414): n is a, c, g, or t
  misc_feature (691)..(691): n is a, c, g, or t
  misc_feature (768)..(768): n is a, c, g, or t
ctgtgtacacacctggttcgcacaggacagtacccaaagggtgtgcaagactgagtagagttcatggttctgtcatgttggctcatcggtgaccagagcgcnaaaggaggcatagctgcatgtgcctgtcatgggcgttccaggcattaactcactagcgtcgaactgcgcgcctgcgcggggcagcgaaggtcgtctgacgaagtggtgctactgctacactatactctagggacagccatgccggcagaaagaaggacaatcatgctgtgacagtccgctcantgcactgtgacactagcctgtctcgagaaggatgcgctgctctgtgtctcacacctgacagtgtgtgtgtctctgtatccactcagantggtgtcagtcaaggcccccgtgacaacantgnctgcaccncggtctgtctcggcgtcccacatcatagtccgtgtgacaagagatagtgaccgatgattgtgacagactccgtgacttggtcgactctcagcactagacacaggactgtgtcccactcgtcatatggcatctcatccttcgttttttccgcagggcaccacttctttgtagacagctttgaacgctatcataccgagaggcgcctaagctggggcgggaagttcgtctggattagccccattcgcgtgttgtcttcgtgccaagggccccagcgcanactagttgggctagggtttgatgctaggcccaaaggcgttgaccctttctctggcttgtgcgccgcatggagccccnccgggcatccgtttgtgggccgtttggaccgcggtacgcccgctaggtggtatggtgggttggatcccaccccaaggtggggggtcccctccgtattccacccgacccggatcatgctcgagttgtatccctattgttgtctcgacaccgtgggtggccctttttttgggctcgttccatgcggtccgattcctgcaggcgcgcggtatggtgcaggaaggccgcggttccccaaggcttaccctttgggatgggaccttcccattctttgccaggttggccgcagggggaggtcaatcccaccggcgcgggggggatcggtgtttcccctcttcgggaacttggcccaaggcaggtacaacctaggttagcagttgcggacgttggcgccttgtattggaatgccctcctctggcggcgaactaggtggccctggaaattaatccgttccagaacgccggatggagccctagagcttagctcgattccccaggggggaatctcggcatgtggttcccaatatgagaacccagagaaggggtctcttaattggaaagacctcacaattttggttttaatatcacttcggcggaccccacataacaaaacccagagaaactcgtatgcgtgtcacgctcgcggagcgtgtgtggagttccccccacaggggtaaccgtgcgtcacatacaacaacggccccgttctcggttgtaacgagttcacaagccccctgttgtggggcaaacccacgaaattgtcgaaggccacccccttgtcgcgactggcgagagttaggacgacagggccgaccacaaagagatgggttctcacagaggcgacatcactcactaggaagaagagatacgctgcacacagttgcgagcaggaagaagagaggagacatccaccacgagacaccagcgcaggcgcacgcacagcgcatgggtcatccaaacaggaggagacacg

SEQ ID NO: 616540 - DNA, 875 bp, Homo sapiens
tgtcaaagtgatcaacagtcggtttatgtagtatctttgatttttgagtaagaatgtggttgagtggatagggaggagctagcaagaagcagcctgtatcactcagcttaagttctccgttcccagataagggcaagccagtcatggaatcttgctgcaggccctccctctacctcgttccgggtcctaaaaatagggcccgtttttcgtacacagcccctcagagagacggagggactgtcacacatggtgcatgagtgaccgggggctgctgggcgtctgttctttgaccaaaacgcatccatccctgagaagagcacagagtcctagaggggcctgggctgggcatgggctgagcccctggtcttctctacagttcacagaggtctttcagctcaggtaatcccaggaaagaggcatcaaagctagaatgtgaatataacttttgtggaccaatactaagaataacaagaagcccagtggtgaggaaagtgcgttctcccagcactgcctcctgttttctccctctcatgtccctccagggaaaatgacttgtattgcttgaatttgctgcgctttcccccgcgtcacagcagtgcagcttttgggcctttattcttatagctggaaagagaacaaaagtaccacgcgtacaaacctgtatttaaaaagagagcagaaaagaccacgtgaaatttgcatctgtgcgcaaacatttcatccgtgtgtatgtgtatgtgtgtagagtgtgtgaagcacgccagttcatcgtatatatggggttgttgtctcattttggtctgtgattggtcccctcacctcgtgggcttgtgctcgggatcaaacctttctggcctgttaggattatacacacg

SEQ ID NO: 616541 - DNA, 111 bp, Homo sapiens
gctcggtacatgcggatctctgatacatgagtccagactccccgggccatttccctagcttcttgtgtgcggcagtatcctctgaagtcttgggtagcgaagcgagcagga

SEQ ID NO: 616542 - DNA, 819 bp, Homo sapiens
  misc_feature (529)..(529): n is a, c, g, or t
  misc_feature (634)..(634): n is a, c, g, or t
  misc_feature (692)..(692): n is a, c, g, or t
agggggagcaggaagaggggcagaaggaagaagaagagggggaggagaaagagatagaagaagagtcccacgaactgtctgggtatacagcaaatgtccatgaggccgggagagcgtttcaagatcactatgtaccgggatggcatgttagtggctcatgggtgactcaacagaatgaccggctcttacacaagagacgcgagttgtgtactgccttatgcctctggtttccatgactatagccagacatgcattcgtgtgggggacaatacgcacccagcagattaacatttccccaagaggaagaaaacaactatagcgcggagcacgagggacagctagtgagagcgagtatacacccgagtcttcctcaccgagagggaccctcagacagaggacgctcctatgcacacttgtgggcgaacgaggtactgagaaccacaactcttaggtggcaagagagcccacaatttggtgttgagagccatgctaagaacccaaagtggtgcacaacggtgactctctttcncaaggccatatttcttaacattcagtcgaaaagcactcttctgtggaacacacacacaaaccgtgggtgaagcacgtgcaagagaactttcttaagtgattcccncacgagcaggggacacaattccaactccacctctggagaataaggtccaagctgtgtnatcttggaactttgagcgcaagaacagacagcagctaacataagctgcagctgccaaggtgagcccaaactcgtgaggacactctcttaaatgtgtgcactccttgtaacacaattatttttccatc

SEQ ID NO: 616543 - DNA, 153 bp, Homo sapiens
gcggttgatctgaggatcccactagtccacggtggctagtacgctggatggaattttaatctaaatgcaatatgagaataagaaatttaatttcacattactccttttttaggctgtgccaagatggttaattccagccaaccgtggactagt

SEQ ID NO: 616544 - DNA, 317 bp, Homo sapiens
  misc_feature (302)..(302): n is a, c, g, or t
gcacttggccatgtctcttacatctccttacccagtttttacagggccgtgttagagccttcacccatggaacagtacaagacatgatgctactccgagaataccgacagctccaggaacagcagtccctactacccagcctctccccccaaccatcgcccctattcagcaagaagcagccagagggacaacgggcgcccctctttctatttacctatttaaaaggctgggaatgttagggaacaagttggcaccaggaacccctccccaccccaatggcagctgttccctttaccctggantattttggcaggttg

SEQ ID NO: 616545 - DNA, 302 bp, Homo sapiens
gaactagtgcagataccccagtacagcctggagccaggtagacttgctggatggctagacccacaagacagataacaatcactgcagcttgcttcacaggaagccacatccataggaaaagggcaagagtactatatcaagggaacaccccatgggacaaaaggatctgaacaacagccttcagccctagaccttccctctgacagagtctacacaaataagaaggaaccagaaaaccagctctcgtaatatgacaaaacaaggctctttagcacccccaaaaaaatctcactagctaacca

SEQ ID NO: 616546 - DNA, 714 bp, Homo sapiens
  misc_feature (1)..(1): n is a, c, g, or t
  misc_feature (284)..(284): n is a, c, g, or t
  misc_feature (306)..(306): n is a, c, g, or t
  misc_feature (320)..(320): n is a, c, g, or t
  misc_feature (330)..(330): n is a, c, g, or t
ngtgtgtcatccgtgatcactgccaccaccacgcaggcctggtcagtaccgtctccattgtaaacaacatctcgctctgggtagaagtcgtagaccaggcgcttcagtttcttctcttctactagggcctggtggctgctgaccaccacagagggaggatcttgccggtccaggatacttatgctgtatttcaggtatttccgcagagtcgcaggcactcctcctccaggtaagccttggcccgctgcacgtagactggttctgcctcccacttctgcttggtnatctggcctgctgggtcgaagnggacccaggctggnatttctttgntgaattcaatgtagtcctttccatcatagtatattccagaaccctccaagcagacacaatggtaagaatggtgcctgtcctgctgtctctgctgctgcttctgggtcctgctgtcccccaggagaaccaagatggtcgttactctctgacctatatctacactgggctgtccaagcatgttgaagacgtccccgcgtttcaggcccttggctcactcaatgacctccagttctttagatacaacagtaaagacaggaagtctcagcccatgggactctggagacaggtggaaggaatggaggattggaagcaggacagccaacttcagaaggccagggaggacatctttatggagaccctgaaagacatcgtggagtacttaca

SEQ ID NO: 616547 - DNA, 1019 bp, Homo sapiens
gcttgttcggatgctgacgctctcttcctgtcttagtggctccggaacaggcgtttgggatgcctaacgatgcaggctgctgtcatttgtggatgtggctctatttgctgtccactcaagcagaggaaggcagccaggctttcggcttccaaatcactgctgaacagatcacgccgctggagggacgcagcacctgaccttgcagtacaacatctacacatgttggcatcaagtgctgcattagcacgtggaactatctgcatgcattccttccctccagaagcacttaggcatagtgtctggcaatgctcaatgtcaaatgggcaccggaattgcccctgctagcaatgtctacccacactgtggtcctgcgcactctcaaggctggattatttcaacttcacctcggcaacaattacttacctggaccaggaggcatgggcccgttgtgattggtctaccagtggcacgcatggaacacgggcggaaactccttggcttcagacgggagtaaggcacaggacgaatactaccacatcaataacagggaacgcaggacagacctacgagggtcactgcaaccctcccactccatcggagaataccaactcgacatggagggacactcacagggaaacgcgggacacatactgaacaatccccaaaagcgacggaaagcacccggataggcacgcccaccaaaggacgctacatcatacccaaggaacatcagggccacgtctcccaagaaacaccaaggtgccacacaagaagaccacaaggggtactcgagaaaaggaaaagccgcacgaacactactaaaagccccaggggggccacatctagatcagggaatacatgaccgagggacataacggccacaaagggacaggaccaagcgccaaggagcaccaggaagaagccaagcatggaaaaccagagagaacagccaataaaagaagcaaatgacaaatggacaaacacccagaacgatcaagagcagcaccgcgaaagggaca

SEQ ID NO: 616548 - DNA, 157 bp, Homo sapiens
atagctcctaataaaattttattgagaactagtaagtcaaatacttacagaacatagaatacatatgatcccagcctttcccattaatgacacatacattggggtagttccctgaatatccaacagttagttatattagagaacagtcgtcagctat

SEQ ID NO: 616549 - DNA, 201 bp, Homo sapiens
cgtatttataggtagaggcgacaaaccataccgagacctggatgatacgctggttgtccaagaatagaatcttagttacaactttaaatttgcccacagaaaccctctacaatcccctatgtaaatttaactgcttagtccaaacgaggaacagctcttatggacactagagaaaaaaccttgtagagcagagggtaccga

SEQ ID NO: 616550 - DNA, 473 bp, Homo sapiens
  misc_feature (1)..(1): n is a, c, g, or t
  misc_feature (284)..(284): n is a, c, g, or t
  misc_feature (306)..(306): n is a, c, g, or t
  misc_feature (320)..(320): n is a, c, g, or t
  misc_feature (330)..(330): n is a, c, g, or t
  misc_feature (406)..(406): n is a, c, g, or t
  misc_feature (408)..(408): n is a, c, g, or t
ngtgtgtcatccgtgatcactgccaccaccacgcaggcctggtcagtaccgtctccattgtaaacaacatctcgctctgggtagaagtcgtagaccaggcgcttcagtttcttctcttctactagggcctggtggctgctgaccaccacagagggaggatcttgccggtccaggatacttatgctgtatttcaggtatttccgcagagtcgcaggcactcctcctccaggtaagccttggcccgctgcacgtagactggttctgcctcccacttctgcttggtnatctggcctgctgggtcgaagnggacccaggctggnatttctttgntgaattcaatgtagtcctttccatcatagtatattccagaagctcgctgctctgtatctcgatctcacaaccaacntngctgcatacgtgagaccgtactatcgtgtatactcacgatgtcgatatgtataccggactctagg

SEQ ID NO: 616551 - DNA, 157 bp, Homo sapiens
aagataagaacaataatcattaaagatcataataagaagtacaggtcttgaaagtaactatttcattatgttaaccaagtatttcagtagttcatgatattaattagctaaaatatcagtcaggagattgagcacagtaaagtgaaacactctgatt

SEQ ID NO: 616552 - DNA, 376 bp, Homo sapiens
gactctcaggatccccgacgagttgtccgagttagggtgctactgcttatcagtgtcacttggagctgtgtgccttattttgccccttactgtcaaagttagtgtcttctgttatggaaaaatgttcgtaatttattagtaaaaactacattggtcaacacccagcagatggtgggtgctaaagtggaatggatagagttaccctacacggaatacaaagtaattgctatcttggtatcatttaaagcgaatctatgctctaaagattccataaagaaaaaaaatgactctatatacctacatatacagggaatctgaaggtattattaaaagcaatgtaagaatggttttctttacttatgggcaattatggctt

SEQ ID NO: 616553 - DNA, 130 bp, Homo sapiens
ctgtgagccaggagttgacaccagcccgggcacatgtgagaccctgtccacctcctctgtgctgtccacctcctctgtgctgtccacctcctctgtgctgtccagctgtccacctcctctgtgctgtcca

SEQ ID NO: 616554 - DNA, 360 bp, Homo sapiens
tgcgggttcatactttaaataaacgctcttgggactcctgcgccaacagttatgataacttgatttccataagagttggggcttgaacaaacctaaagaaccgaaggagttcagatctagatagcagagaagtaagtctcattctaaaacattgtaactactgttagagtctaacccatgaagctgtttcagattgagtatctttgactgaattctataagtatatattgttcagagctgaaaatcaaatgttgctcgctaggttggctgtgctgtctcagtcggacattgagagacgccagcttccctgccgctggagaccttggtcctaagtgccacatgcattatgcgacccgcagg

SEQ ID NO: 616555 - DNA, 298 bp, Homo sapiens
  misc_feature (199)..(199): n is a, c, g, or t
  misc_feature (215)..(215): n is a, c, g, or t
atgacgcagatctagtgatgctgtagtccagtctgatatgaaacattggccctttatggtgcgtgaatgactgctggcatggcccaagagtccaagatagaactacaaggcgagagaccaataagcttctatccatgagaaggtgtcttctataggtactgacaaacgatgacaggaaatggcagaagcctaccttggnaagactgttaccaatnctgtggtcacagtgccagcttactttaatgactctcagcgtcaggtatcaaagatgctggaagctatgctcgatcatcaatgt

SEQ ID NO: 616556 - DNA, 409 bp, Homo sapiens
  misc_feature (10)..(10): n is a, c, g, or t
  misc_feature (17)..(17): n is a, c, g, or t
  misc_feature (59)..(59): n is a, c, g, or t
  misc_feature (77)..(77): n is a, c, g, or t
  misc_feature (90)..(90): n is a, c, g, or t
  misc_feature (249)..(249): n is a, c, g, or t
  misc_feature (302)..(302): n is a, c, g, or t
  misc_feature (331)..(331): n is a, c, g, or t
  misc_feature (337)..(337): n is a, c, g, or t
  misc_feature (362)..(362): n is a, c, g, or t
  misc_feature (401)..(401): n is a, c, g, or t
ttgggacccnaaactcntcctaggcccaagagaagaagcctggttctggccccaagaantctcctcccaaaaaaagnccttcccttttcnaagctattgtgtcctgaaaaccccagggatcctctctccatgctccctcccagcccttgaaagtcagtttctgagaacctcaggctctcttctgcagaatgggggtccatgcctgccccccaaggacctcctgaggccaaatgttccaactgccccatnccagcacttagtgtctttcaacaacaaattcctccctgatcacaggagcaggnatctttgcaggatggaatatggaagagcnccaggncaacccagctccatggggaggaatnccaggcctcacctccccacttaatccacccccattccantcagcttt

SEQ ID NO: 616557 - DNA, 287 bp, Homo sapiens
gggaccaggcgcactccatctctacacattaacacactattccgaggcgcgccctgtggactcatagcgcggatcccagagctctgtgaggccgagggccctgtagcaccaccgtgcctcaccctatagcccacaatgtgacatctgaatactacaggcagactggaccacctttcttccatgccccgagaatggtcacaagggcttcgttggctacgctggattggggctttgggtggattataatacccgggtcggcttgataaaggagaactttctttccctgg

SEQ ID NO: 616558 - DNA, 447 bp, Homo sapiens
  misc_feature (7)..(7): n is a, c, g, or t
  misc_feature (35)..(35): n is a, c, g, or t
  misc_feature (50)..(50): n is a, c, g, or t
  misc_feature (70)..(70): n is a, c, g, or t
  misc_feature (78)..(78): n is a, c, g, or t
  misc_feature (141)..(141): n is a, c, g, or t
  misc_feature (411)..(411): n is a, c, g, or t
gcccgcnttaaaaggtcctccctaaaagccttcgngtaccccaatttaancccccaaatacccccatttnaaaaatgncctttgtagcatttattaatgcaaataaattttcacctgagaaacagctttttccctgtaacnggaaaatccctataacaaattaagattaagaatgcagcccaggtacccatggcctcatgccctataatccccagcactttgggaggctgaggcaggtggatcacttaagcttaggagttcgagaccagccgggcaacatagcgagacccccatctctactaaaaattttaaaaattatctgggcatggtggtgtttgcctgtagtcccagctacttaggaggaggattgcttgagctcaggagagtgagtctgcagcaagctatgaatgngctactgcactccagcctgtgcaacagagcaagacc

SEQ ID NO: 616559 - DNA, 258 bp, Homo sapiens
  misc_feature (131)..(131): n is a, c, g, or t
gggaaaggttcccctgaggtcactctgaggccagggacgtcaacccaaggcctggtggtcaatgtgaagggctccgtgccaactggtcaactgtccttcacgaacatatccgtggccacctgagacctgcntccacgacccttccaggaagagccgagagttcgccccaacccttcccaggcccagtgtaaaaacagactcacaaggggcttcttggcctcagcttcatttgcgagagccccgaggcaggacacagag

SEQ ID NO: 616560 - DNA, 1236 bp, Homo sapiens
atccttcgtatattaggagccaggcctacacgaccagcaaccatgtaccaaggagacctgcagtatggtattagatcttggcaccacctactcttgtgtagggtgtatttccagcacaggaaaagtcgagataattgccactgatcagggaaaccgaaccactccaagctatgtcgcctttacggacactgaacggttgatcggtgatgccgcacagaatcaagttagcaatgaaccccaccaacacagtatattagatgccaaacgtctgattggacgcagatttgatagatgctagttgtccagatctgatatgaacaccattggccctattatggtaggtgaatgatagctggccaggcccaaggatccacgtagaatacaagggagagcaccaaaagcttctatccagaggaggtgtcttctatggtatctgacaaagatgcaaggaaattgcagaagcctaccttgggaaaactgtaaccaatgctagtggtcacagtgccagcttactttcatgactctcagcgtccggctaccacaagactgctggcaactattgctggtctccatgtacttagcaattattaatgagccagctgctgatgctaatcgcttaccggcttagacaaaaggatggagcagaacgaaacgtgatacatcttagcacccttggaagggtgagcactcatagcatgatgtcgagccctccaactattgaacgactggcaatcgcaagacggtaacatctaacaagacgacagaaacccacactcgacataccaccacacaataggacacacacaaagcgagaacccaagaaacagcacaatatcaatcacacaacaaattaatacaagacaataacagaacacacacgaatatatataaacaacaatcaatcttctctatgatacaactctatacatgtacactcttcatttccatccacccaggccatctgcagcatccacacatacaaaacaaagagaaactcactataacaacaacaaatcgaagcactcaatcatacgcacatatcaagcactgaccagacacccgttgactatgatagacactatagcacaccaaaaacaaatctaattcagcgccaaatgaagatagcagcagagacgtgcatatgataaacaaacaataatattgcatatctcgatagctagcaacgacactatctcattaactcaaaaagacgtaactaatacgatactatcagag

SEQ ID NO: 616561 - DNA, 289 bp, Homo sapiens
cagcgaaccagggcttttgtcatcctcaatcattaaagcgcagagacaattgcagctgcaaagcgtcatgcaagatttaggtaggcaggtcggtatcgacaatgtccaattgcgagtggtcggcgacaatcatctccctggtcgggcaaggatggcatacgatcctggcacagggacgtttctcatacgtcaatccgacatcctcaagaccaattggctggatgctcaatacctgtatcacgagatgatccacgccgaacaggatgtattgatggccaaagtagggcta

SEQ ID NO: 616562 - DNA, 267 bp, Homo sapiens
cgtcgacaatgtctcgaagatgaacagcgtttgcctgattatcctgggcacagtaattttattggtaggcctgttcatgctggtgggcggtggatatctcatcacccttggcggctcctggtatttcgcaatcgcaggtttgggtctaacccttagcgcagtcttcgtgatacagcgccgtctgatcggtgcagtgctctatcttgttgtgttcgcggcatccatcatttggtcgctctgggatgtggggttcgcgttctggtcgac

SEQ ID NO: 616563 - DNA, 275 bp, Homo sapiens
ccctttatatgcctaggtccagagatggagaccatcctggccaacatggtgaaaccccgtctctactaaaaatacaaaaattagctgggtgtgggggcgcgcacccgtaatcccagctactcaggaggctgaggcaggagaatcgcttgaacccgggaggcggaggttgcagtgagccaagaccattgcactccagcctgggcgacagagcgagatctctgtctcaaaaataaccgaaaaaacaacaacctaaaaggtgtgggctaagctcctag

SEQ ID NO: 616564 - DNA, 1522 bp, Homo sapiens
  misc_feature (401)..(401): n is a, c, g, or t
  misc_feature (457)..(457): n is a, c, g, or t
  misc_feature (802)..(802): n is a, c, g, or t
  misc_feature (806)..(806): n is a, c, g, or t
  misc_feature (810)..(812): n is a, c, g, or t
  misc_feature (814)..(815): n is a, c, g, or t
  misc_feature (818)..(818): n is a, c, g, or t
  misc_feature (820)..(820): n is a, c, g, or t
  misc_feature (824)..(824): n is a, c, g, or t
  misc_feature (1045)..(1045): n is a, c, g, or t
  misc_feature (1186)..(1186): n is a, c, g, or t
  misc_feature (1188)..(1188): n is a, c, g, or t
  misc_feature (1207)..(1207): n is a, c, g, or t
  misc_feature (1239)..(1239): n is a, c, g, or t
  misc_feature (1247)..(1247): n is a, c, g, or t
  misc_feature (1287)..(1287): n is a, c, g, or t
  misc_feature (1290)..(1290): n is a, c, g, or t
  misc_feature (1292)..(1292): n is a, c, g, or t
  misc_feature (1298)..(1298): n is a, c, g, or t
  misc_feature (1300)..(1300): n is a, c, g, or t
  misc_feature (1304)..(1304): n is a, c, g, or t
  misc_feature (1306)..(1306): n is a, c, g, or t
  misc_feature (1315)..(1315): n is a, c, g, or t
  misc_feature (1317)..(1317): n is a, c, g, or t
  misc_feature (1334)..(1334): n is a, c, g, or t
  misc_feature (1367)..(1367): n is a, c, g, or t
  misc_feature (1369)..(1370): n is a, c, g, or t
  misc_feature (1392)..(1392): n is a, c, g, or t
  misc_feature (1399)..(1399): n is a, c, g, or t
  misc_feature (1418)..(1418): n is a, c, g, or t
  misc_feature (1421)..(1422): n is a, c, g, or t
  misc_feature (1429)..(1429): n is a, c, g, or t
gttcgcctgcgtcgctccgggagctgccgacggacggagcgccgccgcccacgatcggacgccagtgccagagagaacgacaatgacccattcatccaacagacacaacgcacatgaaagactgcgacttcccggccgaggacgagttccccgaaactgagcgcccacaacaaccacagtggccaaggatgctgacccccgagctagtacgcgggagctgcgcgccaagagcacagccgaggcggcttcacagctggacggacgtcatccagacaggacagtggacaagccgggccacccgtacatcatgaccgtggagactgcgtggccgggcagaccgaaggaggtcctacgaagtgtgcaaggatctcttcgaccccatcatcgaggaccggcacggnggctacaagcccagcgatgagcacaagaccgacctcaaccccgacaacctgcaggncggcgacgacctggaccccaactacgtgctgagctcgcgggtgcgcacgggcctgcatgcatcctgtgtgctttcttgcacatcccccactgcactgcatgcctgcggggatgcgccgatgccatctgagaatgctcgctggtggaatgccctgtccatgcctggactggctgacctgtgcgggcctgatactactgctgctcaatgatgcactgactggatgtgcgtgatgcatgcagcatgctcatctgacgaccacttcctcttcgacaagcccgtgtcgcccctgctgctggcctctgggcatggcccgctgacttggccctgacgcccgcggtatctggnacangacnnnannacntncctngtgtgggtcaacgagtgaggaccacctgcgggtcatctccatgcagaaggggggcaacatgaaggaggtgttcacccgcttctgcaccggcctcacccagattgaaactctcttcaagtctaaggactatgagttcatgtggaaccctcacctgggctacatcctcacctgcccatccaacctgggcaccgggctgcgggcaggtgtgcatatcaagctgnccaacctgggcaagcatgagaagttctcggaggtgcttaagcggctgcgacttcagaagcgaggcacaggcggtgtggacacggctgcggtgggcggggtcttcgacgtctccaacgctgaccgcctgggcttctcagagntngagctggtgcagatggtgntggacggagtgaagctgctcatcgagatggancagcggcntggagcagggccaggccatcgacgacctcatgcctgcccnganantgaagncncggncnacacccganancagccctgctgcttccnaacatattgcctgggcagtgcccaccatgcacncnngatgttcgcgtctgggagcccntagcctngctgtagagacttccgtcnacnnttggtanagtttatttcatctgatgggtaatgatactgctgatgctgaaattaagactagggttatggctggccagaaatatagacaaaaaaacataggg

SEQ ID NO: 616565 - DNA, 287 bp, Homo sapiens
  misc_feature (14)..(14): n is a, c, g, or t
  misc_feature (92)..(92): n is a, c, g, or t
  misc_feature (132)..(132): n is a, c, g, or t
  misc_feature (142)..(142): n is a, c, g, or t
  misc_feature (157)..(157): n is a, c, g, or t
  misc_feature (169)..(169): n is a, c, g, or t
  misc_feature (216)..(216): n is a, c, g, or t
  misc_feature (250)..(250): n is a, c, g, or t
  misc_feature (268)..(268): n is a, c, g, or t
  misc_feature (272)..(272): n is a, c, g, or t
  misc_feature (282)..(282): n is a, c, g, or t
cagcttcaccctgntgaggtgctgcttttgcctccgtttcaccagtgggagaatgggcagaagcagctttcctaggaggattggggaaaaanccggcctgcctcctttttgccatttccaaattcaaggatnccgggggaanacccaggcctcaggnggcaaagcctgntaggggtccccagccccttttccagtcagccttggccgaggcccccncaggagacgctttcaggaaggatgagcattgttncagcaggggcaataaagnacanagatatgccnagaga

SEQ ID NO: 616566 - DNA, 617 bp, Homo sapiens
gccggaaggtatagcacatatcaataaccgaatggtctaccccgtgcgctgtaatgagctctgttggggcttcgggccgaagaccgatgcggtcgagatacgacataacctcccaagcaagaaggttttgatacaaccctaacagcaaattaacgggcaccatgcctgcaaagtcgtacctgtgcagatcggccgtataagcccccgtcattgttgcgacctgatgcttaacagcctcactaggttgagtggtgtgcagagaatatgttggcatatttttccttcgtgtcggagctgcactggtaaagcgttcagtgaacgtccctaatgcaagtcggaaatgtcctgtcagtcagtcagtcagtcagtcagtcgagtcagagtggctcgtggcacacaacggtttcccagcccatacctgcctcctcacaacacggtggtgcccgtcgtcccgtttcacgggctggatagcttcagaaagcaggtcagcactgaatcatcggaggttactagagtcttaatgcccgcacacaaatctatggtattacactgcactgattaaccgcttttgattttgaggccacgcacataatcagtactatcttaccttctatctg

SEQ ID NO: 616567 - DNA, 510 bp, Homo sapiens
gggtagggcgcgctatacacccgggaacagtttccacggttgaatatggacttccctgtgagccactcctctctgcagtacaagacagtatctaccagcacactgaataaatatcacccagccttctgtggcgctctactggtttcctgactgcagctacagacctcacctcaacattcactgtttccagttcctcagcaatgtccacaagtgtcactccatctgcccccagcatccagaataaagaaatctcaacacttgtgagtacaaccactaccaccagtcccactgagagaatgactctcacaagtacagagaataccccgacaagttacatcctgaccacctgtccagtgacatattcattttccccttccacgtctgccagcagtgactggaccactgacacagagagcatctcctcagctccagccatcaccagtacactccacacaacagctgaatccaccctggcacccactaccaccaactcattcacaacatccgcaa

SEQ ID NO: 616568 - DNA, 351 bp, Homo sapiens
gtaaaggagggttcctgtccaaggcctgggattacatccgggagttgggccagaccaaccagggcatgcaggagaccttcaaaaaggccgagcggctgcaaatggacaacgagctccttaggcaccagatcgaggagttgaaaaatgagaacgccctgttttgagcccagttgcagcagcccaacctggaaatggtgggcgagggcccccggcagtgaggcccgccacccccacgcagccgcggccgcccacgcgggcttttggtgcccccttccccagccattaaaacagaaagggacccatgcccgctccccccaataaaataaagtttttttttctttccccaaagga

SEQ ID NO: 616569 - DNA, 821 bp, Homo sapiens
ttgggaggctgaggcaggagaatcacttgaaccctggaggtggcggttgcagtgagcacagatcatgccactgcactccagcctgggcaacaaaacgagacttcgtctcaaaaaaaaaaaaaaaaaaccatagaaattgggatccttgggtcgggttctcccaaattcttttggaggtgtccagggtcaactggcttcagcttggttttgggcaaccccctgcccgaagtcgcatataggctggttcttcacctggtttccaagggctgaggaacagaaagtagcctcttgttttggaggaggttgggaagttaagtatacatttattttttactggtgactggttcaggaccacattttacaaaatgccttgtttccttcatggtttctgggaaaggaaagttctattaatatggtttcacttggaatatagaatagttttttaaattgagggcttatttggaaaaattctggagtttaattcaaatggtttgccaataccttccaaagtaggtaatattcagagacagttgtggtgatcagatggttagagaaatttgtgtaatattcaattcgaagattccttattaatgaatgtctttgacttaattttaaccaaatagtgggacattattctgtgtacattttccttatttagtggttaacacggttagtgcaaccaataaattcttaggcaatgtgttacctggcttctaaattggaaatgtgttaattcaatactttggtggagtgtttaacattccaagttacttgttgaaattgggcttaaaaagcaaggtttgttaattagaggttcttgg

SEQ ID NO: 616570 - DNA, 1059 bp, Homo sapiens
tcgacgcaagcagctggatctccgagtaactagagacatagggtataactgttgtcgcggcgtgaggaagtgaggacggcgccaaggtgccttccgggccagtgttggatccctgtagtttagtgaagatggtgttgctaacaatgatcgccctgagtggcggacgggctcccgctggccgcctcgatgcaggaggacgaacagtctggccgggaccttcaacaatatcagagtcaggctaagcaactctttcgaaagttgaatgaaccagtcccctaaccagattggtaccttggcaagcaaggagaccctggaattatatcacatagaatatatatgtgacacaggggtgtgtgtatataggggataaatagtgtagaagagtgtcctataccataaggaagttaggactatatagcctaaccgtagaagattctgcactcacgaattatgatgacacagcatggcacagaaggtgcccactgtagtcccgagacctattcctttatagaactttgatactttacatgtcagacaaaccaaggaagctctacacttgacagtcgtgctcgaagcaaatctaggctccatcaaacaactgaattgccacgatgtgcagaggatcatggtgagccaagattgacccgacagtgtgcacacgacgcagacgccacgtcatcacgcacttgcgattccacagggctaacagaattgctccaagatcttgcccaagaaagaatcggacaggaatgcgaagctactgtggaccatgcgtacccgtgtatggcaaactgacagacagaagcatgaattaacccaggatagaagggaaggaccgaaccggcagccggacaagaggagaccgcgcagggaaggaaaaacatagaacaccagggcgataacggcagaaaagagaacaacaagacaagaaacgcaagcgccggacacaaagcacggaaggagaagaaaaaaagagagccaaggagacaccgagtgcagcagcgaggcagcgcagagccgcaatccgagaaagaagagacgacacaagaaaaggagaat

SEQ ID NO: 616571 - DNA, 138 bp, Homo sapiens
gtgtaagggggggggggcttttttttttccctttattttctttggggggggggggggttaaaaaaggcccccccccttttcccgggggccccaaaaggggtttttttttttggtaaaagggggtttttttttccccca

SEQ ID NO: 616572 - DNA, 334 bp, Homo sapiens
gccgcccctactgtgaagtgaggagcccctctgtccggccaccaccccgtgtgtgaggtgtacccaacagctcatatgagagcgggcgatgatgacagtggcggctttgtggagtggaggtggggggaaggtggggaaaagattgagaaatcggatggttgccgtgtctgtgttgaaagaagtagacatgggagacttttcattttgttctgtactaagaaaaattcttacccttaaacttaaagtataataaaaaaaaaaacttcagttttctaaaaattatatttttgtaatcagatttcagacattaagtgactgtgtctgttcgggtttg

SEQ ID NO: 616573 - DNA, 207 bp, Homo sapiens
tattgaaactgctgggttgggcactttcattgcaactatatgcctggaagcgatgacgtgaaagctcatcaggctccactaggattgtttgggtgggatggcaacagtgtcagatactttccctctcctttttctcatagcaatgttgttatcgtgttataatacattaatcgaaaaaaataaatttattcttctttcgctccacca

SEQ ID NO: 616574 - DNA, 838 bp, Homo sapiens
ccatgctagtacgaggcctgcgggtttatagtcggcaccgagggttccgtccaggtaatagactgtgacaggaagagagcctgctgacccagtgctcagagcatgactctcgtactaccaactgaggtgggtatccactccacaggccaagtgatactggaatctagatatcatgtcatcacatgtatgaaaggaaattaatctatcctctggtgatcaaaagtcttgccgtccagtagattggcatgcacgagatgcattgcatgcaggtgacagaaccacatgctgaggaacacctgaaaggtgagctttctacgagaagtgacacatggtcgtaaactatagaccttaagtatacacataatcatttaattgctaaccacgagatggagacataatacagtgtgtgctgctggtactagtcctgtgggcgacactggtgcagagaaaaattttgcccaccagtgagcactaaacagtgcacagtagttggatacactaccctggtgttagtgaagctgactgcaggagaacactctatcttctactgctccttttgctctggaacctgatgcaagcaggaactagtaaggcgtatatgaatttacacaccagacaatctacatctctagatgtgagttaataccattatgattgtcagaatttcagtcttgcaacctaacttcacaagcagtactcgatacatgaccatggtaaatttcgcaccaagtcacatagtggtcggtcgtgcacgttgacatagaacgggccgattggccgctaacagatattactcttgactgagcctctacttataacactcgacagcaaaggataa

SEQ ID NO: 616575 - DNA, 117 bp, Homo sapiens
catgcccttgctgcgcttgtgagtggcgactggtttgacggtgctgctgactgtgcgactcactgctctgtcttgttctggttggtgttactcagacagctgctgctgctgctgagc

SEQ ID NO: 616576 - DNA, 751 bp, Homo sapiens
ttgttccccccccccgcggggtgggcgcggcccagataccgcccccccccctctctctctcttaaggggggccacacccttttttcgggcgcactagaccctctcttttccccctctcagcagcgggtgggtgtgtaacaccacaccccaccctactaagtgtttgtgtctctctcctagagcaccctctctctcctcatctctctctgctctctctcagcgaggaggaggtcgcaggtcttttgtgggccgccgccccctccctgggggcgtctctcttctgagagagtgcctctctcgattatttctcttctctctgtggtgtgtgtgtgtgtgaaggatgttccccccacacccccgcacagagtctgttttgtgagggggtgttctctctcctctctggagtgcgccctctctctctctctctgacagcttgtctctctacacagaggagatcttctcgtgtcaccccccacgtgtggtgctccccacagccaccgctctcccctccgccccccgcgcgaggagatatctctgtggcgtgaaacacatattttctcccggcccataaagatagccctcgtgccctctgtgagaaataggccccaccagtttctcccccccccatcttggtggcgttttccccggcccccttggtggaaaggcccaattttttccccccccccctttccccttaaaaaaaataaatttttttaaattaaaatttataaccccactttgggccccccca

SEQ ID NO: 616577 - DNA, 151 bp, Homo sapiens
gcagagcttaattgaagtcttaagcgatgagagaagtatgcgactgtagcctcggctgagacctagatgtagtagctggagtataccttgagccattaggtagtgtgctgtagttataagcgggcctcttgcaagcggatggcaaggattg

SEQ ID NO: 616578 - DNA, 152 bp, Homo sapiens
ctagctattgtgcctgcatgtcacttagtgagacaggacttgatatttccttcagcctcctgagtagctgggactacaggcacccgccaccacgcccggctaatttttgtttttttttttgtgttattttaagtaagagacgagttttctcc

SEQ ID NO: 616579 - DNA, 1143 bp, Homo sapiens
cgagaggctgaggcaggagaatggcgtgaacccgggaggcggagcttgcagtgagccgagatcacgccactgcactcaatgcctgggcgacagagcgagactccgggaggcggagcttgcagtgagccgagatcacgccactgcactcaagcctgggcgacagagcgagactccgtctcaaaaaaaaaaaaaagaaatttcttactagagagaaacccttacaaattttaaagaattgtggcaaattctttaaaccggtcttcaaccttttacttaaacattaaggtaatttcatactggagttaaaacttcttacaatgtttgaccgaattgtggcaaatcctttttcctggtcctcagccctaaccagacttaagaaaatttcatactggacagcaacccttacaaacaggaacacattttggcaaagccttttaaccagttttcacacctttactacagataagataactcatattggagagaaatcttacaagtgtgaactaatgtggtaacagtctataaaaagtcctgaattcttaacagacattaatatttattcatactggagagaaactctaaaaacctgaaagatgttgccaccgccttttgacaagtcaaacttttctaaacattcacgaaaatcatgctgctgagaaatcctagaccttgtgacaatttgtgcaccaagcctctaaatgattgtccccttgatcgtagctaacgaaaattccatactggggaaaaattaccggtgtgtcacccactgtgtgcccagccttttgacctattggtcccgcaccttaaggaatggaaaacgcttatgcctgacagacacatgtgcacactatgtacacagcctataatgcgggtccaagtgcgtcactacaacggcgactcaaaaagaaggtgctacctgagcacgcctatgccacaacttttttatgacaacagcttttgcaagcaccaacaataacggcggcatagacaactcagcaagggaagacatctgcacgcacaaaacaggcgacgggccacaccacacgccggtcgcgcaatactaagcaagcgaccagcaacccacacagtcagtcagtagacaaccacatacactagagtcctacagcaagccgaacaccaccg

SEQ ID NO: 616580 - DNA, 210 bp, Homo sapiens
atcagtccctcctcctactgtattcgagcattggtcctggctgattcctcttgtgctagcaccatttcccgctctgcagttctctgtacacttactcttggtttattctccctgattggatgtgagaacatgtcaggcacgggatacctcttctcgtgcctttgtttaatttgttccctctgtctgggactccctagtcacctccggatg

SEQ ID NO: 616581 - DNA, 142 bp, Homo sapiens
ttttacagacacctcccagcatatagcacccatagccatgcggaagcaaccagtgtataggagatcctccgtgatgtgattctgaagaaagtctgtgcaaacccttgaaattttccactctctctgacagaaaatattaaga

SEQ ID NO: 616582 - DNA, 737 bp, Homo sapiens
  misc_feature (1)..(1): n is a, c, g, or t
  misc_feature (18)..(18): n is a, c, g, or t
ngtgttaatattacctcnagccccttccttctttatatattgcgtgcgtcgctttatatcctttcttccccccaaactcccggtgatctcgtatactcctagtgcgcccctcatccgagtattcctctttgttagctcgagagtgagacatcccgtcgctccctcgcaataaatctctgtctcgttgattgaaagcgcagctcaccactgtttatcaccgagaggttaccatcgcacttctgcaccgcggtccctccgcgacacataaatattcgccctgcgggagatattcttgcgccctcacatatttccgcgccccgcggggacgcccccaccacttgcggagattatcgtatatacccccgcccgctatatgcgcttgggcgccctgtatgcaccctctctccgccgtgtatgtacttcgcaccacgaacccgtgtcgttgtgctcgcgctgacccacttctctgcggcgcccccgcgctttatattcctctctatcgtggcccttgcgccggtggtctgttttaatatccccctcttatgtggcgagccccccgtttctctggtaaacatctcggttttacccccctcggttctcaacactctctcccccacatcttgtgttctctcacccgctatttattcccgcccaatttttccgcccacccccttttgataggcgctaccccaaatgtacgcgcgcccaggtctccccaaaattacaaataacaaaca

SEQ ID NO: 616583 - DNA, 207 bp, Homo sapiens
ctatatgtggtgttaccgtcagatagaatattatgattctaggacgacaatcatctaagataataagataataagagatttttttattagtcaatttcagttccacttgtggtatccagatgtttatctgcagggtcaggtggtacgtgataaatccagcagttgttcaaattcggggtggtggcaaccacctggcataggtgtatc

SEQ ID NO: 616584 - DNA, 1748 bp, Homo sapiens
  misc_feature (415)..(415): n is a, c, g, or t
  misc_feature (527)..(527): n is a, c, g, or t
tggggcaaaggaattttaaacctgtaaattaaaaaaagaaaacattgttcacacagaagaattatctggcgttggagaaatcaaagaacattcaagaaggtggtcaacaaaaaaatttttcaacaccccaaaataatggataaacaatagatggtatcctctggtgaaaaatctgggactaaaactaatctcagtccattcagggtttattcagtattccaagagccatggaagcggacaacaacctaaagtcatcacaaaacattcaacaaaacagaaaaacaagggagatccggaaaaacacgggcggcgaggtgagcgcgcggagccctcggcggtgggaacgccccggaccagaggggcccacgcgcagggggtggtctatgaggcatcacctcaccacacctttatccgnggagagaccctctaaggggcgcttaacaaaagcgcctctatgaccagtggagacccgtggcgctcaagagtgatggggcggagaagatggatgacatcatatatatataaanaccttcgagcgcaacaaaaatgtgtctctccacaagaaatatcagtcagtgggtcatctcacaagcgcgctactacagagatgtatataaacgcggcggggggaatctcataataagtgagggtcgccccacaaggtggggggggggcgaccaaacaaggcatcacacaacgggcgtgctggggagcaaaggcgcccatccacagaccgatataaataggagagaccacaggcagtgtgggggaaacagtcatcaagtaagaggagacacaggggggaggggaatccacccactaccgtgatggggaaaacaaagtagaaaacccaggagggccgcccactatttgggggggccacatagtgagttacacatcatagactgcaggcgaccccagcgagggtatgtagtagattcacaaacaaaagggagagacaacacccaaggcaaagtgtgatcttgccacaagatgtcacaccggcaacacaccaagtgaggggcggggttagcaaacaaccccgaacaagaggagagaggaaaggctaccaatcactagtgggggggcgactcccaccccacaccaacaagcgtggggggatacaacacaggggcgtagtatcgacgcaccaagcaaaggaacaacaccattgaaaaagggaggaccacacactatgagtcgatgatacagtagaaggagcaacacggtggagcagtgagatcaactggacgaaagcaaacgggagcaacaaccacaaagagaacaccattagtcagtgagaaccagacccgagcgactaaaaacacacctcgcgaggagaaggatgcgtgtaagagcaaaaagacacgcgtgggcacccaagtggggagaaacatgtagtccaacccaggctcgacacagagaggtaggagagagacaaaaaatatatccccaacaaactgtggagtacgaccaacggcgtgatacaagaccacaaaaaaattaccacctacgcaacgagcaaaacggtgcaaacaggaagactgtagcgcacactaccatgtcggctgccaacgagttcgaagacgcaaacagaacaacaagaagtgaaccaacagagcaggcaggagaagaagaagcacggacgcaggaggacagacagatgacacgtagagagactagcaaactagaaaaccttgcgtctgcgcggccgctgcgcgcctccctcgcctctcctagcccctgat

SEQ ID NO: 616585 - DNA, 393 bp, Homo sapiens
cgtcgacgttggattggacaagctaagaaggaagcaagctggataggcttgtgatcgctgggcaggagcctacagctcctctgcccagagtaggataaaatttgtagttctcagggattggagagatcactcaacagttaagagcacttactgctcttgcagaggatccacgttctgcgcctggcgctcacgtggtagcaagcaactattcacaattgcaattccagggtgtccgacacactttcgaccgggcactggatgcctgtggaaaacactcatccacataaatctaaatataaaatgaagctccccacttcgagattattccagggcccaccacctggagctcctcccacacacccacagctctaccctgggaatgctagtcgacgc

SEQ ID NO: 616586 - DNA, 966 bp, Homo sapiens
  misc_feature (18)..(18): n is a, c, g, or t
  misc_feature (223)..(223): n is a, c, g, or t
  misc_feature (248)..(248): n is a, c, g, or t
  misc_feature (252)..(252): n is a, c, g, or t
  misc_feature (265)..(265): n is a, c, g, or t
  misc_feature (287)..(287): n is a, c, g, or t
  misc_feature (375)..(375): n is a, c, g, or t
  misc_feature (387)..(387): n is a, c, g, or t
  misc_feature (394)..(394): n is a, c, g, or t
  misc_feature (407)..(407): n is a, c, g, or t
  misc_feature (411)..(411): n is a, c, g, or t
  misc_feature (418)..(418): n is a, c, g, or t
  misc_feature (420)..(420): n is a, c, g, or t
  misc_feature (446)..(446): n is a, c, g, or t
  misc_feature (585)..(585): n is a, c, g, or t
  misc_feature (606)..(606): n is a, c, g, or t
  misc_feature (611)..(611): n is a, c, g, or t
  misc_feature (617)..(617): n is a, c, g, or t
  misc_feature (795)..(795): n is a, c, g, or t
  misc_feature (821)..(821): n is a, c, g, or t
  misc_feature (903)..(903): n is a, c, g, or t
  misc_feature (932)..(932): n is a, c, g, or t
ccctggaaattaatcccnagcgtgcacctttagtttgttcagtgatagtaggacatcccacgagccatcatatattttcacgtttttatactcaatctactttttccgccatcttttgggaactatcccaagataatttactgcataagtgcatctatcttctaaaagacatttgggatatttcttagtctgacctctgccccctgagacactctataaaggnaacaatcagaaaaatttaacaaagnaatnaataggttaagangaaagccatctaggcgtttgcnctgggtttgcgacagtgccattgctacatttgagagctgtagttcttcctcacattttaactgagagccactagttatgttacttaanatctccccattngatgagncagttgctgggcnactnaaaagtncnaaatatcacaaaatcaaaaagttgcnagtcataagggggtttccgcatcctagcatgtgtgtgtgtgtgtgtgtgtgtgtgtgtgtgggggagggcgttgcggtgggccgttgcaattgctctcactccactcccccacctcctcctgtgtagtctgcctgcggngcccgcgggggtctctcctcngtgtngtgagngcgcgggccagcctcctgtgcaaaggtgctctgcagcgtcgtgatccagggattttagcatctgtcgtcgcttgcacatcctctcttacccctctgctatctggtggagttgggcgagggtctccagggcttccagagagtgtcgtttacgcatgtgacttgccatgcgctcaaactnaagcgccgccgggggacttactgatncccacctcggccctcctccactttgtcctcagtcttcaggttttcctttctgccgctagggcctaagttgtgggtcaccatnactcctcagcagacattggagtgcacgcntcgactgccgtcaccccagtgcttatcactgcct

SEQ ID NO: 616587 - DNA, 124 bp, Homo sapiens
cgatcctgtaacaccctcctgtaacgacagcctcctccgtctagaatggtttatatctgggatcgcgatttttcttttcttggtggcgctgttacgtgcggggctcgttaggcgtcgttacgga

SEQ ID NO: 616588 - DNA, 960 bp, Homo sapiens
gtgactcccagcaactccggacgtgtgcggcgtgagtcgcaggccatgttcctggttaactcgtcttgaagggcggctggcggcgcgcggccggcggcgaggcgggggcctgggtggggcgcctgggaaatgtgcttggaggcctgatcagacggggccgggggcggcctgggcggcaggcggcgcgcggcgctgcgcgttggctggaggcgggcggtgcacgcagccaaccgggccatgccgcatcctaggcggcagttcatcaggcgccaatcaagcgacgccgggctgcgccagtaacaacccgtgaagcccccccgtctcccctatgacaaatacagttactccaaagattggaggcgccaacagagaagtgaaggaagtctcccggacaagtgtcccgggacgacttctttggacacagcttggataggaagaatcgacttggacgggtcagggcccctcctcaactggcgttggctaattaggcagttcagccctggaagcacttcgggctcccactccacagggccgcaatctatgtctgcagacgaacaatacttggagggcgccatgttgaccccaacaaggctttggggtagcacctacagtactgtgttaacgcagtgttctcaacaatcgcagggggccacaatttttgcccttgggcggaatgttctcacctgggctctagggagcctcctacacaagcgcctgtccagggggtctcacaccatgtacaacaagggccttgtaaaacacacacgcggtaccttttccatggactgtgtgcacgcctagacttgttgtgcctacatgccacgaggggcatctcactagtaggggagacaacacagccctgcaggccttgacaccctcacgggttgaccaagggccaacaccaaactgggcgcactgggcccagggatgcaattcggcacggcgccacgagaaatatcg

SEQ ID NO: 616589 - DNA, 147 bp, Homo sapiens
tccggcgagcattggatctccaccagcggccagaactggtgcacctccaggcccgcctcgtcctgcgtgtcgtggttgaactggttgggcatgtgcgtcaggttgtagccgatgccgcggcacatgggcaccgtgatttcctggcac

SEQ ID NO: 616590 - DNA, 670 bp, Homo sapiens
aacctaggtaatgcctaatccaaggcttcccaacatcagcccgcacatcctgttcggtggggggtgtctaggacgtgggggtgcagttgtgagcttcgcgatgattttttccctctagaatctatgaggcttagtgagatttgtactggacggggtagctacgagtggttggcggcgaatctcgtgttgagctttagtttttaggatgtcgtggactgtttttctttgtttcgggcgtgagctttgctttttgagacgtatctctataaattttagcgggtatgtggtagcgtacgtctaccgctatgatgtcgcgcgaggcgatttcgctaccctgaggatttcctatattctatctattccctaatctccccccgggtccctactagccactagtctttttgctatctccctgattttatctccgtcaggaatcgtgtgattaagatcgcgcgaaatatgactttttcgagttaacttctttcgcctaatgaggcgtgtacgtatggaattcctccgtattattttaattgaatttttataactcagtgacacgcttcgttttgacgctacgtgttctgttatctaggtacccgcgatttgtaccctcgcctgctaggaagtgtcttaaattacttgcggaatttaagggttgtagatgggactactg

SEQ ID NO: 616591 - DNA, 197 bp, Homo sapiens
gaaggctgtttcctgggagaagctgttttttaacatcaatgcacacgaagcagccgccatgcgggcagtttaccaggcagctgcgctcagcccagcctttaaagtgaagccatttgtcgtccgagatgcattggtctaccccatcctggtggagttcacgagggaggtggaggaggagcctggtattcacagcctga

SEQ ID NO: 616592 - DNA, 806 bp, Homo sapiens
  misc_feature (609)..(609): n is a, c, g, or t
  misc_feature (708)..(709): n is a, c, g, or t
  misc_feature (711)..(711): n is a, c, g, or t
  misc_feature (715)..(715): n is a, c, g, or t
  misc_feature (719)..(719): n is a, c, g, or t
  misc_feature (722)..(722): n is a, c, g, or t
  misc_feature (724)..(724): n is a, c, g, or t
  misc_feature (726)..(726): n is a, c, g, or t
  misc_feature (728)..(728): n is a, c, g, or t
  misc_feature (732)..(732): n is a, c, g, or t
  misc_feature (743)..(743): n is a, c, g, or t
  misc_feature (750)..(750): n is a, c, g, or t
  misc_feature (758)..(758): n is a, c, g, or t
gggagtctgtgagggaaggagatgcctcttccttcccttcaatagtgggttaaacccagctggcaccctctggaactacgggaacaatattcttcaagagaaggtcactctaccaaagccaggagcacagtattctcaggatctcaacaaggaagagcagaccaagctatcaacattcaagcactgaccgaataagcttatatcaagataacactggaagagttactttactgataaaagatgtaaacaagaaagatgctggcgtggtatactgtgtcagcagttaatgaagctggagtgactacatgtaacacaagattagacgttacggcacgtccaaaccaaactcttccagctcctaagcagttacgggttcgaccaacacttcagcaaatatttagcacttaatgggaaaggtttgaatgtcaaaacaagcttttaacccagaaggagaatttcagcgttggcagctcaatctggactctatgcaaagtgaagaactttaataactttaccaacattggaaaacagcaactacaccattagtaatatatttgattacattttctgtgaaacttaatccatagctgtattaacagataatagttntaattaggtaatatagtcactatatatttataatattattatcctttgatcttgcacattctatggtacccctcgattgtgaagcctaaggaaatcggnntntggnttgnacngngnanatancttaaatcggntttcttngtctgccnttaaatccgcgtatcgtcacttaccccttgtggagcgggggccaaggc

SEQ ID NO: 616593 - DNA, 932 bp, Homo sapiens
  misc_feature (204)..(204): n is a, c, g, or t
  misc_feature (209)..(210): n is a, c, g, or t
  misc_feature (275)..(275): n is a, c, g, or t
  misc_feature (278)..(278): n is a, c, g, or t
  misc_feature (735)..(735): n is a, c, g, or t
  misc_feature (834)..(835): n is a, c, g, or t
  misc_feature (837)..(837): n is a, c, g, or t
  misc_feature (841)..(841): n is a, c, g, or t
  misc_feature (845)..(845): n is a, c, g, or t
  misc_feature (848)..(848): n is a, c, g, or t
  misc_feature (850)..(850): n is a, c, g, or t
  misc_feature (852)..(852): n is a, c, g, or t
  misc_feature (854)..(854): n is a, c, g, or t
  misc_feature (858)..(858): n is a, c, g, or t
  misc_feature (869)..(869): n is a, c, g, or t
  misc_feature (876)..(876): n is a, c, g, or t
  misc_feature (884)..(884): n is a, c, g, or t
cagatgattgcacaaaatgatagtgtctgagaagggtcttcattcactcatctttgaagctagtcagagcttcagatgcaggggcttatgcatgtgtcgccaagaatagagcaggagaagccacccttcactgtgcagctggatgtccttgcaaaagaacataaaagagcaccaatgtttatctacaaaccacagagcaaaaanagttnnagagggagattcagtgaaactagaatgccagatctcggctatacctccaccaaagcttttctggnaanagaacatacatgaaatggtacaattcaagcactgaccgaataagcttatatcaagataacactggaagagttactttactgataaaagatgtaaacaagaaagatgctggcgtggtatactgtgtcagcagttaatgaagctggagtgactacatgtaacacaagattagacgttacggcacgtccaaaccaaactcttccagctcctaagcagttacgggttcgaccaacacttcagcaaatatttagcacttaatgggaaaggtttgaatgtcaaaacaagcttttaacccagaaggagaatttcagcgttggcagctcaatctggactctatgcaaagtgaagaactttaataactttaccaacattggaaaacagcaactacaccattagtaatatatttgattacattttctgtgaaacttaatccatagctgtattaacagataatagttntaattaggtaatatagtcactatatatttataatattattatcctttgatcttgcacattctatggtacccctcgattgtgaagcctaaggaaatcggnntntggnttgnacngngnanatancttaaatcggntttcttngtctgccnttaaatccgcgtatcgtcacttaccccttgtggagcgggggccaaggc

SEQ ID NO: 616594 - DNA, 892 bp, Homo sapiens
  misc_feature (633)..(633): n is a, c, g, or t
cactcatttaattggatgtatgtctctcggattgaccaacagtatgttcttctcatgactaacttgatttgagttaagaatgctcactgtacactgaatgtcaataactcagctaattcacactgatgtgtcctgtgtaaacaatatgtagtccccgtccagtgccattcacctgtgaaggcagggttacagctgatgccagctatcagaatcactatgtttcacattgtggaaatatgaccaagtgcctaacacataattgcaaagtcatttgcgtactatggtatacaaaattttatcattacaaaatagtatcagcgttttttcacttaccggaaaatagatacatcttcattcaaatattcagtgcgtaaataattgccttaaatggagtcttgctgtggaatccgagagtttggaagagtcaaagggccttgtgaagacatttcctgttgccattctatttacttagatatgcagatagcttccacactgagtgggaaagtctacttaggtgaagtggtaaaatagtcactacgatgtctaaactagcgcactgatgagttgcctaatttgtcttctccaatcgataaccactggtgccatctgttcactacttactcagaaagacanttagctggatggttgaagtgtgtagtgcatgtgacgtattttaccgtgtttcggaacagatctggtgttctgtgtccttatttgcagactaagtgctctactgtggtcgtctgggtccatatccgattcatatattaccgcggggcgcccggtaaattaaaaacgtgggacccaccgattttctttcgcctattttgtggaaaaacaaaaagggggggggcgaaaaaatggggggaaaagatcacctgtgtaacacgag

SEQ ID NO: 616595 - DNA, 940 bp, Homo sapiens
gggagtctgtgagggaaggagatgcctcttccttcccttcaatagtgggttaaacccagctggcaccctctggaactacgggaacaatattcttcaagagaaggtcactctaccaaagccaggagcacagtattctcaggatctcaacaaggaagagcagaccaagctatcaacttctgacttccttacaaccttccgtaacttccaggcttgctggccccaacattcagggaccccaccacctaccaggaacaacatcattatagtaataatcttgcacattacatctatccatataccaaactaagcaatgtgataactacgaacgtccaagaacacttacatccagtacccaaaacccatgtggctccagattcgcagctcctggaccagaaagctccagcttctctagccagaccacaccagtcttccattatcatccagcaccgccagtgtacagagcacagatttctagcctcctcaaacactgagactctcacatcaccatgtcactcatctgccttccctgctactccccagcagcattgctggctccaacccaaggccacaagggttacgacccaccttattacagtacccagcaagcttcctcaagatccatattaccatcaccgcctgattacattagcagtaaaatcctaccgcaatggataccacttatcagcagacctacagtggcaaacctatcaatgcaatgctcgcaaatgaaattgcaagcgccgttcacaggaacttcctgaatactgcacattcacaggcatcatcgcagcgtttgtgtacgaattggcacagcactctcacatgttcaggcagccttttatcataagggaactcggtcacactttagtcgaagtgcgcacttgtaggcaccagctgcgggggtatcacccaacacccaggggccaatctgcatacacca

SEQ ID NO: 616596 - DNA, 1043 bp, Homo sapiens
cgccggcccgtttctctgctactctgcttctttttgtggttgtgcttggctttctctcctccgacatcgcggtgcgtttcgctcttgggcgtgtgtatgcgtctcgtgtatccttgttcggcgtgctggtgtgtggccttgctcgtgcggtcgcgtcttgctggtcttgctgccgcgctggccccctgcggttctcgtcgggcggctaggctcgtgtggcgaggtgccctaggctcgttatcctcttcgctttccgatgggctgcgttagtgactctcccgttgcccgttgctcggtgggacgtggtgccctgcgcaattgacaccctagtcccttccgtggtcacgccacgtgtcctctttcgattgtctcgcgtcgtcgtttcccctggggctatgtgctttgtcctgctcaattatgcaatgtgcgtcctcgtcccggctgtgtagctccctctgtgccacgccctggtgggttccgtggcgcgtgcacacgggctgtcttcgcatgggatgcccgcgtcgttgctcattccctatctcgtctatggttctgctcacctccatccccccattcattggccggacgtcctttggtgccgatacctgcgcgagcgttccatcgcagacccggcagtaccgaccattatggattctcgctcaatgcactcaggatgcccctcgtgttccgcttctccccttcagtgcccagagtccctcgcgcatgcctcagcgggtacaggcgtgttcagaacatcctgccacccagacacagtggtattataaatcccgctccctctccaggtcaacccccacccagccagccgaggcctgctccatccacccttcccgggaggcagccccgggatgctgcgagttggtggaggggccaggctggacgcttcactgtgggagtcccctccagacctggctggcgccctgcatccacagaaaccacgagtggccacagaatctcagtggttctcaaggactaacctgtgggggctagcaatagcgacataaccctctcttggcttcttagtt

SEQ ID NO: 616597 - DNA, 310 bp, Homo sapiens
  misc_feature (66)..(66): n is a, c, g, or t
  misc_feature (223)..(223): n is a, c, g, or t
gtgtggtgttctagaggatccctgggcgcgatccaggtggccaggactagatcataacgacagccnccctaattttggtccccacttccagcttgggacaaatcagagaaagccaaacataataaagtggcacaggatgccccatttctacttagcccaccggcagctttcccacaccagcgggcttcatacaaggcatacgggtgccttccctcttcccacngtaaagctttcccactcctctgcctgccttgggcctctgacaaaatgcaagtgatggtggctgtcagttatgaatctagtccgggcc

SEQ ID NO: 616598 - DNA, 224 bp, Homo sapiens
cattttcacaaattatagaagatggatttgttgggttaaaaagttcacatattttagaggcaattgatagtgttgctaaattgctccctagatcaatttccccgggtggtgtaggagggcgcaggaggcattttagcaaactaacctaagttaacatttgtaaagtgcttgaataatcctgggcacactgaaaggtcatatgtacatattaagtcaaatgaatt

SEQ ID NO: 616599 - DNA, 132 bp, Homo sapiens
tacttaaggatccctacaagaccttaacaggcaagctagggtggcagaagcaggaagcaggcagagcagggcagaagcaggaagcaagcaggaagcggagaagcaggaagcggcagaagcaggaagcagaag

SEQ ID NO: 616600 - DNA, 486 bp, Homo sapiens
gatcagctacatacaaatcataaaaatgctctgtatgacaaactgacaaacactcccagcctacgcctcccatatctgagtaatataaacacaaagtccctataccagaaaacttggacagttgaaataacttaacagtaactatattatatttataattattatgtatgtaggggaatgtattatgccaatgagctgaggcagaaactgtccaccactcatttattaattttacatttattttgcacacatctccaattatcattttcattgcatttttatacctatcatttggaaggaatctacaagtcaaaacgagtatgttgatcttgtataaaaaaaaaaaaaacaacacagaagtgtccagttttaatcaatcaacatattattgctgtaaaaattagagatatcatgaatacctgatggatccagtacattatatacagaaatgtgatctcagtcacttaatctgccaataatatacca

SEQ ID NO: 616601 - DNA, 472 bp, Homo sapiens
gctgtttctccctttggatcttccagattacttaattgaaactcattccatggctgggcatggtggctcacacctgtaatcccagcactttgggaggctgaggtaggaggattgcttgagcccaggaattcaagaccagtctgggcaacacagcaagaccccatctcaatttaaaaaaaaaattatttggggccgggtacagtggctcatgcctgtaatcccggcatttggggaggctgaggcaggagaatcacttgaacacagaagtttgagaccaacctgggcaacattgtcagaccccccatctctataaaaatttaaaaaattagccgggcattatggtgtgcacctgcagtgccagctactcgcgagacttaggtgggaggattgctcgagcctggcagtttgagactgtagtaagtatgaccacgccactgctctccagcatgtgtgacagagcaagccccatctc

SEQ ID NO: 616602 - DNA, 101 bp, Homo sapiens
aaacaatatacaagagccggagaacaaaatgaacgaaaatctgttcgcgttcattcatgcccccacaatcctaggcctacccggccgttaggccgatctga

SEQ ID NO: 616603 - DNA, 1054 bp, Homo sapiens
aaaagcaaagaaatgcttggtgggaatcggcagaggaggcgtgagtgaatggtgattgccagcgtggaggggctggtgacgttgctgggctggagaggacttcccaacatcgtcatctgtggcccactacgagcctttggagtggcccctgtgctgtcgctgggctgcggactccaactgggagcggtgtctctgtgctgctggagctggactgcctcttctcccggatctacacctacaagcgcatgcacgcctgctacaactcctgttctttgctgtctggagcgagtgcaagtttaactaccagtggaaccaagctgctggctggaagacaacctggaccacacagactccagcctgcttcagtgacaatgttggacttcgtgctgtgcctggacacctgtgggcctggtggcagcagcctgcacctgcacgtgtccaaggcctgcctcgggagtggcaccctgaagccactgccttcctgctgggagctggagactggttgtgcccggcaccagttacccttgagtgtactggttctccatggttggcacaagctggatcaactggcggcgtgacgtgctggactgggagcatgagcgcttcgacatccgccgattgtcctgccttcacgctgtccacactggagagcacgctgttgacggccagcgcgaccagaatcatggacgtgctggtcccggttgattctaaagacctgaccgtaaaagaggaatcattgcagatggcctgatcgaagtcatctaaaactgagtgagaagtcggagacccccagaaatgctggtgttcacagagtaagatgatcaagaagacgcagtggactcggtatgaagtgggacacaagcaacgctggacgtgtaattggtggcacgggcaggcgctactcatacaagtgtaacatcttgactgttctaagcctaaaaacacagttatgtaccagcggccaggttgcatttagcaactgaacaggtaagtcgagacagaagctaacgactgggaatgacacatgggaaacaaaaatcaagacattcttcat

SEQ ID NO: 616604 - DNA, 372 bp, Homo sapiens
tcaccctaataattatgaagggagaatgaagaagccatgtgaaagcaacttctagctgccagtcaggttctgctctgaaggctgcctatctgcggggacatgtgacttctggggcttccagattaagtaatgctcaccccacatgtctgaaattctccaaacactattccggccctgctgtgattcttcagagcagagtttctttgcctttttagtggtattgcatccctcgagcaacttgtgtgagcccttcttcagaatacagtttctaatggcagaagtgtccaacacatgtggataattacgggaagtcaatgtcctttagaaatcctttatcaaacaatatttttcaacatttgtgtgacatattca

SEQ ID NO: 616605 - DNA, 296 bp, Homo sapiens
  misc_feature (210)..(210): n is a, c, g, or t
ggatcccccgcttatcggagcggtacgcgtcggtgcactgacgtcacacagctggatcagttcgccccgctcgacagcgtcatgcaccaggctgcgccgctccagcgtgatgccttgcccaggcgaacggcttccagcaccaggttggagtcattgctgcataaacccttgcgctcgctgcccatctcgacacctgcagcctcgcaccangacaaccaggactcagtgttgtagatgatggtgctgtcgaccacctcctgcggcgtctgtggcaggcgcccaccattgaaatgagg

SEQ ID NO: 616606 - DNA, 2006 bp, Homo sapiens
cattaaaaataaagggcattcacccatatcattctctgagctataccagtggagacactgccactgattctccagtgcatgttggacgtgctgggatgccagtaaaggacagtccaaggaaggagagcctactcagctacctgactggaagcttcccaagcctgcacaacctcctggaaggtactcctcagagaagcagtgctgctgtgaaaagtagctccctaacgagaacaggaaatacagtagccactgatatgttatctgaacatcccttgctatctgagccatcatctgtgagtttctataattggatgtcaaatgctgtgggtaatcgaggaagtgtgttacaagaatctcctgttacaaaatcaggacacaatagtcttcccacaggtgttgcacccaatcttccaacaataccctcagcctcagatttcaacactgtcttgtctagtgaccaaaatactttggatgggacacattctcagcatagcaccagtcaggatgatgtggcaggtgtagaagaagcaaaccaagggtttcctgctgttcagcttgctgatgcacaggttgttttcaagcctcttctgagtcatacagggatccagtcacaggatacaatgccattctgctaccgaatgtactttggagaacacctttcattttcagggactttggactgcctcagagcagatattgtggattcagacacagccaaagagagaaaaggcaaaagagcaagaaggcaaggccatgtgaatcttcctccacttgagttcaaaccagcattaatgttgggaacctttagcatcagtgctgttgtaatggaaaagtccgtgtgcacccctcagaactctaccagtgccctttcttttcatgatctcagcaagcggtattataacacctttcactgcaactttactatttcctgtcagtcaataagccagcatgtagatatggctttggttcgtcttattcatcagtttagcacaatgatagatgacatcaaagcaactcagactgatattaaacttagcagatatacagccggatctgcttccccaacacctaccttcaaaaccagaaaacatcgggactttcgttcatctgactttagccgcagttctagaggaagtcttaatggtggcaatagagtaaataatgcaaagaacaaacggaccaacaatgagaataacaaaaaggaatctcgaaacaagaattcattaggaagatctgaaagaagaacatcaaaagtgtctaggaaaggttcaaaagatgtggtggatcacatgactattcatatggatgactctgattcaattacagtgtcagaacaaagtgagccttcagctgagtgctggcagaatatgtataaattgcttaacttctattcacttatctccgatccaacaggaatattggaaaagtcttcagaaacatttggaccagcaggagttcggagccctacagagccaacatgtaaagttgtgtttgagaatgaacaagacaacagcagtttgactaagactcagaggaaacgtagcttggtaacttctgaacctcagcatgttactctaatagtgtttgggattggcatggtgaaccgcacacacctagaggcagatattggtggactaacaatggaatcagaactgaagaggatccatggcagttttactcttaaggaaaaaatgaaagatgttttacatcaaaagatgactgagacttgtgctactgctcatattggtggggttaatattgtgctgcttgaagggattacaccaaatatacaactggaggattttcctacatctcctacaagtacagccaaacaagagtttctgtatgtcatattattctttttcatggctttgtaattactgtagtattgaatagtttttaaaatatttaaatttttttcatggctgtgaattatttagttattgttttgtagctgtaatataggcccttttatataatagattaaagcttactggtaatcaagg

SEQ ID NO: 616607 - DNA, 798 bp, Homo sapiens
gagcgggcctttagtgcgcgctgcgcagacttcgagcgtctacttccggtgtgtgcccacagtcagagggtcctgaagaagcaggtatatcggcctactggcatcccatgtacaagagcgggcgacctggtgtttgtcaatgatttcaggtgctatgcccacttggcctgtcgattgaatcagacgcatcatgacctcaggaccaaccgtgtaccagagtgtttttcattcgggatcccacgagactggccttcctgagatcccaaacgcctgttcccgtacaaggagtgcaaggacgaagttcggcaagcccaacaagaggcgcggctttcagccgcgggggctgtgggaaattcgaaaacaaccccatggtccaggcctccgatctgcccattagcctcagagaagggcagcggagacgggccttggccggagcccgaggccgcagagggcgacgaggacaagccgaaccacgctggtggcggcggcgacaaattggggaagcctggacgacgacaagcccactgaggaggagaaggggccgctgaagaggagcgcgggggacccgccggaggacgcccccaaacgacccaaggaggcagccccgagcaagaggaggaggcggaggcggagagggcggcggaagcggagagggcggcggcggcggcggcggcagacggcgtcgacgaggagagtccgttcctcgtggcggttgagaacggcagagcccctagcgaagccggggctggtctgcgaagccagctcagccagaggacgaggagctccggggaggaagac

SEQ ID NO: 616608 - DNA, 656 bp, Homo sapiens
  misc_feature (44)..(44): n is a, c, g, or t
  misc_feature (452)..(452): n is a, c, g, or t
  misc_feature (614)..(614): n is a, c, g, or t
  misc_feature (618)..(619): n is a, c, g, or t
  misc_feature (622)..(624): n is a, c, g, or t
  misc_feature (628)..(629): n is a, c, g, or t
  misc_feature (633)..(633): n is a, c, g, or t
tgtaatacacattttccatgaacttttgaagacctctcaatttnataagtatttttcttgctctcaatatttttcaaaatttctctttacttggctgttggctgtattttaatagtcttctttctctattgatagaactgtagtgaaatgtagtattgccaagtcccaagccctctacagtgcccaaagagggctgaagacaaacaatgctgctgtgttcaaagtaggagctatcagtatcaacattcctcagcaccctgccaccttacatagcatgatggttcgaagttctcaccaactatctaaacaaatctcagacctaatcagacagccttctacagcgtaagttattttatttgttcacattctgtgattccatatactacctcagggtattctttgctgcattaacaaaagtttggagggagatgaagggttacttctaagtatcnaccattatggacagtggagcaagaggagagtagccaattgtgatcatgtgagaatgacttttgaaagcattaaagtacagtgtcgtcagtgcaattgtcagtgttccatattgcataaacaaagcttaagagatcctagagatttgtgggtaatgttagagntacnntannnagcnnattngtgaattccaggaccatgtcaat

SEQ ID NO: 616609 - DNA, 135 bp, Homo sapiens
gtgggcgaccagcgcagcgaaggaggcctcgctgaagaacttctggatcggcgagctgacttcgccgttgtcggcgatcttgatgtaggccaggcccttggcgccgtacttggcggcatgcgcggcgtattcgtc

SEQ ID NO: 616610 - DNA, 193 bp, Homo sapiens
  misc_feature (144)..(144): n is a, c, g, or t
  misc_feature (163)..(163): n is a, c, g, or t
  misc_feature (178)..(178): n is a, c, g, or t
ccggtcactcgctacacccttttagtatgactttagtggcatctcacattgacatgttttcaatttcattcagtttatttttatttattttttaaattatttatttatttatttagtttatttgtgagttgtgtagaaattganacgttcaattttctacacntactgtttttatggnttcatcattggtgta

SEQ ID NO: 616611 - DNA, 2591 bp, Homo sapiens
  misc_feature (2217)..(2217): n is a, c, g, or t
cattaaaaataaagggcattcacccatatcattctctgagctataccagtggagacactgccactgattctccagtgcatgttggacgtgctgggatgccagtaaaggacagtccaaggaaggagagcctactcagctacctgactggaagcttcccaagcctgcacaacctcctggaaggtactcctcagagaagcagtgctgctgtgaaaagtagctccctaacgagaacaggaaatacagtagccactgatatgttatctgaacatcccttgctatctgagccatcatctgtgagtttctataattggatgtcaaatgctgtgggtaatcgaggaagtgtgttacaagaatctcctgttacaaaatcaggacacaatagtcttcccacaggtgttgcacccaatcttccaacaataccctcagcctcagatttcaacactgtcttgtctagtgaccaaaatactttggatgggacacattctcagcatagcaccagtcaggatgatgtggcaggtgtagaagaagcaaaccaagggtttcctgctgttcagcttgctgatgcacaggttgttttcaagcctcttctgagtcatacagggatccagtcacaggatacaatgccattctgctaccgaatgtactttggagaacacctttcattttcagggactttggactgcctcagagcagatattgtggattcagacacagccaaagagagaaaaggcaaaagagcaagaaggcaaggccatgtgaatcttcctccacttgagttcaaaccagcattaatgttgggaacctttagcatcagtgctgttgtaatggaaaagtccgtgtgcacccctcagaactctaccagtgccctttcttttcatgatctcagcaagcggtattataacacctttcactgcaactttactatttcctgtcagtcaataagccagcatgtagatatggctttggttcgtcttattcatcagtttagcacaatgatagatgacatcaaagcaactcagactgatattaaacttagcagatatacagccggatctgcttccccaacacctaccttcaaaaccagaaaacatcgggactttcgttcatctgactttagccgcagttctagaggaagtcttaatggtggcaatagagtaaataatgcaaagaacaaacggaccaacaatgagaataacaaaaaggaatctcgaaacaagaattcattaggaagatctgaaagaagaacatcaaaagtgtctaggaaaggttcaaaagatgtggtggatcacatgactattcatatggatgactctgattcaattacagtgtcagaacaaagtgagccttcagctgagtgctggcagaatatgtataaattgcttaacttctattcacttatctccgatccaacaggaatattggaaaagtcttcagaaacatttggaccagcaggagttcggagccctacagagccaacatgtaaagttgtgtttgagaatgaacaagacaacagcagtttgactaagactcagaggaaacgtagcttggtaacttctgaacctcagcatgttactctaatagtgtttgggattggcatggtgaaccgcacacacctagaggcagatattggtggactaacaatggaatcagaactgaagaggatccatggcagttttactcttaaggaaaaaatgaaagatgttttacatcaaaagatgactgagacttgtgctactgctcatattggtggggttaatattgtgctgcttgaagggattacaccaaatatacaaactgtagtgaaatgtagtattgccaagtcccaagccctctacagtgcccaaagagggctgaagacaaacaatgctgctgtgttcaaagtaggagctatcagtatcaacattcctcagcaccctgccaccttacatagcatgatggttcgaagttctcaccaactatctaaacaaatctcagacctaatcagacagccttctacagccccacagcctgtaaaagaagatattgcaaccccactaccttctgaaaaaaccccaacaagtgttaatcaaactcctgttgaaacaaatgaatttcctcagctaccagaaggcttagaaaagaagcctattgttcttaaattcagtgccatgttagatggtatagccattggagcagcacttttaccatctctgaaagcagaatacaagatgggaagantgagaagtcatggaatgacaggtgcacgacaagatttacatttgagctgccaaatcacagatcgcgttttacttcaaaagtttctgccacagatatgtcaaccattcctccttctgccagtcttaaccttccccctgttaccatgtcagggacatatataatggaagaacatgatagtcattcggatcaggtgtggagtatagatgaacttgcttctaaacaaggttactatttacagggaacattatctgcgatgtgtggcagcaacgtggttccttggaacataatcttacaactgatcttctaaaccacttggtattggtacagaaggtgttcatgaaggaagtgactgaagtatgtcagaaagtttctgg

SEQ ID NO: 616612 - DNA, 2641 bp, Homo sapiens
  misc_feature (2267)..(2267): n is a, c, g, or t
cattaaaaataaagggcattcacccatatcattctctgagctataccagtggagacactgccactgattctccagtgcatgttggacgtgctgggatgccagtaaaggacagtccaaggaaggagagcctactcagctacctgactggaagcttcccaagcctgcacaacctcctggaaggtactcctcagagaagcagtgctgctgtgaaaagtagctccctaacgagaacaggaaatacagtagccactgatatgttatctgaacatcccttgctatctgagccatcatctgtgagtttctataattggatgtcaaatgctgtgggtaatcgaggaagtgtgttacaagaatctcctgttacaaaatcaggacacaatagtcttcccacaggtgttgcacccaatcttccaacaataccctcagcctcagatttcaacactgtcttgtctagtgaccaaaatactttggatgggacacattctcagcatagcaccagtcaggatgatgtggcaggtgtagaagaagcaaaccaagggtttcctgctgttcagcttgctgatgcacaggttgttttcaagcctcttctgagtcatacagggatccagtcacaggatacaatgccattctgctaccgaatgtactttggagaacacctttcattttcagggactttggactgcctcagagcagatattgtggattcagacacagccaaagagagaaaaggcaaaagagcaagaaggcaaggccatgtgaatcttcctccacttgagttcaaaccagcattaatgttgggaacctttagcatcagtgctgttgtaatggaaaagtccgtgtgcacccctcagaactctaccagtgccctttcttttcatgatctcagcaagcggtattataacacctttcactgcaactttactatttcctgtcagtcaataagccagcatgtagatatggctttggttcgtcttattcatcagtttagcacaatgatagatgacatcaaagcaactcagactgatattaaacttagcagatatacagccggatctgcttccccaacacctaccttcaaaaccagaaaacatcgggactttcgttcatctgactttagccgcagttctagaggaagtcttaatggtggcaatagagtaaataatgcaaagaacaaacggaccaacaatgagaataacaaaaaggaatctcgaaacaagaattcattaggaagatctgaaagaagaacatcaaaagtgtctaggaaaggttcaaaagatgtggtggatcacatgactattcatatggatgactctgattcaattacagtgtcagaacaaagtgagccttcagctgagtgctggcagaatatgtataaattgcttaacttctattcacttatctccgatccaacaggaatattggaaaagtcttcagaaacatttggaccagcaggagttcggagccctacagagccaacatgtaaagttgtgtttgagaatgaacaagacaacagcagtttgactaagactcagaggaaacgtagcttggtaacttctgaacctcagcatgttactctaatagtgtttgggattggcatggtgaaccgcacacacctagaggcagatattggtggactaacaatggaatcagaactgaagaggatccatggcagttttactcttaaggaaaaaatgaaagatgttttacatcaaaagatgactgagacttgtgctactgctcatattggtggggttaatattgtgctgcttgaagggattacaccaaatatacaactggaggattttcctacatctcctacaagtacagccaaacaagagtttctactgtagtgaaatgtagtattgccaagtcccaagccctctacagtgcccaaagagggctgaagacaaacaatgctgctgtgttcaaagtaggagctatcagtatcaacattcctcagcaccctgccaccttacatagcatgatggttcgaagttctcaccaactatctaaacaaatctcagacctaatcagacagccttctacagccccacagcctgtaaaagaagatattgcaaccccactaccttctgaaaaaaccccaacaagtgttaatcaaactcctgttgaaacaaatgaatttcctcagctaccagaaggcttagaaaagaagcctattgttcttaaattcagtgccatgttagatggtatagccattggagcagcacttttaccatctctgaaagcagaatacaagatgggaagantgagaagtcatggaatgacaggtgcacgacaagatttacatttgagctgccaaatcacagatcgcgttttacttcaaaagtttctgccacagatatgtcaaccattcctccttctgccagtcttaaccttccccctgttaccatgtcagggacatatataatggaagaacatgatagtcattcggatcaggtgtggagtatagatgaacttgcttctaaacaaggttactatttacagggaacattatctgcgatgtgtggcagcaacgtggttccttggaacataatcttacaactgatcttctaaaccacttggtattggtacagaaggtgttcatgaaggaagtgactgaagtatgtcagaaagtttctgg

SEQ ID NO: 616613 - DNA, 119 bp, Homo sapiens
tcatcctgcggtcgacgtgtattcacactgcggtcatgcgtccctgtacagttccgtcgacacgtgagcaccgtctgacctccaaatatcgtaaagctggagcctggtccgactctaga

SEQ ID NO: 616614 - DNA, 1435 bp, Homo sapiens
  misc_feature (1061)..(1061): n is a, c, g, or t
taaaacagtaatggaattcagatatcctgccaccacatttcccaaccttttaaactcttacgtggtatgttcttaaaggatttagacagacctgatttaaaatatctggctctactattcactttcagtaggaacttggaaaaatgttgaagaaatttttaatcattttgttggggattaggagaaagaggactggttgggaatgtgaaggaaagaaaggtaagacagtgtttggaatgtccttccatttttcagtcttcgtatctaaaattgtatattttcatttacttataaaggagttcggagccctacagagccaacatgtaaagttgtgtttgagaatgaacaagacaacagcagtttgactaagactcagaggaaacgtagcttggtaacttctgaacctcagcatgttactctaatagtgtttgggattggcatggtgaaccgcacacacctagaggcagatattggtggactaacaatggaatcagaactgaagaggatccatggcagttttactcttaaggaaaaaatgaaagatgttttacatcaaaagatgactgagacttgtgctactgctcatattggtggggttaatattgtgctgcttgaagggattacaccaaatatacaaactgtagtgaaatgtagtattgccaagtcccaagccctctacagtgcccaaagagggctgaagacaaacaatgctgctgtgttcaaagtaggagctatcagtatcaacattcctcagcaccctgccaccttacatagcatgatggttcgaagttctcaccaactatctaaacaaatctcagacctaatcagacagccttctacagccccacagcctgtaaaagaagatattgcaaccccactaccttctgaaaaaaccccaacaagtgttaatcaaactcctgttgaaacaaatgaatttcctcagctaccagaaggcttagaaaagaagcctattgttcttaaattcagtgccatgttagatggtatagccattggagcagcacttttaccatctctgaaagcagaatacaagatgggaagantgagaagtcatggaatgacaggtgcacgacaagatttacatttgagctgccaaatcacagatcgcgttttacttcaaaagtttctgccacagatatgtcaaccattcctccttctgccagtcttaaccttccccctgttaccatgtcagggacatatataatggaagaacatgatagtcattcggatcaggtgtggagtatagatgaacttgcttctaaacaaggttactatttacagggaacattatctgcgatgtgtggcagcaacgtggttccttggaacataatcttacaactgatcttctaaaccacttggtattggtacagaaggtgttcatgaaggaagtgactgaagtatgtcagaaagtttctgg

SEQ ID NO: 616615 - DNA, 342 bp, Homo sapiens
tcgagctcggtcccttattcgtgttgcaccacgggcagcctgccctgataccccacagacagtttttggtgaggggggtccaggtccccttgctggtacctccctcaaccctcttttgttattccatctgtgcctgttccttaccacagaccaggcacacagaagcccaccttcttccccttaggaggagggatagtcaacacccctgctgtctctctgtcactcacacactgatttatggggtctgagctgggctgtacctgcaggatggacaggacccagcgccctcttctccccacaggctgtaaatagacatccaatcaccaggacagacaccaaaca

SEQ ID NO: 616616 - DNA, 2313 bp, Homo sapiens
  misc_feature (2109)..(2109): n is a, c, g, or t
  misc_feature (2271)..(2271): n is a, c, g, or t
  misc_feature (2275)..(2276): n is a, c, g, or t
  misc_feature (2279)..(2281): n is a, c, g, or t
  misc_feature (2285)..(2286): n is a, c, g, or t
  misc_feature (2290)..(2290): n is a, c, g, or t
cattaaaaataaagggcattcacccatatcattctctgagctataccagtggagacactgccactgattctccagtgcatgttggacgtgctgggatgccagtaaaggacagtccaaggaaggagagcctactcagctacctgactggaagcttcccaagcctgcacaacctcctggaaggtactcctcagagaagcagtgctgctgtgaaaagtagctccctaacgagaacaggaaatacagtagccactgatatgttatctgaacatcccttgctatctgagccatcatctgtgagtttctataattggatgtcaaatgctgtgggtaatcgaggaagtgtgttacaagaatctcctgttacaaaatcaggacacaatagtcttcccacaggtgttgcacccaatcttccaacaataccctcagcctcagatttcaacactgtcttgtctagtgaccaaaatactttggatgggacacattctcagcatagcaccagtcaggatgatgtggcaggtgtagaagaagcaaaccaagggtttcctgctgttcagcttgctgatgcacaggttgttttcaagcctcttctgagtcatacagggatccagtcacaggatacaatgccattctgctaccgaatgtactttggagaacacctttcattttcagggactttggactgcctcagagcagatattgtggattcagacacagccaaagagagaaaaggcaaaagagcaagaaggcaaggccatgtgaatcttcctccacttgagttcaaaccagcattaatgttgggaacctttagcatcagtgctgttgtaatggaaaagtccgtgtgcacccctcagaactctaccagtgccctttcttttcatgatctcagcaagcggtattataacacctttcactgcaactttactatttcctgtcagtcaataagccagcatgtagatatggctttggttcgtcttattcatcagtttagcacaatgatagatgacatcaaagcaactcagactgatattaaacttagcagatatacagccggatctgcttccccaacacctaccttcaaaaccagaaaacatcgggactttcgttcatctgactttagccgcagttctagaggaagtcttaatggtggcaatagagtaaataatgcaaagaacaaacggaccaacaatgagaataacaaaaaggaatctcgaaacaagaattcattaggaagatctgaaagaagaacatcaaaagtgtctaggaaaggttcaaaagatgtggtggatcacatgactattcatatggatgactctgattcaattacagtgtcagaacaaagtgagccttcagctgagtgctggcagaatatgtataaattgcttaacttctattcacttatctccgatccaacaggaatattggaaaagtcttcagaaacatttggaccagcaggagttcggagccctacagagccaacatgtaaagttgtgtttgagaatgaacaagacaacagcagtttgactaagactcagaggaaacgtagcttggtaacttctgaacctcagcatgttactctaatagtgtttgggattggcatggtgaaccgcacacacctagaggcagatattggtggactaacaatggaatcagaactgaagaggatccatggcagttttactcttaaggaaaaaatgaaagatgttttacatcaaaagatgactgagacttgtgctactgctcatattggtggggttaatattgtgctgcttgaagggattacaccaaatatacaaactgtagtgaaatgtagtattgccaagtcccaagccctctacagtgcccaaagagggctgaagacaaacaatgctgctgtgttcaaagtaggagctatcagtatcaacattcctcagcaccctgccaccttacatagcatgatggttcgaagttctcaccaactatctaaacaaatctcagacctaatcagacagccttctacagcgtaagttattttatttgttcacattctgtgattccatatactacctcagggtattctttgctgcattaacaaaagtttggagggagatgaagggttacttctaagtatcnaccattatggacagtggagcaagaggagagtagccaattgtgatcatgtgagaatgacttttgaaagcattaaagtacagtgtcgtcagtgcaattgtcagtgttccatattgcataaacaaagcttaagagatcctagagatttgtgggtaatgttagagntacnntannnagcnnattngtgaattccaggaccatgtcaat

SEQ ID NO: 616617 - DNA, 193 bp, Homo sapiens
gttatgttctttggagtacagtactgtagccataaacacaaactaagatgatcccaggagacacaacgggaaagatggtcttgaagtgtacatggtgtactggtgagagtgatagatgaagattcgggagaaaaggggcagagatgaaaaaagggtaccacgatgggtacacatggtggagcaagaagatgtc

SEQ ID NO: 616618 - DNA, 180 bp, Homo sapiens
gacgacgtgcttcctcttacctttttggaggatctctcctgctgtggtggggctggcctgccgccggtgtcttacagtgcttgacttggcccgcgacactttagcctaggagcctatgctatttttagccatcttctagaatggtggttcttaaactctgcagtgtgtcagaaccaccag

SEQ ID NO: 616619 - DNA, 228 bp, Homo sapiens
ctagaggatccccatactgacgcgatatctgcatacccttccaggcagcagcatgcacagctgtatctcccaacttgatctgctggttcagttcactatttaggttgagtaactagcatttccactatatctatgtggaccccgtggcaagcccagtataaggcagtgcttccagactttgtcataagccagttaacacaccacatctgattgatccaagacatctca

SEQ ID NO: 616620 - DNA, 933 bp, Homo sapiens
ttttttttatggagctttggtcactttattggttaaccaaggaatattatccaaaattagagatgtacatggtaacttaatggtacaacacaaaattatgctaatggtaaaagcctacggggatttaccaaatactcataagggtatttttacatggactatagtgaacatgtgctcgcgacggctaataagttataatgggtttaatctctaagaaatccatatggcaaatggttctggtctagaaaaattcacacagccttaaaaatggattaacatccagtttgaatcctaatctacaaatagatcataaacagcaaaatataactgataattctttcaactacgtgtatcaaacgtgaatgtagctatcggtaggtgcacataagttcaaaatgaggaaaattaaccaaaaatccactgaacagtacaggtgtaatctattatgcaactggctttaacagtgaacatctatgtactcaaaactctgaactacgaagggtccagcatccattccttggatgtactgcaagtaggaattatcgtcttccaatagggattcatgaagccatgtgcgacaacccatggggtacaaccagtcaccgtaccaagggttacaccagcctatgatatgggtcctaccaaagtatcacgagaactatatacaacacgccacagcatatatcttatacaccagatacaaagagggacggggggcccccaagaaagctaaacaccccgttgtgggaaaaaagcgcacaggggaacaagactacacaagagctacaaacgcaaccaaaggagaaagaaaatgacaacacgaacacacagagaaaccatgggcaaaatcccaagctggggcggacattgtaagaacatggggtggcaaccaaaacaaagggggagagaagagaaaaaacaagcaagagacag

SEQ ID NO: 616621 - DNA, 284 bp, Homo sapiens
aggactcctgatatgctgctcatttttgactagaaacagtaaagagcagcttattaagatcaatggaatggttctgaatgcctgtttctacagagggattaaattaaaattttttcttttttttctttttttgagacagtcttgctctatcacccaggctggagtgcagtggcacgatctcggcttactgcaatctccacctcccgagttcaagcaattctcctgcctcagcctcccgagtagctgggattacaggcatgcaccataacacccaactaattttt

SEQ ID NO: 616622 - DNA, 91 bp, Homo sapiens
gcgtggtcgcggccgaggtacgcgggatgggcaggggtgagagacattactgagcaccttggtgagcaagcctggctttaaagattggaga

SEQ ID NO: 616623 - DNA, 203 bp, Homo sapiens
agtatcccccctactgtagaacaattgtgacgaagtgaatatataaagatgagttcttcattaaaatcgaaacatggcacaaaccatacttgggatcattacaaaatgtacatcgtttagatccaaatcacatagaaaactgttgaacttgtccatattgatattgcagaatgaactcaagtttaaccagtcagcattaacca

SEQ ID NO: 616624 - DNA, 952 bp, Homo sapiens
gcctgcccccctccctcctgggggacacaaccattttttcctcctcttcatgcatcattcttgttcggccgcatggagtttcctcgtttcgcccttctcctcatgcccccttttcctcctttgttcgcagcgagggatgtatttccgcccctctccttcttctcccgcatttattattttttttttgctggcgacacggacaacaaatagtacgagcatgttttctccttcgtacatatacattcttgtgctttcatgatatttttttttcctcgcaccgctcttggtgaaaacctcacctcccggggcggggtgttgctgggcgtgattaattttattgcttctccttccgcggggtggtagtgaaatccttttcttctcctggtgaatcctcctctcttttttccctcatctgcttctgcttccctctctcccccaccccctctcagcccgctctttgtgtgacagaagagcaattggcatctattttttttatctgggcggggggaggagggcgcgctggctgtttgagagagactatctatgagtttttttcttcctcttctttccccgccctctctctcccgcaggcgggggggagtgtgtgttgagaacaagctaattggtggggccccgcgcggtgccccctacgggtggccccccccccccccccggcagcgcatgctcccccccccctcgcttggtcgttcttttctgcgtcctcctgctggtgagggggctgctcccccgctgttgggggcttcgtgattttttttttaccaaatattttttttcgtctcttgatggcggattggttttttttgtgattatcgaccccaaaccaaaaaccaaccccgccagtgtttttttttattttttttttaaatttttccccaaatttttttttaaaaggggtttttttaaaaaaaaaaaaaaaaccccttttttttta

SEQ ID NO: 616625 - DNA, 608 bp, Homo sapiens
aaatgatcattggaagctcctgcataccataagctactggaggtcagtatacatatttgtgtgtatcctggagtacctagaatacagtcttccatgtaagaagcattttacttgttgttttttgagatggggtttcactctgtcacccaggctggagggcactggtgagatcttggctcactccgatctccatttcctgggctcaggtgatcctcacacctcagccatccaagtagttgaaacaatagagctatgtcaccatagacctgtgtcaccatgctgggctgagttttgtggagatagggttttgccttgttgcccaggctcttctttaactgttgggctcaggtgttctgctcgcctcggcctctcaaagtgctggggttacagacatgagacattcagccttaatagttgtttaatctgaataaataaacaaatgaatttttatataatggaatgttataagtaatataataaacctaatgtatctaatcattaaatattgtatttaaaatattgcttacattgtattatttgttaatatttaaggttgtataagttttgacatgttatgttgagaaattatgccataattaaagaggaaa

SEQ ID NO: 616626 - DNA, 181 bp, Homo sapiens
gtgagctttgtgagacgtttgctgaattctcaccatggaagtgaatggagcaatggggctaaggtcatttgggggatgttttggttttttgtggtgtatgtggcagtttctctgtgggctggagggagtgtacaggataacgaacgcacagtgacggtttgggcacgtgtggcatcacccc

SEQ ID NO: 616627 - DNA, 577 bp, Homo sapiens
tactgaatctcctatctaaacgaaaatcttcattttacctgtagtatcttcgtgacaggtctctctgtttcgctggctggagtagcagtggtgtcatcataggggactagcagcctcaacctcccagtgctcaagcgattctcccgcctcagctctcctgagtagctgggactacaggtcccagctaattgttgtattttacagtagagcatgggtctcgctgtgttgcccagaatggaactcctggtctagaagcaatcttcccacctctacctcccataatgttgggattacgggtataaactactgtgtcccagatggtatcttcatctgttaaatgaaaataaccatggagagctgggggttccaaagcacttaggatgtagtacgtgaattgagagatctagtgtcctaattattatcatcattcattgctgaacgcagtcggctacagtcgcaaatacagcaaacatgattcaaactgtcttaaactatccgggaggctattggttcatgaaagctgccgttaggggatggggtacacttcatgtcagttcaaacccgtggctccatgttg

SEQ ID NO: 616628 - DNA, 371 bp, Homo sapiens
  misc_feature (8)..(8): n is a, c, g, or t
  misc_feature (50)..(50): n is a, c, g, or t
  misc_feature (75)..(75): n is a, c, g, or t
  misc_feature (94)..(94): n is a, c, g, or t
cttttggncccccgttaattacctacccctaatttaagattgcccatccntcctcctcacccattgccagactantcgcaacagcttccttaantgttttccttgtctcttattttttatttttctggtttgtctcccgcactttgcccagatgagagcacagcattggttaacatttctctgctgatctatactcttcaatggctccccgttacaaataaaggaaagatgaaacttcttagggtggcattcaaggcttttcaggacctccaaactcttcctttcctccctcttttccatattgagaagactgtgccatattctctgaacctattttatctgttcccatgcccaggccttggtcattggtc

SEQ ID NO: 616629 - DNA, 117 bp, Homo sapiens
tcataacgatacatcagctcatccactgtaaatgcatgaaaatagttgtatactggtattatttatttggttgtgttgttgttgttgttatactgttatttcttatttgtggttgtt

SEQ ID NO: 616630 - DNA, 324 bp, Homo sapiens
gtagagttagggtggagagatgaaattttatgagaaactatagttgtatttactaattgtgatcaaagtatttaataagactaaagggaaacaccacattttgaaaataccatcagaagtcttgggcttctgaagcttggaagacatttaactgacattgaaaaaggaaacctatgtgtggcaatgaagttatggtatgtaagaataaagaaaaggtgggattataaagtcagaaatttctgaagctacttaacttgatctcagaggtattatcagctaagacctatgaattggggctataaatccgttacgttattgggtcta

SEQ ID NO: 616631 - DNA, 642 bp, Homo sapiens
  misc_feature (272)..(272): n is a, c, g, or t
  misc_feature (622)..(622): n is a, c, g, or t
  misc_feature (642)..(642): n is a, c, g, or t
atacttttaaattgttttgaactgtatttacatacatcatgttttatcaggtacccaccaactttatactttctgccttcagatagagtttctaacattttctagtttgtcagttttaaaatataaaattcttttatgtttttaaaccgtcaaccaagaagtcaagaccactgtcccctgctgagttaggcaatcacttaaaactccaaagaactccaggctgaggagttcttttggtgctgaacagtggtctgacaacaggtgctagaatntaaggtgtgggaaaaaaaaaaaaaacaggccagggagggccaaggatctccccaatttggggaacgcttattgatacaggttgaaacccaggtctgatctcaatttttattgctacctgtccccaaaggaaatttacctctaaattttgaggaatgcttgtgggcattctgtcaattcaatacctgaaagggatgctttccgggcttttacccagttgtgtcctgatctttggcaccctctgtgcttttatattccaaagaccagggttagcttcctccggtatcttttcactattatgacccctgacttggccttgacattttgtgcctaactttggcccaatctctgnctattagccctgtccctacn

SEQ ID NO: 616632 - DNA, 445 bp, Homo sapiens
atagtaaatacttttaaataagtgaaaaatgtccttcactctttagacccataatcttatctcaggaaataattgctattgagaaaatgggccatatccttcaagatatgtaacatggtgattgaacatcgtttcacattttcatatttcatggacatttgtgccaatacctattgatctatcttaatccttttcatggttgcataatattttattataagggatgtatcacaatttaccagtaccagtcaactgctggaggcatttaggctccttctgatatttgctttgagctctttatataattaaaaattaaccccctcagccaggtgtggcagctcatacctgtaaatcccagcactttggaagactgaggtgagagaactgcctgagtgtaggagatcaccaccaacctggtcaacatagcgacactttgtctgaacaa

SEQ ID NO: 616633 - DNA, 669 bp, Homo sapiens
agcggacgtattcggcagtcgtttccgcgatgctgcctctgctgcgctgcgtgccccgtgtgctgggctcctccgtcgtcggcctccgcgctggcgcgcccgctcgcctttccggcagctcctgcagcggcaccccgggtgtgcacccagcccttcgggctgctcagcagtgctgcgcaggttccgagcggcggcgggccctccatgctgtggatctctgcagtgacccatgcagcctgtggctgtgtgctgcggctcgctgcacaccgacggagacaaagcttgtgtagatttcctgagtgatgacacattacgggaggaaagaaacaattcacgaagcataacaatctcgtcccataagatgtctggaggtttgcggacgctggaagctgaatgggaccagaagcgaaatttaagtgcggaaagtttgccggggaaacaaatccacggtacgactttaacaacgatttaacaacagcatcccaccaaacatttgatgcgtgaggcaggcaaccctcgcaagggcagacaggttgaagaacaggagcctgaaactgactatcaactcccaaatttcgtggtctggaagttcatcaagcactgcatgcatggcaagaaggcccttgtgtggcactgtcattatccagcaggatgcacgttggacaagaa

SEQ ID NO: 616634 - DNA, 482 bp, Homo sapiens
ctagaggataacggagcgagatcactatcacggtcaccactagaacgtgggagacagagagtgggctggtgacataagcagatctcggtcaagggcagtaaccggaacaagtaggaaggtgcgtcttagggatgcagaaaacaaagtcgtggcgaaggggacggggagccagggccaacgtaaggtgccaggtgccagcctcggggggccgtacctaatgcacgaaggccctgcctatctgtattcatgggaggtagcagctgactgcgcatacgtcactggcggcctgtgtctgacttctacacacgtccctgtggggatctcggactgtggatgtcaccaagagccagttcctcatcaatgggaaacctttctatttccacggtgtcaacaagcatgaggatgcggacatccgagggaagggcttcgactggccgtcgttgaaaacaggagtacaagctgctacgggggctaggggtcaa

SEQ ID NO: 616635 - DNA, 106 bp, Homo sapiens
catagcttgacgaaggtgaaataatcattatgattgcactttaaagtatctgatagaacatggaagataaataagggagagtaatactgcagagaattagcaactg

SEQ ID NO: 616636 - DNA, 1150 bp, Homo sapiens
gcttgctgtgcccagttgggtgcttcatctggtatctatgaggccctatagctccgggtacaatgatgagactcgctatatggggaagggtgtctcactaggctgttgcagccaccatctaatcaatatactgattgcgcctgcccgtggttcagtgaagtaatactcgcgacgtctctagcatgccaccaggagaaggatcgcacgaaattggatggatcgaggatgggatggcataagagaagtaatgaatctcaagttccggttgcgaacgcctgttgctgcgagggtagtgcacctttgcgcggttgcatagctaacatgcctaggatggccagttaggacgcaaagggtggttcgccacgctggtatcgcagcctatcagtctggcattgtacctttgtgactagggtcgaaccctctaggaacgattctaataccttgggcggctagttacccagcgacgcttcgagagtgttccattcgaactgcgacgagattcatccatgggctcgagctagacgaaagtcgtcggaccagtggcgaagggatggttcgatggaactcacatcgcgcgaggtcgggtgggcatgcatataacttcgaggggcacagacgcaatgtcggcattgggtaggcacgagggttataccaacaacacctgaaaggcaattggtcagtccaaagggaaggacacaattatttggaggaaaaaagacgtggcccatcactacatgggtgggggggggggaatgaaaacgggcagagagtattaggccgtcagcagaagagaattcccactagggaagaacaataacatagggaaagagagacaattgtgaaaggcagttggcattgtaacagacactatggagataataggaggacaaaggcatatgggcttaaagaggggcatacaaggggagaaaacaagtacgaggaaattgcagacacgtgtcgcagagacgccaccacaaagatacaacatacaagggacccggcggaaaacagcaatatggaacccgaggaacacagcacaaaagaagatgaccggaaatgcaacccccaaggacgagtgaaaagatacgacacaaataacacacacagcgggaagacccgagaaaacagaaccagagaaaaaaagaaacac

SEQ ID NO: 616637 - DNA, 238 bp, Homo sapiens
tccttatgcttctgtaggcattgaagccttaggcgagggaccctcaacccctgggccacagactggtaccagtcaatggcctgttaggaatggggctacacagcaggaggtgagcagtgggtgagcaaatgaaccttcatctgtatttacagccgctccccatcactcacattactgcctaagctccgcctcccatcagatcagtggtggcattagatcctcataggagtgtgaaccc

SEQ ID NO: 616638 - DNA, 498 bp, Homo sapiens
  misc_feature (30)..(30): n is a, c, g, or t
  misc_feature (498)..(498): n is a, c, g, or t
gggggggggggggttacttttacccagcanctttttttttgaagaagccacaactgcattggatgaattggaaattctgcttgctagctttttaaaatcgatacgcttatacactcacactttatgcacaaaatgtagggtgataaaaatgtacacaccggcatgatcctctctataattctactttcagagctaactccaatctctgttatactcgatcccaacaatctactttaagctctaaaggacctgcaaccttaaagctaacaagcctacgaatctcttatccaacataaacttcgtggtcaaactttaactttccaaattggagaactcatatgcttgtttactagcttgtcgtcccttatgtaaacttccaatttaccatactctggcttaaaatttggggggaaaatattatcaaatatctatttgaccggaataattcggaaaatcttttttaaatgaaatgaaaacatctttggccacaaatggtcn

SEQ ID NO: 616639 - DNA, 94 bp, Homo sapiens
gggaatcaggagaccaaaaccacaacactgccccggaaccagggatggctacagtttgttcaaaggtatcgtttttagccctaaccctataagg

SEQ ID NO: 616640 - DNA, 516 bp, Homo sapiens
  misc_feature (500)..(500): n is a, c, g, or t
  misc_feature (504)..(504): n is a, c, g, or t
tagggccaggctgggtctcaaactcttgactcgaagtgatccgcccaccttggcctcccaaagcgtggggataataggcatgagccaggtgcctggtccacctgggcctgtttggtttttctttcctggggctcagcaattcaaattctagtggttattgggtggaagcagtagcccaaccccagtttaggggaaggtagcacagggcagagccacggggcacttggtttcctgggccctccgaagctcacggtggcaaatacccccaagccttggctctaggccagatctggtggggtgcaggtgatggagaacacagatgactcgggcatgggtctgggagatcttcggtccaaagtacagggctggcacgggggcacagagtgcccacgtaagcccggggctctgatagagaggtaggaggcccgttcttggtcacggttccattgcagaccagacttgctggcctgaccacaggggaggggctgggaactcacagncagnatagggacattc

SEQ ID NO: 616641 - DNA, 222 bp, Homo sapiens
ctgcagtggtgcagtcttggctcactgcaacctctgcttcccgagttcaagcgattcccctgcctcagcctcccgagtagccagtggcatgagccggggcgtgagccacagcacccaactcaaatttttttttttttttgaaatggagtctcactccacctaggcggcagaggaagactctgtctcaaaacaacaacaacaaaaacaaatttaaaacagctc

SEQ ID NO: 616642 - DNA, 376 bp, Homo sapiens
  misc_feature (15)..(15): n is a, c, g, or t
  misc_feature (46)..(46): n is a, c, g, or t
attatacccggtagntagctaagctacttttattaatattcttaangaaaaaatcaattccaacaacaaagtgaaagctaaaaaacaataaagtccatggcagtaaacaacgattaaaatgtatttcattccttacaataagtaaaataaaaacttttttttttttttgggacagagtctcactctgttgcccaggctggagtgcagtggcacgatctggctcactgcaacctccgcctcccgggtccaagcgattctcctgcctcagcctcccgagtagctgggaggctaagaaaatcacctgagcccaggaagtcgaggctgcagtgaaccatgaccatgccactgcctgagtgacaaagtgagaccctgtctc

SEQ ID NO: 616643 - DNA, 201 bp, Homo sapiens
ctgtctgtggaacttagcaaattaatcattttcttcagacttgaaggagagtgataaataaaatttggagtcatagtgatattgatgcgcacatttaaggagttaaacatttgttaatctaattgtgtgatgatggcgttattaaagtgttgacttcctagtataaaactgcaagaataaaagtaacttctccacctgtaa

SEQ ID NO: 616644 - DNA, 267 bp, Homo sapiens
cagagtgtatcttaagtacatctttgagtagaggggcacggactagagtgtgtatgtagagaatctggagacgtgtctgggttcagcaggaaatggttccatgattgatgggtgatgtatgtcctaagtgtggaagagggtgtggtcgctcgggcacacgccgaggaaccatacacacacacacacacacacacacgcggtcttaaaactgataaaaacagatactacactagatcttagccaaaaggctgagaagaaatatcagag

SEQ ID NO: 616645 - DNA, 645 bp, Homo sapiens
ggggcgcataagactccagagcaggaaagttgggacgaagttcgtcacctccaacacgcaggaactgggccaaggataacgtggctgtcgtcctctcagtggccaagaaatttaatgggtcctgagttcgccgccgcaaaccatatcttcacaccaagcactgccagagaaaattgcaggaattgaaaaacggaacgtcgcgtctttttaacaacttcctcactgatgctaagcgcccagctctgcctgagatcaagccagcccagccacctggccccgcccagatactcccacccaggtttgaccccaggactcccctacccacaaccagactccaccagggcctgatgccctatggtcagccccggcccccgatcttagggctatggagctggtactgtccgccctgcagtccccacaggaggccctccatacccccatgccccagtatggtagctggttcgagggaactatgatgccttcgcgaggccagggaggttatcctgggaatcctcgcaacaggatggttcgtggagacccaagggccagttgtggaatatcgggacctgggatgccccagatcgatgttgatttctctttgagccgtcccccgctcctcagtcctgatcatccatactggactaa

SEQ ID NO: 616646 - DNA, 340 bp, Homo sapiens
ccttcgggcacctcaggaaggcaccttcctctgtcagacatggccaccaatggtaccaatccgtcgtttgtggccccagggcctctcctcggacttctgctaggtctacctggtactggcttgacccccgagcgtgtccaagggcacgagggagtttcctttgcacggggctgagacccccaagaaccccttcgtcactctcttgctgagaggggccccttactttgtagcaacttgacagtcacttgattagtcccccagcctcctgaagaaaaatgcggccttccggaggacgtccccttaatcaagaggcagcatcggttggccaagtaggcatagg

SEQ ID NO: 616647 - DNA, 412 bp, Homo sapiens
ctcggtaccgaagcaggtatcgtccctttcatggcattttctctctcagacaaggcgacagacggctcctgttggagacagattgggagtccattttgcagatctgcgacctgatccgccaaggggacacacaatgagttagcggggcctgtgccctgatgcggaggagcagccgtgcactaagctgggctcgcttggtgcccgttgggtctccacgacgtagctgaccgtgttaggctcttatgtggaggactgcatgggctacatgctaggattttttgacatcttggaggattaaggggttttctctgtacagcttgcagatacctggttatgtttgtatttgcttcggggttctcaaagactaagatggcagacagacttttttttttaagacgagacctggctgccg

SEQ ID NO: 616648 - DNA, 145 bp, Homo sapiens
tcaagagttgcgaaactcaagctcgaaggttacgccgcaatcacgccggaggaaaattcatcctcgaggtggcttcaacaaggacagccgggggagaccaggcttgctggaatcgggatcagaaccaagcacgtgaagacccagg

SEQ ID NO: 616649 - DNA, 276 bp, Homo sapiens
aattgcctcacctgcctgggttaaaaaaccttggtattcaggcaacacccctggaactcaaggccattgaggtgctgcggggtcatcgcacttaccgctggctgtttgctgaaattgaggatgtaaagccggcaaaacccgtcaacatttagtgcctcctgagcagcttttggttttggggttttttgggtcggcccatgtggtttgagcacccagccaggcggtttttttaaaggatcctgtacccagttcccctattaaaacatttcaggttga

SEQ ID NO: 616650 - DNA, 257 bp, Homo sapiens
cctattccttactttgagtaaatagcttaaagtagatacaaaggaatgtagagtagttatctgaatagctgttactcatgtggtcttaagaccaatctttgatcaaccgggtgcacaaccgcagggggtgggggcggggttgttggcaaccaggtcaattaccctctagcagtgtttactcaaaacctttgtcatttaatctatactgaataaatgcaagcttcgctgtctgatggggccggctgccactccctacg

SEQ ID NO: 616651 - DNA, 1002 bp, Homo sapiens
tggcagaggggaggaggggggggggggagtgggggaagtgggggggggggggggggaggaggggggggagaggggggggggggaaggggggggggagggagggggcggggtggggtgggggggggggggggggggcgcgcgcggcggggggggcggggggagagggggcggggggaggcggcggggagagggagggggggggagggggggaggggggggggggggggggggggggggggggggggggggagggggggggggggggggggggggggggcgggggggggggggggaggggggggggggagggcgcggggggggggagggggggggggggggggggggggggggggggtttggggggatgtgggggagagagtggggcgccggagggggggtggttcccgcggggggggagggaccggggcgcccggcggggggagaaaaggaaagagggggggggccggggaaaaggaaggggggccgcccgggaggggggggcccccgccgggggcccccccccaagaaagggggcccgaaaaaagaaggggggtgaaaaacacagatgtgggaattgttcggcgggttgtttgtggggtggtgagaggggggagagggagtacggcggggggggggggggagtgcctctctctttataaaataaaagagggtgtgattttgtagaaaagaggggtgttagcccccccgctctctgttgtggcgccgcgccggaataccccgcgtgcggcctctttgttcccctccgcgcccctctctcgtgtgtgtgatatttttttttgtgtgttgtgtgtgggagagagagaatgtgcgccccccctctcccgcgtcggggtgggtggagaacccccccccgcgcgcgcgagagagagtagggggtagagagagagagagagagagagagagagagaggtgtccccccccgcttttttccacaggttattttttttcttcctttatggtttgtttgtttttgttttttta

SEQ ID NO: 616652 - DNA, 188 bp, Homo sapiens
  misc_feature (15)..(15): n is a, c, g, or t
  misc_feature (21)..(21): n is a, c, g, or t
  misc_feature (50)..(50): n is a, c, g, or t
  misc_feature (134)..(134): n is a, c, g, or t
ggctggctatttacnagatanacaaggagttacggtgcacctagcccagnaatggcccttagaagccaaaagtgttctctccgctgtaggccacatattagaatccatcttcatctttttccttctcgtaaagntgtcccatagttaggctggactgtgggactgtcttatccacaaacaggaagatc

SEQ ID NO: 616653 - DNA, 1562 bp, Homo sapiens
ttgctgggaagcaggagctgcgccgagtattgctcaaggttgagaacaaagaacgtgaacctggagattgtccccgggaagcctctcctgcggtggctctgacgcgttacgtggtgggaagtcttctgggggcgtacattgtgcgtgggcagttccggcgcatgtgcacgtgggtagacaagcagagagatcagattaccatgaatcgccgtccgttggacgatttccagttgagcacatctcagaatatgtgctcatcccagacatggagaggtcatccagtgggatggtattctgaaggcctagaataaaaggcccacagcacacacaaagaatcaccactgcacaagcactcacacctagacacagctgatctcatgtgaactggctggtgccacctgtgaagcgggaggctgcaaggggcgtgtaggtgtgatcgagagcttcgggtgtggtcccatgcgctcctggtgtccctggctcctgggtgtgcagggacgtctgggcatggaagcgtatcgctcctcgtgaactgccatcgatcttgcatgtagtggggagcctgaaagagttggtgcgactgttaagtctgtatcaacaatagaagacggagcagagtaagaaggggggtgagggcgtatgtgggttgaaagggttgtgagtccagaaaggatggaatgtctaaacaagcatgtgacctcgttgacaaaacaatgagaaccaggggcaaacaccgccagcatggaggacgacaacagggatatgaggttatgaccggggtgattacaaatgtgtaacgcgagatggcgaaccgggaccgcaattgggacattcgcgggaatggattggcgaagtccagcgcaagtttgtgtgggccccgacaaccaagttgggcctcgaaacgaaggtcggagcacgtgaacacggaaattaggggcgtacctggatgggcaggggggagtacatgcacagggtgaccggtgccgccaactacatgggggaactgtcgcaccaaaatatgtgggacagtaaaccaccacaggatggcaaaggcacccattcacggccagcgggggttggcggcaacaacacctgggtggtgacccgaagacacgggcgtggagttcgaccaaatatgggggcggtgatttggaacactccgggacatggggtgcgacgcaccttcgacaggcggggaaagaagaggttaacgggtgggacaaagaaaggaacctgtcggaaaagggacagtgtcaagcccgtgaaagaacagcgggtaccgacagggggaaaaggcaccgctgggggaacagacaaacgggggcccacgggatcaccagtggcagcgagtgtaaacaacagagggccacgaacgaacacaatataggggcacagaaagcagagctgccacacaccgaaggaagacgatgtcccgcagaacagggcccaggcgacccacattaaacagcgggccaggatagctggctacaggagaacacactgacggagacaacgagaccgcacccgaagaagggcaacgacaaggaaaatcaaacagagac

SEQ ID NO: 616654 - DNA, 505 bp, Homo sapiens
gtatagaactaatatatgagattagttgaaaaatatctgttcgttagaaaaatattgtggaatatagtaacagtaaagcacagaaacaccacattctattctcaaattggaagggcgaatgtagagatactaaattctggctgctggagttgggtctctcctcatgttttgggcgactgaaggctcaactactactaggcagagatcgatgacatcgtttagatggacgtgcaggaatgatagtcacacattttcactcgtgtatagtggaagaatttctcacttcacctgaatgatttactttcattcctatggccttctatcgtgccccttctggttcagaggagcagtcacataaaagtgacaagatggacaagactggtttggaacacatttgtgttcaatgtttgattcctttttccttgtgataaagccagaggcaaatgtacttcattgataaatctgtgtgcgcagaaccaaaaatacataaaattgggaaagaggc

SEQ ID NO: 616655 - DNA, 311 bp, Homo sapiens
tctaaacccacctggagaattggggaggtcagttgattatattctatgaaagataaacttcccacatcttcatgacaggaggtagttgtgcaacttggagccaaattcaggtacctgctgaacgtagggttttacttctctgtagaaactgtggtgccaggtgcggtggctcactactgtaatcccagcactttgggagaccgaggtgggtggatcacctaaggtcaggagttcgagaccagcctggccaatatggtgaaatcccatatctactaaaaacacagaaattagccgggcgtggtggtgcacgc

SEQ ID NO: 616656 - DNA, 155 bp, Homo sapiens
agtcccttactagtgctgacctctttcaggccgcatcttcgatcggtctggcttatcatcagcagggtaaatgcatcgtgcaacaggtacgtaaagtacgcagcccggtgtagcatgttgcggctgtcaggtgggtgtggcattggccgtcgctg

SEQ ID NO: 616657 - DNA, 456 bp, Homo sapiens
tcaagctcggacatctatagaaatccccgctatcgacgtcctgctgtgtttgctttcagtcacgtgaggaacagcctcccggatagaagcgtggtgctgtctgtacatttccataattgatacagaccccggcgggtctcggacctcatacactctatgctccagggcactcactgaaaacttcatcacgttgtcaatggtgaagcccgagctgccagtgcccaggtctttcagcagccgggccaggaggcccagctgactcattgccaggtgaactgaaaagtttgctttcaatggatgcaccaagtaagaatggcataatttgaagagacttaaatacttcaaacaaagcggcaataccgaaaataaaatttgcagttttgacgcagaggcgggcagaaaaatctccagttctggtgaaccaaaacgggactggtcctctccacacagtaacga

SEQ ID NO: 616658 - DNA, 198 bp, Homo sapiens
tttgaagtaggaaaggtttgaaaaaaaaagatgccgtggttcttgcaagttctgccttgtttggtaccagcacagagcatcactgtacactaagtgtgcccgggggagaatgctgagctgattggcgagtgtgtgtgtcgcctgtgcgaggccaggtctcacagtcccagaagaacttctggacggatctgtcttggg

SEQ ID NO: 616659 - DNA, 403 bp, Homo sapiens
attgctatttgatttagtattttcattattgaaactatatatcctgccgtgcttctaagtgtcagacttaccttaggactcatgctgaccgccgggcaccccggctcccaggtttaatcctatcactttgctaggccgacgcgggcagatcaactgaggtcaggagttcgagaccaggcgagacaacattgtgaaaccccgtactcgtggttataaatacatattgcccaggggggcgcggaatatgcgcgcctgtagttactgctgcccccggaggcttaccaaggatcgtgcgcttgagggctgaagccatagcttgcggcccgctgagatcgttccactgcactccagcctaatgtcacagagcatgactccgtctcaaaagccccggtttttgctttcc

SEQ ID NO: 616660 - DNA, 193 bp, Homo sapiens
tgtaataacagccagataaaaaaacaacagtgtatatagagcgttagtcactgctcatttccaggaagatcaaacaaaataccagcccagcgagactcacatgtgttatatatatataaagcaaagagccacacccacaagctagcagctgggtgaaatatcagctgtccacgcggggaaatggcgctcgata

SEQ ID NO: 616661 - DNA, 347 bp, Homo sapiens
aggcggggggtgttcaaacccccgggcgttaggcctttcaggggggggggggggcctttttccccggccaagaaatttttttaaggggggggggcccccctttcccccgggggggacccggacccttttttttggggtgggggccaggccccggaaaaaaacccccttaaaaaaaacccccttaaggggggggaaaccccggggtttttttttttcctttttccaaaaccccaagggatgggtttccaaaagggaatttttttgggggcccccgcttccccccccaaagggttggttttttgggaacccaaaaccctttcccccccattaaagggggtttatttgga

SEQ ID NO: 616662 - DNA, 717 bp, Homo sapiens
ggaggtttttttaatttacagatcatatttatttactattttgtagaaaattattaattttgatgtattttgtattttaaaagcttcttcacttgtgttccctaaatattcatatgctgcccaaaagtatgactgtggaggaaaaaaaaaatactttaaaaatccacacttttggttaagaaggaaacatttagcatttatatattggtgtatggaaaacacttgatattttatccctgtggcatctggtgcacagagcctctcctcaaagatgctacaaaacttgattataacacatttcgggaaggctggattaacctcgattctgtgtggtgatgtgcaatactggtttctaatggttggtataacacacaaaccagtgtaaaccctttttaatggcaactttatttttttccattgcatattttgcagatttttatccacagttgtcattttttacgtggtcagaaaaatgataccccctttttggtcaattggcacatcaattttttaaatttccagaaaactcttggtacctgactgttaccatgcatcggttacgctcattcgcgcactacgtgtttgtgcctaccccaaacggacgagacttttttccatgcattatttctaataggtcaaaaggcggttacattatatattcaataagtagttaacatcctgggcactcattttcacattctctgccttacttctttg

SEQ ID NO: 616663 - DNA, 324 bp, Homo sapiens
  misc_feature (36)..(36): n is a, c, g, or t
  misc_feature (57)..(57): n is a, c, g, or t
  misc_feature (93)..(93): n is a, c, g, or t
  misc_feature (127)..(127): n is a, c, g, or t
  misc_feature (180)..(180): n is a, c, g, or t
  misc_feature (243)..(243): n is a, c, g, or t
  misc_feature (310)..(310): n is a, c, g, or t
  misc_feature (312)..(312): n is a, c, g, or t
tattgtataggggcaactgtatgaaaaattgggganaagggggccgggcgcgggtgntcacgcctgtaatcccagcactttgggaggccgagncgggtggatcacgaggtcaggagatcgagaccancctggctaacatggtgaaaccccgtctctactaaaaatacaaaaaaaatttanccgggcgcggtggcgggcacctgtagtcccagctacttgggaggctgaggcaggagaatggtntgaacccgggagcggaggttgcagtgagctgagaacgtgctactgcactccagcctgggggacagananaggctccgtctc

SEQ ID NO: 616664 - DNA, 492 bp, Homo sapiens
gcatcccggggactttggtgctgatgcccagggggccatgaacaaggccctggagctgttccggaaggacatggcctccaactacaaggagctgggcttccagggctaggcccctgccgctcccacccccacccatctgggccccgggttcaagagagagcggggtctgatctcgtgtagccatatagagtttgcttctgagtgtctgctttgtttagtagaggtgggcaggaggagctgaggggctgaagctgtagtgttgaacttggctctgcatgcccagcgatgcgcctccctgcgggatggcatcaccctgagaaccgtgagtggcccttggctcactgagttctgcatggtttggattggacaaaattgtccgtgacagtgaatcgcaaccgaacttttttcatcactgcaaacttgctgtttctcggagattcatacctttaactaagccttgctgtaacaattgtccggaatgataactgggcc

SEQ ID NO: 616665 - DNA, 723 bp, Homo sapiens
ggaccagaaagagaggaaggaagagccgggaaggaacggaagggaactcagagccgagggtggtggggttggggctagggatgcgcactgggcccggggccgcgcggcccaggcgggcactggccagtggatggcagggctgggcgagttagaactgagagcccggcttcacagcgcagcgcgctccgaggccctctgtcgttacctgaatattcattagactgaccgctctttatccttatctaacgtttatcttatcggcgagtttcgtttctcagtgtagttttaatcccgggctcccattcccccgtccacctggtcctgctccccgcgtccgtgccgcggcgctctgtgggccatggtcgccctgcccctgtacgcgcacggtcttgcagctgtctcgaggtgagggctcatctcgcgtcagctgcccctgtgtcccgtgttcgatccggaatccgccggctcgtcccggtgccagcgctgccgttcgcgcgccggtcgtgctccccacgcggcttctcccgtccttactatcacaaacacccgagtcatcattctatcactatctccatgctcttatactcataactatcagccaaaaaccctctgaccaacatgataacgcaataaccaatctacccatgtgccaatttcttcccaaacagatgtccccccatctcgtactcactcgtatagctcccaccacagattacccaaaga

SEQ ID NO: 616666 - DNA, 168 bp, Homo sapiens
tcggtatggggcttggctgatggagtgagcacttagagaaagcatgtgtcacgtggctcaggctccaagcaggttccttatatctcaggtgggactctaggaatagactccgtgattggatgcctgaggcaccccactgtaggtcaatgaaccacctatgttcctacc

SEQ ID NO: 616667 - DNA, 649 bp, Homo sapiens
ttatgcatgttaaataggataagagaataaaatgtaaagacaaacacgaaatatttcaaggattattttaaaaaaagattgactttgggcagtttttttcccccgcccggtctttcaaatgtcctaagggctaggtgccttattttggcttctgctcttggagagtaataaccaactgacttagagcttttactgaatttccagaatccaaaatagaaaatattaaacttaaagaaaaaaagttatgaccccttttggttagaaaaccaaaagtcttgtcatatgacatcatttttataatttccctctcatttcattttactgctttataatagtttaacctcattgaacatttttcttatggaattttgaatattattatttttaaacattttactgcgatgagaccatagtaataatcttgcatggaatctttaaatattttaaaggtgtttttgaagaatacctttaaaaattatccttagtagcaaaaaatgacattagcaatatgaattaattcactgctgatttattgagctagcagacagactgaaacactagcattaataaatacatgtgaccttcatgtatatattttactagtttgttaaaacctactaacaagtatccaaatgcaaccgaaatcagt

SEQ ID NO: 616668 - DNA, 314 bp, Homo sapiens
cccccccccggggttggtttttaaagggggggggggttttttggggggggggcccccccctttttccttttttccccgggggggaaaaggggggggtatttttcttttccctttttggggcccccaaccccccccccccccccccgggggccccgggtttttttttttttggggggggggggggggggccccccggttttttttttttggcccccggggccccccttgggtatggggggggtgtttccaccccccgggggttcccccctttttttggggggggccgggggggttttataattttttttggggca

SEQ ID NO: 616669 - DNA, 148 bp, Homo sapiens
attctatcagaccaggtcgggcaggtgctgacctgcagcctgaagacggggctgacctgcaagaacgacgaccagacaggcaggtgcaacactgtgcttcaacgtacaatcgtgcgatgtgcatttgctagtgaacgaactacatgcc

SEQ ID NO: 616670 - DNA, 1037 bp, Homo sapiens
gctcgactcttagcttgtcgcgggacgtgtaaccgggacccggtggttctgctcctgtcgccttcgactcctaatcccctagcccactatgccgtgatgtgcatctcacatcgcacgtgggccagagctggtgtccagcattggcaatgcctgcggggagctcaagtggctggtaacacggcatccagcccgatggtcagatgccaaggtgagaaagactcattgggggaggagatgcatgcccttcaacaaaccttcttcgagcgagactgggccgcgtggcaatgcaactgtgtgcccgtgggcgtgtgtatggtaacgacatctggaacctcgacaaggtccatttgatgaaggttcggcgactggcccctacccgccagctgcttccatccccctggagacaggcgtcatcactcggcaacggacagatgcatgccgagtacatcgtatgcccgatgggcgactagctgccatgggtccaggagcatcagttgcccttgtgtcggcgccgcaggtgctgccgctgtctgggccagtgccccggtctccacgggcttctcggtttaccaccaggcttcggtggcgggagccggtactgggcttcagctccctgccgcctgccggccgtctctcaggttggacttatggctacgccgtcccacgcttggagcttctccactacccatgccgcccaggctttcacagctgtacttgcgcctacaactccatgcggaacacccacgcaagccatggagcactctgcttgcgcctccggcagacaacggagccactatgagatcggcgcagaacccgaaatgagcgccaacctaacgtaacctaacgcctagtagccagacgggcccccaccggctccgcattgagacctcatgtgaccgacgatcaaccacggccccccccgcacacccggacaatgccctcctgtgcaccccacaccctccgacccgcctgtcccccggagccccgaccgtggcggcgggcccccgcccaactcgtgcgtgcacccggggcgcacc

SEQ ID NO: 616671 - DNA, 915 bp, Homo sapiens
  misc_feature (338)..(338): n is a, c, g, or t
  misc_feature (477)..(477): n is a, c, g, or t
  misc_feature (744)..(744): n is a, c, g, or t
ccgggtgaactacgacgaagagaactggaggaagattcagactcatctgtcagagcagaccacatcggccgatcccgtgttcagtcaaatcgggcacaggatctttaatgacgccttcaacctggtcctgtgcccataaggttccctgtcacttctggcgctgaacagacacccgtcttcctgcattgaagagatgacagatacatgacccgtgggaggtccgccctgatgcagccatgagcatacttcatagctgtcattgtttgacctgctccgagcgtctcatggccccactgaagaacctacctgtaagaacgcaggtcactaccccgtcttcnattcatgcttcagcaatataagtagccaatgcaatgctgggagcgcagcattcccagtgagaagacctgagttggcaccagtacacgccgacgcgttaagtgccaatcatgctaccagccttgctctcaatcgtgcatngttccgagaagtgctagagcgaagatgcgtcgtcttggccctttgtcaaggctagatggactgtgacgaagcccccatagtacatatacctcgatcacagcccagaccttggcggttccaactcgtcttacttgcagacgcatattcgcctcagggcctggggcagcgagcgcagtggcgactttctgccttgggcagccagttccccgaaattgcctacacgtggtcacatgaaggcttgactaaagcttccgggcagccccttgnccttgcagtcaaacgagttcgctggattccttgcaacaggtgtacccttgaaggcttacacccctgtggaaccccgggaactttaaattcccggggaaaggccaggggaacggcgcaaacctttctttaacccaatttcaataccagggcttttacccaaaaacaaacaag

SEQ ID NO: 616672 - DNA, 315 bp, Homo sapiens
agggaggcccctaaagcagacatggcttagatcacaacatcaaagtccttttgaatatctggaaggccttcccaagtagaatgggtacaaacgagcccagattgagaagactacaataaatgcctaactcttcaatgccccagcacccaaacatctacaggcatcaaaaacaatccaggaaaacatgacctcaccaaactaaagtaaggcaccagggaccatcctggagaaacagagatatgtgtaccttcagaagaattaatacctgttgagaacctaagtcagataccgagagaagacctaggtcgctgcact

SEQ ID NO: 616673 - DNA, 673 bp, Homo sapiens
  misc_feature (32)..(32): n is a, c, g, or t
  misc_feature (168)..(168): n is a, c, g, or t
  misc_feature (197)..(197): n is a, c, g, or t
gctaagattccatttatttaaaagttagatancatgtttccatccagcccactccaaattctcatgtcctcacatttcaaaccacagttatgccttttatacagtctcccaaagccttatctcagggttaactcaagagtccacagtccaaagtctcatctgagacanagcagtctcttctacctacgagactgtanaatcaaaagcaagttagttacttcctagatacaatgggggtacaggcaatagaaaaatatacccattccaattgggagaaattggccaaaacaacagggctacaggcctcatgcaagtccaaaattcagcagggcagccagatcttaaagctccaaaatgatctcccttgacttcatgtcacacatccaggtcatgctgatgcaagagatgggcacccatggccttgggcagccccgcctctgtggctttgcaagatatagccccactttccactgctttcataggatggtgttgactgtctgcagcttttccagatgcatagtgcaagctgttggtggatctaccattctggggtctggaggatggtggccctcttctcactgctccactaggcagtgccccagtggggactctgtgtgggagttctgacccaacatttcccttgtgcactgccttagcagaggttctctgttag

SEQ ID NO: 616674 - DNA, 857 bp, Homo sapiens
tttggccccctccccaaggccaacttcccacggaacacttccggataattttcacccctatgtataagccccaatctcccaaaagcttttgtttccgccacagcaaaacgcgtgtgagatctaaaagaagttcacacccctgtgaccccgagacccacaatttccgagcataaaccaactgtgttgccacccgacagaagtcttgtaccagtgttttgccggcggcatcctacaagtttaacttcgccggaacccccggcttctcaatattatttggcaacctcctgaatctacctacatctttgacgaccggccctttaccccaaaaaggagttcggcaaactcgtatgaaccacggccacagacgggggtgaaaagacacccgagttattaattttctgacaattcttctccggcccaaattttctcattcgccgccttatatgttagatacccaaggcgctccagtcaaaaccatttatgaatgccacgcaaatctcgcaccctcgggtaatacaaatagattcaccccctctttgggaataaatatttaacagcccctgcaacacggcttatgtcaatactgtggccccaccaaccgcatcagctgtacactctcctgacagccccccacaagagctcattctgtaaggtgcgtgacacatctccgccttacttttaagggtctcccaatagcatcatctttcaaagacgactccgttcaatacagaaccccggcgaacaacacctttgtaatcaacccccatcaagcaggcttccccacttccgcctctccaattaaaaaccccgtacctggagtttatcgggattctcccaaaaacaaacccccccacaac

SEQ ID NO: 616675 - DNA, 516 bp, Homo sapiens
gaatccagcctgggtgctgtgtgtgtggacctctgactggttggcttcagatgacctggctggcgggggctgtcatcacagccagagctatccagctcggtgcgctactccaaccttccagctggtggcacttgtccatgttgctgttggctgccagccaaacacgctaggatcagcttccccagcggccgagcaggaggcccagaaccggatgagccagatgaggaacctgatccagacgctggtgtccggcatcgcgccagccacgcgcagccgggccacgccccaggccctgctcctcgatgccctctgcctgctcctggacattcttgcacccaagctccgccccgtgagcacacagctgtacagcacccgtgaaaagcaacagctggccagcctggtgggcacgatgctcgcttacagcctgacctaccgccaggagcgcacgcccgatggccagtacatctacaggctggagccgaacgtggaggactctgccgctccctgagctgctgc

SEQ ID NO: 616676 - DNA, 833 bp, Homo sapiens
gcgccctgcgcgggtggcgattagacctggtctcgaggtggtccgtggctccccccagaggttgctgtcgcgggcgcggtatcccccggacgcgtgtgccggttctcgaggcgttaacgtcgacaggtgaggcttttgttaggcgcctttctaatgaagtaagctcaaaggctcggggaccgccggggagaggaggaccttgccccggtagcgggtgcggtgagtgttcacccgaccagcgatgttagttggacaggaagcgccaagaggttataaaaagaggggcgaaccatagaaataggtcctcccaaatcagaagttgtgttgggattttaagtgatggagccctctccctgcgtattgctcaggtgtgtggaagatactcggactggggagagccagatgctcagatgagaagggtagaagagttgctccagagacaaagtgacccacgatgtgggtagatagaaccccccgagctccgtgatagtcgtctgtaggagcaccccaatatgcgggggggaacagttgttgtaatagtgctccgaacgcgaagtttgatggtatgccgaggaaacagtataatgattcgcgcattaagtgttgaccgacccacaggatgtcgcaggagatatgaaaagaggctatcagctcttggggaccgacaagtgaagaagtgaagatgctgcaaatagattctcccccaccagtcccaggggtcgcggggcccaataggggaaggtttttttcccacagggccgatttttaaggggccaattttaaaaaaaaaaaagggggttttttaaaaaaaaatgaagccggggcccaaaaaa

SEQ ID NO: 616677 - DNA, 586 bp, Homo sapiens
gatataacagaaaagactctgaccagagatcgagacatcctagccaacatcgtgaaaccccatctctactaaaaatacaaaaatgagctgggcttggtggcgcgcacctgtagtcccagttactcgggaggctgaggcaggagaatcgcttgaacccgggaggtggagattgcagtgagcccagatcgcaccactgcactccagtctggcaacagagcaagactctatctcaaaaagaaaagaaaagaagactctgacctgtactcttgaatacaagtttctgataccacggcactgtctgagaatttccaaaactttaatgaactaactgacagcttcatgaaactgtccaccaagatcaagcagagaaaataattaatttcatgggactaaatgaactaatgaggataatattttcataattgtttatttgaaatttggctgattctttaaatgtctggtttcccagatttcaggaaactttttttcttttaagctatccacagcttacagcaatttgataaaatatactttggtgaacaaaaatggagacatttacattttctccctatgtggtcgctccaga

SEQ ID NO: 616678 - DNA, 322 bp, Homo sapiens
ccatttatggagaaggcaactaaagttcaaaatgggtaaagggggtcccgggcatggtggttcatgcctgtaatcccagcactttgggaggccaaggggaaaggtttcccttgagcccaagagtttgagcccagcctggacaacagcccccgctttttacaaaaaataaaacaattagctgggggggggggggtccctgtaatcccagctacttgggaggttgaggcaggagaatcccttgagcccaggagtttgaggctccagtgagctgtgatcatgtccctgtactccagcctgggcaacagagtgagcccccttttca

SEQ ID NO: 616679 - DNA, 417 bp, Homo sapiens
tcgactctgaggatccccctcccttccacagcaggcaagccaagagccaaattataatgaactcctgttcacaactgccacaaaaagaataaaatacctagaactacagctaacaagagaagtgaaggacctcttcaaggtgaactacaagccactgctcaaagaaatcagagatgatacaaacaaatggaaaaacattccatgctcatgaataggaagaatcagtattgagaaaatgaccatgctgcccaaagcaatttatagattcaatgctattcgtattaaactatattgacattctttacagaatcagaaaaaaaaaaatttaaaattcacgtggaaccaaaaaagacctcgaatagccaacacaatcttaagcaaaaagaacaaagctggaagggagctgtggaagggaga

SEQ ID NO: 616680 - DNA, 1210 bp, Homo sapiens
aaaagtgcccaggggggcttaaggctgccagactgcacgcacatctacagcaacaagggcttctattccatctacaactgggatcgggggaaaagggagatgtaggagaggaaggaaaaaagaggggaaaaatataccaccaacccctcccccacaaaaaagagggaaaaaaaaaaatcccaccacggggagactctatgtggccaaggcataatgggaaagatgtggtggctcccccaaacagatgggttttggcacagggctaatggtcctggctgggtttcccttagagacctattttggaaaaatgtttaaaaaagacagggagaatttcaaaataatttcaactccgtggcagaaaatttcaaagcctccaaacattagggagcaaaattcactcctttcacgtgaatttaatctccttttctcctctttctcctcatttctcttataacacattttttactccattgttatatataagagaagaattctcgtataagagggtgtggcgtatgtgggtccccaactctcattatagggagaaggtggtagagaggagatcacgtgaactccattcagctactttggattgacccagggtaatattcccaagattcaccattttccagggtccccaagagttccctctaaatgtggcacaatcaagtcagcctatcgtttacattctccttctatggaacacagcaattgcccatggggtatcctcgtgaagcgtaacagatcttaggcggaattttcccaaaataaaggcacctggtggggcaatagaagacacaccctaacatgggagcaataaacggagacggcatcacagacatcaatccacattcaaaacaaagacaggggaacccacacaggggcccttccaaatcgtggaaacaaaggctgcgagcaggacacgggcctacaaaaagtggggcttacaggcggttcacgccacacacacacaagaaatgacggggggagagcccaccataaaagggcgccaaaaacgagcagccgacagcaaaaagagaaactaccacccacaaaaggatagtggtgcacacacagcataatgagacaaccaacataaaagtagaaggagccaccgagaaaaagaaatcacaacacaaagcaaaacatcacgcaaaatacacagaacaaagaggccgcagtgaggtgacctgcctggacgcgcagcaga

SEQ ID NO: 616681 - DNA, 122 bp, Homo sapiens
  misc_feature (10)..(10): n is a, c, g, or t
agcatgctgnaataaaaagctacttcttctataattgtcaggttctctccaatttctcagctggggcaaagcacatggggtgcagttgggtgtgccatcactgcacagcagctctggcaact

SEQ ID NO: 616682 - DNA, 432 bp, Homo sapiens
ttgtaaaacggaaagcgcctaagaatatgctgagaggggaacatagttttatggtagccacagtaccttccagtgacgggcaaatttcttggcatcagcgggcaggtgtggtgaatggaattcccatgaacagctcttacatccttcggctttcctcctacaggcctcggtctggtaaccaagggtgacctgctgtgaggatgtaaggtccatgaccctctagggataatgccttccactcaggacagaaagactgctgagaacctctagggatatctacagttaccttcacagggggagaatcaatggtggaggttaaccgacgaccatggaattttggcccctaatcaagaagggtatggccatcgtggttacattcaataactagtgggctcctctttggcagaaataacctttcctctagatacggaa

SEQ ID NO: 616683 - DNA, 380 bp, Homo sapiens
gcaggaggggagagaaggtgatatggacactgtgggctggctgcggttgtgggcatgagcacgcctggagaggcatggggtggtgacaagctctggcagaagacccaagaaggtctgatcctggggtctgatcagtgctgcggcactgggtcctaggcagaatgtctgcctggtgagacgtggcaggagccagtgtccgaagctgtctcaggacgtcagagagctcggtggccttgtctccaagcaagcatgatctatcagatgcagcctgttgtcggtctccacatagggctggtgcatgcacatggacaggtagctacaagggtagaggacgggatccccggtgtgggcaagctcctaggacaaccgtgtgcttcagg

SEQ ID NO: 616684 - DNA, 491 bp, Homo sapiens
gtagtatacataccatgagcataaaaatgggtgggaagatagagctatcacatggggctactacgactttattttttctggaaattaaggcctggaggatgtgaacataaatgtgggtatcataaaacaggtagtaataaaagcataaataatcaaatatcaggtgatcttactagggagaagaaaaaccaatatctagttacagatgaaaaaatgtttaatacaaagagctgaaaatgtagaaatggagtaatctccccttggcaaaatttttacactttaaattagtaatccttggttggcaaggttttcatccctatgcggtggttttctactaccggtataactctggtacatacggctactttcccaggtttcctatatgcctcccctatatgggagaggataactcgcgtttacatatgtgatagtaatgcttaatactaatccacagagtgggctcgatcatttggagatcctagtggcttaat

SEQ ID NO: 616685 - DNA, 237 bp, Homo sapiens
ccacggtagaattatctgttgtgtttaagtcaccagatatttgttccatcagtttagcccagagatagacagtagaatgcaataccttcctccctaaactgactggacggctggcagtgagtgcccaaaccagtgcccatgcaaagggacgtggtttcctttttctcctctctctgcatctgcgctttccagataagcccgaagacagcaacttctccactcatgacaaatctaccg

SEQ ID NO: 616686 - DNA, 234 bp, Homo sapiens
aggaagcaggtagtaatttcatcatctattgtttcctgcagttgattgtaacagaacagttgttcaggtataaaactctgtcatgtaaatgaaatcttttgatatttcatgcacgccttgtattcacactagtgtcagtatcgtatgataaagaaccttgaaatctataaataattggcttatcatccttaaggacatttcagcctatatccacaatacttgatttcaactgcg

SEQ ID NO: 616687 - DNA, 208 bp, Homo sapiens
gcagaaagacttcatcttagttcagaaccttgttgacctctggcatcacattcttgccgtctaccaggatggacgtgtttgaccggatccgcaaagccacgtgcagcacggctcgaccctcggtgtatttgatcttctcaccattgaacatccgctctcgggcggcctccacgcccctggactcggccaagtccaccagcattcgcat

SEQ ID NO: 616688 - DNA, 401 bp, Homo sapiens
aatgggaccagctcctacacagtcccttctcccatccagcacaggatcagccgaggtctcctgtgccttctgctattttcagaccaatcccgtatgtattgattgcccagaccaaccctgtagcagggtctcagtccctttcctctggggcagtggcaacgaccacgtcctctgctggtgatcacaatggcatgctctctgtccctgccccgggggtgccccactctgatgtgggggagccacctgcctctactggggcccagcagccttctgcattagccgccctgcagccagcaaaggagcggcggagttcctcctcgtcgtcgtcgtcctctagctcgcagctctggaagggggagctctgcaaggggagctctgccaaggggagctctgccaagggg

SEQ ID NO: 616689 - DNA, 655 bp, Homo sapiens
  misc_feature (1)..(1): n is a, c, g, or t
  misc_feature (81)..(82): n is a, c, g, or t
  misc_feature (357)..(357): n is a, c, g, or t
  misc_feature (384)..(384): n is a, c, g, or t
  misc_feature (390)..(390): n is a, c, g, or t
  misc_feature (431)..(431): n is a, c, g, or t
  misc_feature (434)..(435): n is a, c, g, or t
  misc_feature (447)..(447): n is a, c, g, or t
  misc_feature (490)..(490): n is a, c, g, or t
  misc_feature (521)..(521): n is a, c, g, or t
  misc_feature (542)..(542): n is a, c, g, or t
  misc_feature (641)..(641): n is a, c, g, or t
nggagtaagtccccaggctcctgccccaaaccccttgaggaaaagagaaacaggtgttgggcaggaagaacagcaccaacnnggaggagagagaggggattgggtcccggctctaccacggaccagtcactttccccaggactcagttttgtcacctgtataatgggggaagcacaatccttgccttgacttcctttccaagagccttcaattttaggctttcggtgagagagttgggttattggaagagcttttgcaaacttgttaaagttgcagttacacacatgcaggctagcggttggccctggggcccaggcccagcggggcttcttgcggagttgggttacagttaagttntttggcaattgaaaacacttgcttgangctgantctcttggccctttgagcaccctcaggtcctccacatcttnttnnctcctctcaggntgcccacaacttccctggcaccttttaccctgggtggcttgangcctgggaagatgaggcgctcccggcctggnctggccctgcctcccactctnaaccctcttgtcacctctttcacctgatgatgtatgaacaaattgcagacctggtgtgtaggggagcagccgttccctgcaccctctttttccctagtnatcaccctttccat

SEQ ID NO: 616690 - DNA, 110 bp, Homo sapiens
gtcatggtcactctccccaaatattatattttttctataaaaggaaaaaattggaaaaaatttccaggcgcattggagcctataatagggccatttccctctcacacata

SEQ ID NO: 616691 - DNA, 600 bp, Homo sapiens
ggattgtatatagtcttctctgttagagagttttacccaagaaaaaaagtatctataaagaacataccagtgaggtgccttatatgtcttggaggaagtacactgccctagtgcccataagataatggagtgccacgttagcgctcgagcaagacagatgaggatatagtctgtcgtccactatgcagtagtgtcccctcgatgggagggagtgggaggcaggtacaaggtggcgctgccaggtgcccgggtctattggaggcgccccaatctcagacttcctaacacagcctgtgtggaaggcagaacaaagaatgcatgcccagtcagaaatctgttctattctgctccaggaaaatcggaaacctgtgagtcagagtcagagaaacttacccaagcaacgtaattcctgttttcatgggtcctgtagatgtttgagtcaggaaggtaaggcggggagtgactgaataaactctgccttttaaattgagcatctgggccgggcatggtggctcacgcctgtaatcccagcactctgggaggtcgaggtgggtgggtcacctgaggttgggagttcgagaccagcccgaccaacatggt

SEQ ID NO: 616692 - DNA, 2151 bp, Homo sapiens
  misc_feature (230)..(230): n is a, c, g, or t
  misc_feature (434)..(434): n is a, c, g, or t
  misc_feature (502)..(502): n is a, c, g, or t
  misc_feature (525)..(525): n is a, c, g, or t
acacgagtccgtcgcattcgaatatggagacttggggactaacggactggggacccccatattcctcctcgaggccacatgattacgctcctatggacatccccttggcatcacagagcgcataccccacgggggcgccgagtccagacctgtcaactgtgcctccgcatcctgcctgcgcgatgtgcgactatgcgcgcgtgtgtcctcgagcctcaagggatctcctngaagtctttggggcgcgtacttaggaatagctacgaggagaagctagtagacgcgatgaaagaagacactggcctgcttttctgaaagcgaccgcatctctctcctcaactatgtattctcttctccatctaacctgtctgttcgtgtgttatgtatcatatgtcttcttgcgcatgggtgatatggtcctcctggcgagaagngtcgcctgtcccagcgcgtgacgaggcgcaggcgaatgagacaaactgcgcgctcgacgacgacaagntatggtgacttggcagccgtcantacgagacggtaatggtagtgggagagcttgactcaagcgggctacaacgttagggttacctaaggatatacacatggagcggcctatccgatgaacagactgcttggacgtgtgtcgtagtagtacatggcctcaacctggtacgaacatgttgggcctttcctctaccggaggcccaattgggccttgcgagtgcagcctgactcataaaagtcttgaagtggggggcggcgtgggggggactctgcacggcggctcggtggaacgacgcacgaggcacgcaagcaaggcagggcgccctccaggaacgggcgggcctaatgcccgaaaaagggcgggcgcggtcggccatttcacactcttgcggtgaagcccatggccgggcaagaggaggcccccaaaagcacggggagagcaccacccccaccacacactcaatcaaacaaaaggctcgctcccaccggagcacccgcacccacacgtcccacgaccccattctcaccccccattactaccccccacctaaacaggcacgcaccactaccacccacccacgcacgcatcctcacacaccaccccccactaccctcatctactactcacaatataataataactactcatcacaccaactacacctcgatacaaacaacacatactatcagccgatcactctctaacatcacacctcaacataactacacaacctcacaccaccaccctacaccccgacacattcaatcccccacttataacttcaatcagatattatatattacataaattcaataagactcaccaacacgacaactaacaacgaatagcaacaaacacccaacagacccgaaccaaacaaataccacattatgacttataatatactcatattcaccacttacttcgtaatcactacacgtcagagcaaactacactgatatgttactagcttccaactcatactataccatcattcacacaaccatcgcatagaaaccgatcctatacaacgcatcacaatacaacgcacacaacacgttatcaactgacgtaccatagaagacgactacatacactcccatacattacacacatccatcacaaacaccatcatcaatctacaaatccagaatcgagcacacacccatcccacacacaacccacgaccagacactagacgtatcactagaacacccgcacaagagcccagacataacccaattcacacacaaacatcaccacactcaccacacagtccaccacacccaacaccacactcacacaaacaaccacaacgaaatatacaatcaccacccacacaccacggacacacacggcagcaagaacgacaggaaagaacgagaaccgaactaagagcagcaagatcgagataggaacaaagcaagaagcaaagagagacacacggaccagagacgggacgatggcagggagcacgacgcggaaacagcaacaccagagatgcgacaacacgccaagccaacagacacagacacaccgccgcagcacagaccaccggcgagaggacaacccacaccaaagacacacgaaaaccacgacaagaccacagcaaggagccacaaccggcggacacaacaagatggagacga

SEQ ID NO: 616693 - DNA, 860 bp, Homo sapiens
  misc_feature (14)..(14): n is a, c, g, or t
  misc_feature (21)..(21): n is a, c, g, or t
  misc_feature (612)..(612): n is a, c, g, or t
  misc_feature (719)..(719): n is a, c, g, or t
tcgttaagtaaccncagatcnttggtttagtcagaccatcatgtctatctgaatggagctctcaagaacatgcatctgcttaggaagacctggctggaaacttattttaatcacacccatgacaaactctccagaactgcccaccatcattcacgaaaacaacccctagtggacggcccaaaactgagcaacaccctcatacatcacccatcacaaccacccactctgctccgttcatagaaccacacaaccaacaacgacggctgatcactcatgcacacaccaaccccctgaaaaaatcacaacaaaaaacatcaatgcacagcacaacaccccaaccgaaaaaccacaaaacccctccacatccaacaacgccaacaacccacatactactcccaacaaccatacaccccaacctttaccaccataacacataacccccacaaaaaacaccccaagacaaccccacaccgaccaccagatcgcaaatcaataaacataaccaaaccataaacaagtacacaacataacaccaacataagacaaacaacaacataccaacacacaaccccatacctactaccaccacctcaccacgacgacaactaatantaatcataaaaagaagacaacacacacacccatcaacataccgaccattaacaacaccagaagcagacacacccaacaccaatacatatcacgacgacaacaacccncacccacccacgccgacggcaccaccacaccccccaccacccactaccatacccaataaatcttacgaccaccaaaacacaacaatccaacaagcacagcaccacactggtagatacataaaatacaaaacgcaacaccct

SEQ ID NO: 616694 - DNA, 292 bp, Homo sapiens
cggtctttaggaggtgatagtcatcgctgtcgaggtgtatacaccaggtgtcgggaaatactcctgaggaagcggagggctccagacagactcgatgagcagagggagatgcggagcagctctagattggatttcgtgtgcgtttcctccatgtaggagggtgtcggaatagagtctgagaagcagaaggcggtctgggagtcatgcaggaatgaatacttctggtcctttgggatataggtttcttcaaactcctggtaggtgtcaatggccagctggagggggccgcgcg

SEQ ID NO: 616695 - DNA, 989 bp, Homo sapiens
  misc_feature (195)..(195): n is a, c, g, or t
gttggaatatgtgcccgcgccggtggattttctcactgtcccggggctgtttgggaagggtggctgtccgtctgcgcgagaagccagggattcttcggcgtgggctctccccaattctgcggtggtggctcccccgatgggggcccgctttttgttcctctgttggactttttgaagcgccggcgccccgccgtngctagtatgggccgccccacggggacattggtcgtttctgctggtgcggaaacattcagttctggccccgcaaggtcgccctcctcgggtctgcgagatgacccccggctttggtagccacgaccggccgctattttcgggcctcttcttgtgcaggcgaaggtcatgtgccgggtcgtcgcgtctgctcaacacagtagagtccccttctttggggccgggaaattacgcaatggggggtcctgtagagaagcatgtcttgttctgactagggaagtcctatattccctacggttcgtggtaggagaagccggtggagctcatagacggcgtcttttcttgattggcagtgtatgaaaaagtcggcgctgggggccgtcatagataaataagtcaggccgcgtgatatatgacgccctcccaccagtcggctggcagtactggcactcattccccgcccgtgtgtagggggtgttgtgttcttcagtaagcgccccggaggtgtgggaaggcccctccttctaatgtgtgtttatagaaaagaccactcttgaacagcagagatgatgctcgtggtagatgaggttgcttagtcacttcataaagtatgctaacaatatcgtgcagtcacaggttgactgcgtgcgaccccgctgccatagggcccccacgcccccgcactgcgcttgagtccaggggttttaaatcccccattaaaggttgccgccatatgcctggccacaacgttttcacgaaggttcgaagcaaaaaaaggaaaacccccccacaaaaca

SEQ ID NO: 616696 - DNA, 308 bp, Homo sapiens
  misc_feature (17)..(17): n is a, c, g, or t
  misc_feature (122)..(122): n is a, c, g, or t
caacggatgtgccgctncgcccgtgctacccacgttgaaggtggacccgacctgatactgcggttgcattcatcacgttcatggaaggcctcgtccctttcacgagcgatggcaagattgangccgaacgttgaagcgtgaaaagtcattttatttcattcgcttaagtacatcccctcctctcctcgtacgcgcggaataggaaatatttaccgtctttatgagactggtatggcacatcctgccgccagaccagcatgcgcgaaccgatttgagaacagctgcatcccggagcggcacatccgttg

SEQ ID NO: 616697 - DNA, 201 bp, Homo sapiens
  misc_feature (81)..(81): n is a, c, g, or t
cggtctgagggcggcggtctacgactcagactggggtcgggttatgacagcgcgcaacggtgagtactgtctctcggctgncacacaggctccggctgcgtgcctgtgtgtgtgtgttgtggtctgtgctgtgcgtggtggcgtgttgtgttgcttttgttggtggctgtggtgtgcgtgtgtgtggtggtttcggtggtg

SEQ ID NO: 616698 - DNA, 134 bp, Homo sapiens
caagtaaatcccccctttaaaatttttttttttagcaaagccctgtcattttttgtgaaaaagggtatgtttatttattccaaaactgagtcatatataaattttcaataaaagcagaaacttttttcccttta

SEQ ID NO: 616699 - DNA, 464 bp, Homo sapiens
ggtatcgtgcatccaaatcaaaatcgtcacctggtctaaaatctggccaggcacggtggctcatgctgtagtcctagcactttgggaggcgaggtgggaggatgcctgaggcaggagtttgagaccagcctgggcaacatggtgaaacccatctctactaaaaatataaaaattagtggggtgtggtgggacgtgcctgtagtcccaactacttgtgaggctgaggcaggagactcgcttgaacctgagaggcagaggttgcagtaagttgacatcacgccactgcaactccagcctgggtgatggagagagacctgtctcaaaacaaaaacaaaaacaaacaaaaaaaattccaaataactaaatgtaaaatctaaaacttttgagcactacacatgggactcaaacgaaatgctcactggagcatctcggcattccagattctcggatttgagatgcttaac

SEQ ID NO: 616700 - DNA, 200 bp, Homo sapiens
ctgctcgaattcaagcttctaacgatgtacggggacatggtggtggacacatcaaatcccagctactagggaggctgaggcaggagaattgcttgaacctgggaggcggaggttgcagtgagccagtgcactccagcctgatgacagagcaagattcagtctcaaaaataaataaaaataataaaacctccataagcaaa

SEQ ID NO: 616701 - DNA, 357 bp, Homo sapiens
gactcccctatgggtcgactgcagcgtgcgtgaattcacatagatgattaggtgacctgtcaacgttggagcaatggtctgaatttgatccgtgagaagctactcacatagctagaataaatacagcgactacgagcactagtgctgattgcatccgataagctgcacagtgcagtgcaacaggttcgtgggacgccacaccgcgaacaagggtggcgtgttcgtgctgctatttcgtctgcatgcgccagaacacatcacggcaaaaggcatctgaacgtttccgcttcacccgtgttgtacgtttgcgtacctttaggccggctgataaaattctgcacagcttgaatcataaca

SEQ ID NO: 616702 - DNA, 431 bp, Homo sapiens
  misc_feature (21)..(21): n is a, c, g, or t
  misc_feature (52)..(52): n is a, c, g, or t
  misc_feature (69)..(69): n is a, c, g, or t
  misc_feature (279)..(279): n is a, c, g, or t
tgccccggacagtgatgggtnccccagccttcatccccatgtcccccctccnaaagggccatgaacccncatcccttttatgggcctgccataggtattcccccatgggtttatatggtgccccacattttccttcatccccagcctatcattgatggggcatttggggttgggtttcaagtctttgcctattgtgaatagtgctgcaataaacatacatgtgtgtgtgtcattacagtagaatgatttatactcctttgggtaacttctggttctagntccttgaggaatcaccacactgtcttctataatggttgaactaatttactctcccaccaacagtgtaaaagcattcctatttctccacatcctcttcagcatctgttggtggggaacgtaatttatttgagccactgtgaaaagcagtttgg

SEQ ID NO: 616703 - DNA, 375 bp, Homo sapiens
  misc_feature (3)..(3): n is a, c, g, or t
  misc_feature (43)..(43): n is a, c, g, or t
  misc_feature (303)..(303): n is a, c, g, or t
agngatttaattggcttacagtttctgcaggctgtactacaangcatggctaccagcagctgcttctgatgagggcctcaggaagcttacaatcatggtagaaggcaaaatgggagcgagcactatcacatggtgagagagggagcaagagagaggaggaggtcccagactctaaacaaccaaatttcacatgaactaagatctcactcatcacccaaggtgatggtgccaagccattcatgaaggatttgccccatgattctatacctcccacgaggccctacctccagcattgggggttanatttcaccatgagatttggaagtgacagccatccaaaccatatcagcaacataacaagacccccaactctta

SEQ ID NO: 616704 - DNA, 235 bp, Homo sapiens
gacgatagaccagcgcagtgaaatgcgcagcttgcgcattacccacattacactttaccctcattgtgagtcagtcctatatgagcgagctgtcagacacttgtcacatggttggtcttggaggaatgagtctggccttctctccctgaccagttgggatagacacctgactggaatccttgacactggcaggtgtttctatgaacatagaggactgtgcctacgtgtccggcca

SEQ ID NO: 616705 - DNA, 943 bp, Homo sapiens
atggcacatgtcagtcgcaagtatggtcctactaacgaacgctacttcccctatcatacgaacgagcttatcacctttcatgatcacggcccgtcataagtcatgtatcccttatctgctatcctaggtcctgtatgcccttttccataagcagctcacaacaaaactaactaaataactaacatctcagacgctcaccgtaatatacgtagaaccgctcctggaacttagtcgcttgcccgcggcgcagtgcgaatcgctagatcgctcaattcgcgccctccccctataccccgtgaacgtccattccgtctttatccataaaccatgcatcgaaagagttcctaacagactcccgcatctcctttaccctattcagacatgcgaaattcgtgtcacacccaaatgggatgacctgaaaccgctaactgaagggtaacctatccggaaccattactgggcccgagacctatcagaatttcgtatgcctaatcgttcccttggctaattaaccttttccgcgcgctcaaattaaattctcgctaatgtgagacccccaaggggaccggtacctcgtgcggaagtttgcccatgtgtgaacggggtctgagagccaaatccgtgagaatgagctcaacagtccacccgaactctgggaataagtcgccgcacaactgtccggttcatgtacattgaaaactctttaccaattccagacgaacagcgaatgactccttatgcgacatctcttgcccagttgccaggcccttgtttttcccccgcaagcagttttgagaggcccctttgacacaccagtgcgcggcacgttgcccaaattttcccccccgcgataattgatgtgcgtaaaacagaccagaacacaagccccatcttttgtcaacttcggtcgttgaccaccaggacccccgagggggggttatta

SEQ ID NO: 616706 - DNA, 782 bp, Homo sapiens
gatgaacaggcatgctcatggaacagctgctggctgtggtgtgcgagagggccagctctgtgcgcctaaggtacgtccgccgagctgcccggtgccttccccgaaacgttttatgggggagagctccgggtctccgcggattactcgtgcagacggtgtatataatgctcgtgaacgaaagcgattctgcaaagacgccatgaggtggattcctaatcagcctcctcaccggggaaagccgaggagtgggtggtggcctacgatcgagatggatagccccatcctaaggtgattacgggccttcctcgatgagatgaaacagtgcttggctgggatgacgacgaagacgagagacgaagcagcaggaggcatgatctattaggccctcgacctcggccttcggggggaaggtgcctgcatgcggacacccccctccccggaagccttcaccgcggcacaggagccatagttctaccccattgcacttccgggtcgcctttagcttacccggcgccccgggagtgctcttacaactacgttcattgctcccgaagttggttcgccttttgtacccatggaataagcgcacacaaatacttgctagataggggtcgcgcgctggaagccttcacatcagtcaggaaggtgagtgggacagtggaatctaccgtggcatcccggggatcgtccctggataatttgaatggtgtcttgcaccccagattattggcaggcctgatacacgagcgaaaccataacatcgttggacatgactatggaag

SEQ ID NO: 616707 - DNA, 300 bp, Homo sapiens
gtcgacaaaaaataaaaattcaaacaggctaggtctggtggctcattcctataatcttaacactttgggaggctgaagtgggaagatagcttgagcccaggaagttgagaccatcctgggcaacatagtgagaccccatctctacactctcaaaaaaattaggtgagtgtcctggtgtgcacctgtggtcccaaatactcaggaggctgaggcaagacagaatgcttgatcctaggtgattgtaccactgcccttcagtctggacaacagagtgagactctcttaaaaaaaaagtcgacg

SEQ ID NO: 616708 - DNA, 142 bp, Homo sapiens
aatgtcagtactcccattcagtaaccatcggggaagtgagctggaggagccgtggagtccacaccctacacctgccttccccttgcaggttattgggccaaatctcagctccttaagctacatgggaggctatcagagcgtg

SEQ ID NO: 616709 - DNA, 384 bp, Homo sapiens
ggagcattaaggttaagctgagaagaaagattgtatacaatccactgcatggataagaacagttggttctagaccatggtcttgtttagaggaaacatcccaccaatgaactactctgttgcggcgacgttcgaaatatcaggcgtcgtagtcaattagggataggagggttgttcatgcttgctcaacttccaccggcattgcagagcctgcatctgccgctgcggctgaaactgtgggacggcaaccagttcgatctggggcctagcccgcaggtcaccatcctggtcaaggaaccacagctcatcagccagttgacccatccaagcatggatcagctaggcaccgcatttgttgaaggcaagctggagctggagggcgata

SEQ ID NO: 616710 - DNA, 139 bp, Homo sapiens
ttcatggcatgaagacatcagctacgaggtcatcgcgctttatcgccgccgttccacgcatcagcgtcggttgaagaagggagtggatcatcaccccgtgagtgcgagatcaacaccgagctctaactgtcttgcagtg

SEQ ID NO: 616711 - DNA, 240 bp, Homo sapiens
  misc_feature (38)..(38): n is a, c, g, or t
  misc_feature (59)..(59): n is a, c, g, or t
  misc_feature (153)..(153): n is a, c, g, or t
ccccaaccaaaacccgaggaaacctaggcgtaccttcnggactgggcatggggcaaagnacctgaatccccaaagcattgcaacaaaagctaaaatggacaaatgggatctaattaaactaaagagcttctgcacaacaaaagaaactatctncagagtgaacaggcaaccaacagaatgggagaaattgcaatccatctgacaaaggtctaatgtccagaatttacaaggaacttaaac

SEQ ID NO: 616712 - DNA, 249 bp, Homo sapiens
ccccggggtttggggggggttttaaaggtttggccttggggccccccccccccctaggggttttccccccccccccgcccgggccctttggggggccccccgggggggttttttgggggcggggggggcccccccccccattgccgccccctggtttttttttttctttgggggggttccccccgcctttttttccccgggggggaaaaagatttttttttttttggccctttacttttccccattgga

SEQ ID NO: 616713 - DNA, 576 bp, Homo sapiens
aagcagacaaatccctcttaattggagtgttcaaacatgggtatgagaagtacaactccatgcgagctgaccccgcgctgtgctttctggaacgagtcggtatgcctgatgccaaggcacatagctgccgagcaagagaggaacagacatgctagccagatggtggtgacgggggagaatttgatagagaagatgaagacccagaatataaaccaaccagaacaccgttcaagagatgcaaatagcatgcaattgtgcaaattctccttcagaggatcaggcaagaatccatggaaatacatgccacaggcaagcacagtgagagtaatgcgtgagttaggcacaacgtttacgtggacgctaacaaattcaagcccgtgacgtacacgatatgcgccaggatcgattactgcctatcagcgcagatataaaaagggaacaagatgaggcaagaggccctaatgaagactgaccggcgcagacaggcgcgcctcgagaggacagtgcagagctctggaagcggaaagggaagctatatatcatctgagaagcggcaacaagtggaccaagaagaga

SEQ ID NO: 616714 - DNA, 104 bp, Homo sapiens
gggtctctatgtccctgtaagactcttgaggggacccacactgggttgaggccagtgtctcctgttgtaaattcaagtggatgaccctctccccaccctcctct

SEQ ID NO: 616715 - DNA, 370 bp, Homo sapiens
  misc_feature (13)..(14): n is a, c, g, or t
  misc_feature (17)..(17): n is a, c, g, or t
  misc_feature (38)..(39): n is a, c, g, or t
  misc_feature (93)..(94): n is a, c, g, or t
catcctagaacgnnggntgaggttctgttgcgggtagnntagcactcaggactagaaataccaaagattgccaacaccaggaaccaaatcgcnntatgctagcaatgtcaactattcttgagatactaatacatatatttcttctggtgaagggtaaaaatgacttggcaagacgaatttgctaaataattgttaacccaaattgataatgttaccatcgtcttattactggaatttcataatggatatgtaaaatgtaaggatggaaaaataacatctgtattgtgcacaattagagatttttagagaatggcatttaaaccttgaacctccaaattaattcactaaaatacgtttcttctaatacaca

SEQ ID NO: 616716 - DNA, 337 bp, Homo sapiens
  misc_feature (86)..(86): n is a, c, g, or t
gtcccctctcctcttctcccctcacccagcaggcacccccggttcccgccaggccctcctgccatgtcggacccagacgtccccangggctcggatgtccccgcatgtggccccttgttccacggggatgcctgagccccttcaaggagccccaagccaggccccaagctgtggcccaggcctgagccccagggaccatgagcgggggcaagaagaagagtagtgttccccaaaaattccaaccaaggcggtcagccggacggagctactgagggccctgggagcccaggggcttcggatcccaggagcccacaggcagaacgcggacgagaaccca

SEQ ID NO: 616717 - DNA, 1504 bp, Homo sapiens
cggacgcgtgggttaacccgctctaataaaattaattaagccacgtgcactcatcgtacctcacccagccccatccaacattctctcgccatggattgatagagctttcgtgcgtcactccttgggcagcctgaccttgatacctccaatatacagccactagggactatgtcctatgcccgatgacagctactgcaccacgacgcctgcgaagcctggctcttgttcagtcaatacgccactcgatcattccagcgtcgatgagcgctagcattgatggcatgaagtgcagtactcgctacctctcacggccaatggacgccttcaaataatttcttatatctcgccatcttcactacacatcgggctgcagggcgctgagtatctacggagtcactttcctcgtacttcagaagatcctgacatatcactcggcattgattcgctcctgcttgcaaagctattacgacaacaggccttcactaggcatatgtcctcccgtgaggccacaaataatcgagttctgaggggggacccccaggtacatttacgccaaacctttactcatactcgcgcgatacccattatacttgttggagcagcaagcgaccattagctagccagatgaaattcttggagggagtgcctatctacaagataagaatgaggataccccaaccccttcaagcaacgaatatcttttgacccttgtaacgtctcagtctttgtcccttttccatgtaattgggcagtccgcttaagccagtcaacttcgccaccattcctaaattccttggcaacgaagaaaccgtggaattctagaacaaaaccctccgcgtaagtgtaagtgcatcaattcccccaattgctctgaattaaaatattccacccttttcccaaccccgtttaacttaacaccaatgttcacactgaacgtccccattcgtggttttaacatatacatcttacccatatcatctcccttataatgaacaatataaagcacctaatttcttcaaacccaggaaccttccttaatgcgaaaacccaaggaccacaagttgattacccccgtaaaggccgcaaaaccctcgtcttatagagcgtaccccggttcccccacaggagtatcaaggggcccgcgaaaggaatatattagccgtaatattgccgataaacaaaaagttgttcccgcgaaacccgggcccctatagacaaccaaaggagaggggaggcagatgcacccaagtaaaataatcgcccagcccgacccgctgttaggacagaaagaaccccccaagcgcgcacctatatattcaaccgagagaaggccgaatcaatttagcccgcccgcaacgacaagcacatatatatagcgccacaccacagcaaaccccctctacaaccacacacgaaggggagagacagaccaagcggcatacatccacaaggagaagagcaacgagaaccacacaacagcaaccacctcagcaaaaagagacga

SEQ ID NO: 616718 - DNA, 389 bp, Homo sapiens
gcacgagagcacacagagggataaactggctcgcgtgtggacactctccggctctgtggccagacgagagcgcacatgagggacccagcactctagagacacaacacacatgtgtagctgctattggctgagtgtgtatcctgtgaccaatggcctgtgtggctggacgatgccttggcttgagcttttttggtgctggttagttcccgcccctgtgaaacctgtggtaggtggaggttctgtcttaactcgaggggcacctgggattcaggacgcttctaaggggctctggctgtccgcgttaatgaaggacaacgcgtttgcgagcaccctgtgctgtgtcttgtgtagcggccttccagagccttgctttggacctttggacgccc

SEQ ID NO: 616719 - DNA, 219 bp, Homo sapiens
gaaggcagagcttgcagtgagctggagattgcgccactgcactccagcctgggagacagagtgagactccgtctcaaaaaaaaaatgtcgtcttataacaaattaaaagtctgccaatttcccttttacacagaactccaaatttggagtacccttggaaaagaaaggaataatctggatgctctccagatcctacttttctgcttactttggcactgt

SEQ ID NO: 616720 - DNA, 199 bp, Homo sapiens
  misc_feature (140)..(140): n is a, c, g, or t
gacagagtctcactctgtcgcccaggctggcagtgtaactgattgcgactactcggcatcactgcaacctcaatgcgcatcccggaggtcaagcgaattctcctgcgcgtcagcgctcctgagtatgctgggattactanctgtgccctgccaccgactgccccggctaatttttgtatttttagtagagatcggggtt

SEQ ID NO: 616721 - DNA, 124 bp, Homo sapiens
cacgaggggcataccagccgtatgggcgttgacctggtcttgacatccttggtgtcgtataagttgcaggccaccgtgatgtgcttggctacgcacggtcgcttcctggaaattgggaaattcg

SEQ ID NO: 616722 - DNA, 169 bp, Homo sapiens
tagactgcgttctcctatccaggtaaattagaagaaataccacagtattcacgacgtttcctagtttttagacttcatctgcagtattggataaaataaatgcaattgtgctctgcatttaggatgcttacattgtcataagcgatgtgttgggaatgtcaacagagca

SEQ ID NO: 616723 - DNA, 871 bp, Homo sapiens
tactaatctccctacaaatcgccttaatgataatccattcacagtcatagaactaatcatattctatatcttcttcgataagccacaacttatcccctaccttggatatcatgcacccgtatgagaggtcaaacacatgaccagaaacgtccatgagacgcaggacactattactatacctattgcatacaacctagttaggcatcgcacttacccccctactcatcggcatctaattatgatcactgcatcaactactcctagggcatctaacctaaatatcatgtccttactattcagtctcagctgccaagaacttatgcaagagtccatgagccaatcagacctgaatatgactagcttatcacgagagcttggatagtaaagatacctctttatcggactaccactttagtgatccctaaaagcccaagtcgaagcccgcatcgactgggtcagaagtatcttggccgagtagtctctgaaaaggtaggcggtaatggtatcaatacgcctcacatctgcattctcaatccctctgacaaaataagaattaggctagccccttgcctatgtatctatccctatcgagggaatagtttataacgagagtcgcatactggtctaaagaacaaacagaggcgtaaaaatctgctccattgcataatcttgtcagatgcaagcatcaataagtcctccgttagtaaccagacagattgttcattcaaaaccccttgaaggtttaccggagcagacattcatatagatgcgccagggggttacatactcattacgaatatggctaaaaacccaattataacgcaccggaggagatctgagcccttcaggttcagtctatccctacacttgg

SEQ ID NO: 616724 - DNA, 199 bp, Homo sapiens
acggctgctggtgagcagattatgtgaggtccaagtttgagactatgtctggcaacatggtgaaaccctgttgctactaaaaatacaaaaattgtgcgggcgtgctgctgggtgcatgtaatcccaacactttggcaggctgaggcgggcggatcacgaatgtccggacgatctgagaccactcctggcccaacactgg

SEQ ID NO: 616725 - DNA, 881 bp, Homo sapiens
tcctagtatcctgctgattgagcgcgcgtgcgcacctttcttttgtggacttggtcatatgtgttctcgagcatatgctgtttctgcgcacttaggtagtgacgcatctcgacagacctcttgacaagactcgtggggcatactcgaacgttgtgatacataatcttcaatggagttcaggagcgcccttgacctggattctgtcgtccatgatgctcaaaacgagctcgatatcaaatttagatcctcgtgcatgactaaccatccagcaccacttaaagttttaaaaagaataacagacaagaaagaagtggctgaaacctaaatgccatatggagaagacagtaattgccacatctcctctttggtctttcctggtacgcagcataaagcccacagatgaggactctgcacattgctgttctctctgcctggagctctatggtccagatagaactcctgccaactccttcgctgtgtccaagttaccttcattacattgtcagctttaaatgtgtgcctactttttggcctaactagaattggagacctcttcacaatgtgtcccattcttccttaacttaagccactttattctcattataaagcacattatcttgccttgattttatcataatcgtacgcataaacgtatattgcattaacttcggtggatacctatcggctgttctgtgcacaggatgttaacccccatgaagacgagaatctggacgtcatcatgattatgccacggttggaccagcgccatatcattctgaactacgcaactaaaacttagcaagcggaccggggaccacgggtgactgtccaacaatgtcacctcagcgcactcccgtaaacaaaatgcccgcaaaacacgc

SEQ ID NO: 616726 - DNA, 484 bp, Homo sapiens
  misc_feature (484)..(484): n is a, c, g, or t
gttttgggggacacttgaacactgactttggtgttttcccctggttgaggatggccctatggatactgagtttcctagaactaggggaccctaaacattcattgtaatgaaagcagatagattgtgagcataattactcccagaatgttgatgtaaagctgagagtaaatgggtagtttcttacaactaattgttcagtgtcaccagcacacctcactgagggggaaactgtccacccagcacgctgcatccagccctgctctgtgagaccacctcattcccattcagtctctttgttggccaggagtccataatggtgtgtgcatgtgggggagggggatcttttcctgccaatctacaaacctagcctacaaagcttcacctctacaatatgtactgaaagtaaagtgataaggaataattatgattgagattattattggccaccctaatataatgtacataataaactttatcatcatan

SEQ ID NO: 616727 - DNA, 205 bp, Homo sapiens
  misc_feature (195)..(195): n is a, c, g, or t
cgtgtcggctagaaagaattacaactaggcaggatttagccactgtgggagggtggacaggcgagtggttcaggtggcctggctgttggtaggaactccaagtgcccaggcctcttgggtagcttagggccctgcctctgtgtcatgatgcatgggtcatttgtcttgggtgtcatatcccatatggagacgaanggggctctaa

SEQ ID NO: 616728 - DNA, 434 bp, Homo sapiens
ctggtaaatgtagatactgtgggaggtcaggagtttgagaccagcctggccaacatggtgaaatccgtctctactaataaatacaaaaagaaaaacaaaaaaaaaaataatctggggcgtgctggcttgctcctgtaatcccagctacttgggaggtctgaggcacaagaatcacctaaaccctggagttagatgttgaagtgagctgagttcatgccactgcaactccagtctgtgcgacagtggaagactcgtgtctcaagaaaaagaaacaaggtgatagtttgggtttggggggtaatcggtttggtaggtcttggtacctgatgaatctactcagatttaacgggtatgtggctttccttttagtttggtcttcttatgcttgcaatacagtttcaattccatcaaagcaacagtgcttagcacagtta

SEQ ID NO: 616729 - DNA, 433 bp, Homo sapiens
tccatgtatggtcaccaggtgagagcaccccggcgatcattcgcgtgccacgatcactctctctgcgaacagcagcaggcgtcaagaatccgcgtggacattctagcaaactgctatcatacaaaagcttgtccggacaggtcaagggagcgtagatggttgtctttgccatcgaaaaatctcaaaagtgtatatatcctattatccgtgctcagtcggctcaacaatatctgcagccaagccatctcttcaatccccccggattctcatatgctcactggaatgagatcttagcatctttgtgacacccagttcaatttcatttcgtctgtaaaatacttcatgaaacactgaagtcgtataccttctggggtgcagagtaccttcagtggcgaagcagatatcccacagactctactcattgccaaaatca

SEQ ID NO: 616730 - DNA, 92 bp, Homo sapiens
ggcacgaggcaggaagtggaaaaattcactaagcggctggtgaaagtcactaagcagcacaatgatgagtgcaaacatctgctgctcggccc

SEQ ID NO: 616731 - DNA, 1333 bp, Homo sapiens
ggataaaaaatgaactccattaatattattttcttaagacagatcatgcatcatgatggccctaggcatggagtgctggagatgcaggtggaggcgccatctatcaggtcatcaacaggacctctcgtgcacttcaccggggttctgggcagaattatccctgcatcgagacctccatgtagatatgcatgggaattagtcatggcttgaggtccatctcatgcctcattgatagattgggattagtagtatttacggtaagagcatcgtgggattatctggacagcttggaatggtggccgatggtctgtgttcatcgtaaacttcacttgcatgctcgaaagctgtactctcgaacagcagtccttcagagagcatacccctgtgagggttgcttgcagtaattggcaagggccgtgaagccaacgctaggcgcacaaagcacaagaagatttgatagctcgccttatatgaggactaggaatttgtgcgtcatgatagaccttggagacttatcctctatcttagaggtatcacgaatgagtcgttgccgaagaattgtagtttatatcaccgaccttttaatcaataacttttaaagtcaagattgggcaaagttggccccctgggggaaagaaagtcagggggttcaagtaggatgtggtaagacacggctttcacgtaggggcgtgatttttaggcgtcgggcccataggggcgccattcatttcatcccgaaggttgttattcctccgtaattttacatatacaggacctaggttccaaaagaaatggacttttaactattttgggcccgaatattgggctaccggtttgtttcatacaggcgtggggatgcaattttctgggagagttctttgggacatccacttagcgggggtcctctgtgtgtccacagaagttcacaaaatggcttaatccctctcgggagaaaaatttgggccactttcgagacgtgggaaaatggcctgtggagacaggttgaggggggaggcatattgggtaagtaggcgcgagctagtcgtgggaaggttagttgccacagagtttgataccaccctgaaacacgacagggtttccggccgtgcgagttggaaaggcccttctcttttagaggccactgtgacaccgattagggtacccagtggggtctagcgcgacgccaggcaacaccgttggccaaaaccccccttttccaccaggaagtccttggtctctcccttttggaagcccttaaagaaacgggttagggctttaaatggtaaactgcccccttcctgggtgtcctgttgaacgccataccttggggtgg

SEQ ID NO: 616732 - DNA, 948 bp, Homo sapiens
gccgggggctccacaagaggagaaccaccttgggacatggagccgcaaggggtataccccaaagttttctcgccgggggacaaagaaaatccggggtagagaggaacccgagtgttctctcccctaatgaccaaagggcgcctttggagaccagcgaagacccgttggacgatattgggtccacgaggaactcgaaagaaaaggcccaagacctgtgaggattgtagaaagcagcagggggacacacgggggtccactcccagaagatattcccctgtaagtctcctaagcgccttccacaacgggaagagccaacctggatgtgaagatggaggaagctttcccagagccgcagaaatttacaggatgagggccccgaacacagaaagaattctgggacaaaagaatgtgaataggaaaaataatcgcaacatgggcttgataaagagaatccagaactgcctggaggaaagaggaaagaacaatttgtgacacatcgccacccaggaaagaagactgggaggaaaattgtgccaacacgcccatcggatctaacacccagagtgttacaccagagatggccagggagagccaaccacaggagggatacctcgggggagtttcctggtggtggaggctcctccctctggtggtgcttcctcacggggccaccccttgagagaggttgtgatatagcccacacagtgtatgagtgtacgcactgttgcacacaattaaaacaatttggaggggccttaaatttgtagcaaaattttgtggcagtttttaaaaagttataggctgctatttgtaaatttctgggcattttccataattgatatgggaaaaattcacacgggggaggaaattaccttgtcccttttttaaccctgttttgtaaatgggaaaagccaagtttttaattaaactattttaattggcccccca

SEQ ID NO: 616733 - DNA, 121 bp, Homo sapiens
tgtaatagttatctcgagtgatggcctcctcgctggtctggccagcagcaacaaggctgtaaatcaactgttcggcatttcctactcaggatatgacactccacaatcttggtttcctgtt

SEQ ID NO: 616734 - DNA, 541 bp, Homo sapiens
  misc_feature (480)..(480): n is a, c, g, or t
  misc_feature (536)..(536): n is a, c, g, or t
cgggattgacatataactgggctttaagcattcttttttttgagaagtctcgctcttgtccccaggctggagcgcaatgccgcaatctcggctcactgcaactctgcctccgggttcaagcgattccactgccccggcccccctgagaagctgagattatgggcgcctgccaccacacccggctaatttttgtattttttggtagagacacagtgtttcaccatgttggccaggctggtatcgaacttgcgacctcaggtgatcctcttgcctcagtttcccaaagtgcttggattacaggcgtgagccactgcgtccagccgatgtttcttaagtgtttgctatgtgccaggccttgtgctgagggccttgtggatatcttatctcatttaattcactcggcactcaggcgtgaagatgaggacactgagggagaggcttgtggagctggcccgcctctccacaacccaggacttcganctgttttccttcagcacctctgactgtatgtggatgcttcttagccaggacccggncccac

SEQ ID NO: 616735 - DNA, 148 bp, Homo sapiens
agacatgtcgagcagcgggcaagaacacactttgagggttaaagaaggtctgagctgggaagatggctcatgcctgtaatcccagcactttgcgaggatcctttgagcccagaaattggtgaccttcctaggcgacagagagagaccc

SEQ ID NO: 616736 - DNA, 294 bp, Homo sapiens
  misc_feature (114)..(114): n is a, c, g, or t
  misc_feature (132)..(132): n is a, c, g, or t
aacccttgtgggacattacagacgtgataactttaatggcttaatattttgctacattaatatgcagaggtgatagaaataatctatgaattttctcataaagataagaacttnagttctagtagaccacangatataattttgcatgtacccaatgggcattcaattttcaatgctataaagcttctgtcctctgtcattctcatgattatttatgctataactgtaaacctaaattattgacattgagaagtgcgcagagactttgtggcacacacgaatctccttataaga

SEQ ID NO: 616737 - DNA, 178 bp, Homo sapiens
gccggacacctggatggcacatcatcagaaggactgctcgctgcatatgctacggaatccaaagaatgcatggatggtgcaggagcagtgtctgcacatgccatgctgcaggagcttgcactgtgccactgggaatcacgcctggccaacgatgcaggacctgctgtgccacgcccca

SEQ ID NO: 616738 - DNA, 123 bp, Homo sapiens
gaccacagtctagatgagaggattctttcccaggggagagcaagagaatcaggaaatgaggctggcagaaagagaggggctaggtccatggagggtctcacattagaagtgtggcaaacttca

SEQ ID NO: 616739 - DNA, 220 bp, Homo sapiens
catttttcataagtagtttatctgcgagtggggcagggaaggaatagttcagcgccacttcgcgcagcttgacgaaggaggcatcgaggatattctggcgaggctggtgatcccacggattttcattataaaccatggtgtagctctggtatgatacggggatatcgttcggtgcgaatgtacgggtatcttgcagcatccgaccgtaagcatcgtatga

SEQ ID NO: 616740 - DNA, 592 bp, Homo sapiens
  misc_feature (24)..(24): n is a, c, g, or t
  misc_feature (62)..(62): n is a, c, g, or t
  misc_feature (74)..(74): n is a, c, g, or t
  misc_feature (105)..(105): n is a, c, g, or t
  misc_feature (134)..(134): n is a, c, g, or t
  misc_feature (139)..(139): n is a, c, g, or t
  misc_feature (147)..(147): n is a, c, g, or t
  misc_feature (160)..(160): n is a, c, g, or t
  misc_feature (167)..(167): n is a, c, g, or t
  misc_feature (186)..(186): n is a, c, g, or t
  misc_feature (209)..(209): n is a, c, g, or t
  misc_feature (211)..(211): n is a, c, g, or t
  misc_feature (220)..(220): n is a, c, g, or t
  misc_feature (231)..(231): n is a, c, g, or t
  misc_feature (258)..(258): n is a, c, g, or t
  misc_feature (264)..(264): n is a, c, g, or t
  misc_feature (288)..(290): n is a, c, g, or t
  misc_feature (293)..(293): n is a, c, g, or t
  misc_feature (297)..(297): n is a, c, g, or t
  misc_feature (299)..(301): n is a, c, g, or t
  misc_feature (328)..(328): n is a, c, g, or t
  misc_feature (336)..(336): n is a, c, g, or t
  misc_feature (340)..(340): n is a, c, g, or t
  misc_feature (342)..(342): n is a, c, g, or t
  misc_feature (347)..(347): n is a, c, g, or t
  misc_feature (363)..(363): n is a, c, g, or t
  misc_feature (365)..(365): n is a, c, g, or t
  misc_feature (372)..(372): n is a, c, g, or t
  misc_feature (374)..(374): n is a, c, g, or t
  misc_feature (380)..(380): n is a, c, g, or t
  misc_feature (385)..(385): n is a, c, g, or t
  misc_feature (392)..(393): n is a, c, g, or t
  misc_feature (407)..(407): n is a, c, g, or t
  misc_feature (430)..(430): n is a, c, g, or t
  misc_feature (447)..(447): n is a, c, g, or t
  misc_feature (452)..(452): n is a, c, g, or t
  misc_feature (455)..(455): n is a, c, g, or t
  misc_feature (457)..(457): n is a, c, g, or t
  misc_feature (462)..(464): n is a, c, g, or t
  misc_feature (467)..(467): n is a, c, g, or t
  misc_feature (478)..(478): n is a, c, g, or t
  misc_feature (487)..(487): n is a, c, g, or t
  misc_feature (493)..(493): n is a, c, g, or t
  misc_feature (496)..(496): n is a, c, g, or t
  misc_feature (503)..(503): n is a, c, g, or t
  misc_feature (518)..(518): n is a, c, g, or t
  misc_feature (522)..(522): n is a, c, g, or t
  misc_feature (530)..(530): n is a, c, g, or t
  misc_feature (589)..(589): n is a, c, g, or t
aaaagcaggtaacaccaaagaacnaaaatggtatccatattcgttgcaaaaatgataattanctggaattttcnaaacatcataatgaagggggatcaatggttnccactatcgttttcaaccaatatacaganttcgntcaaggtntaggttttatttntacatantagtattcacatgagttcnctattctgaagtattatcaaaangnggacccttnaaggtcgagcnctgcttttttcttgactttatgtatgntacttntctgtccttaccgtagtaagcttnnnctntttntnnntcgtttagaaattattgatgagaatgncggaaaanaacngnggttnttttataagaaaattnantatttantntttttncaaanatgtcgnnggttttttcttccncactagggtaccctgacttgctntattttttctgtgtgtnttganctngnaaaannnaangaacaggaaancaaaagggnccccantcngatgagntccatgtttgaaggngttnaattttcnattagaccccaatcttaagtgctttggaggattgtagttattgtttttgggtgtgtggngtg

SEQ ID NO: 616741 - DNA, 105 bp, Homo sapiens
aaacagtatagaggaaatgaaggacagatgcgggagctacaagatcagcttgaagctgagcaatatttctcgacactttataaaaccggcaggttgaaagacgca

SEQ ID NO: 616742 - DNA, 184 bp, Homo sapiens
  misc_feature (65)..(65): n is a, c, g, or t
gtataagaagtgatgggtgctcaataaccacatgtggctagtggctaccatattgaacccacagnagatacagaaaatgtgcgtcatcacagaaagctctttgtatggtgttatgaaagagctgtagcatttggtactcaggtttaaggtgtcaggaaacaaatatagctgaatgtatccatgg

SEQ ID NO: 616743 - DNA, 110 bp, Homo sapiens
tggaccctttgaacgcagtcggccctacagccgctgattcccccgcatcgcctcccgtggaaggcccaggcccgctttggagctttctcctttggtctataaccatgtcc

SEQ ID NO: 616744 - DNA, 159 bp, Homo sapiens
caatcgagccggtaccctcgattagggccaaatacttagtccagtgtcacaccaactttaagccagtcaagtggagaaataacatgttcaagaactgtatctgcatgggtgggaacatgtaacttgtacgactggtacgaagataggacatttgagatg

SEQ ID NO: 616745 - DNA, 270 bp, Homo sapiens
tggatgggtagttgtcacctcaaattgaccttagtgtatcttcaacatagttgtaatgtaaggaacccacagtttgaagactaataacttgggtttgaatcttagctccatcatttattgctaatttaactttgagcaagtttcttaaacttctataccttggtgttcccatgtgtaattgagtacttggcctttggagagattggtaagtgccaattaaaaccaattcctggccaggcagccagactgctctttctagcccagcctccc

SEQ ID NO: 616746 - DNA, 683 bp, Homo sapiens
cgcgtgagctgcccccacagtcatctgccttattacgtggccttctcccatgctgctggtgccgtgagctatgagtggccagtgacctggcgcgtggctcgggttgtaccgaggcggcattgcctgggagagctgacctagcagttcaagcgcgcaccccctctagcatggtcataggcctgatcttcctgcatgggaaaatgccctgctggttaaccgtgtcttcagtgaacgaagctaaactgcacccaccaaggttcctgcatcgggtctagctagcacaatctttgctgctcgtcatcgccctgtgttggcttggtggcggtgttcgactaccacatggacagaacgggctacgctgaccttgtacatgcctacacagtcttggtgcgggggactccttgtccttttgtccttgtactttgtgcagttgccttggtagggctatcagcttcttccttgttccccggagcttcattctccctgctggaggccgctacctgcccacagcacattcttcttgaggtgctaccatcttcctcctttccgttgggcaccgccttggtgggccctgaagggaggcccctgctgttcaacctcgggggcaaagtataggcgcattggagccccgaggggtgtcttgtcccacgtgttgggcctgtagctggctgatatacgggggg

SEQ ID NO: 616747 - DNA, 256 bp, Homo sapiens
  misc_feature (205)..(205): n is a, c, g, or t
cacgaggtgggatgccaaggcaggcggatcacttgaggtcaggagttcaagaccagcctggccaacatggtgaaaccccatctctactaaaaactacaaaaatgtaatcccagctacttgggaggctgaggcacgagaatcgcttgaacctggcaggtggagccgatatcgtgccactgcactccagcctgggtgatagagcganacgtctcaaaacaacaacaacaacagcgtatctccagtgagtaacaagagt

SEQ ID NO: 616748 - DNA, 383 bp, Homo sapiens
gaactccgtagcaagtgtgggtctggggttggaagggctgtggagtgagagtgaggaaggtagatagggccaattcactgggaccagttttatagcaggcacatcatattcattatttctaatccctggcaacacccatacggttaaacattaactcaattttatgggatggaaaaggtggtggctctaaggacattctctaactcacccacagggcaggtaggctaatacattcaaggaggtcaggaaggtggaaacctcgggtctggtctcacagggccatggccatttcctcaatggccaggtctggctaccaattttcttcctggccctattttccactatttaattggcataaaccctttggctgtcacctcctcttc

SEQ ID NO: 616749 - DNA, 1814 bp, Homo sapiens
atgatgccatcgatgtcgaaatgtcgacctgatattgggagaacacgcagtctgtactatgtacggaggtgggccttctttgaagggccgctgtagctgaggctctcgtacctatgccattgttgaatacaagtattcgggacatccagttaaatctgcctcgcgtcatattaacataagaggacatgaacataaagcgaaaacaactaatatatggacgagaaaaatacgctatagtggacttgtgaagtaagtaggtgagtaacacactgatgtaaaattgctagaattacaaatttgtgtatcagcacaagaactaattgtaaactgatgatcttcaaataacaaaggtgaacacatatggcggggaagtagatccctacttaaacacgctcaccactaactaccaataactattaggcggtctcactgggacaacatataaatacagtggacaatacgaacgacaacagacgcactgagttgttcgcgagctatccgcgtgtacaacggcacatgagaatatacaagtaaacacctgaggcccgcccgatcaagaccacttcgccgcgcaacgacaaacacgcggccgaaactccgcccgttgctcactatctcacctacctgccgcggaagacaagcagactatcgggggattttgacaccacgagtacaataccaaattacgagggaaatcccacgagacccgttcggatgtaacacagccaccgactacatcatcacaaaatcgaccgttccgcacctgctacaaccagaaggggggcttaccgttggcatcccgtaacaccgttgatagggcgcacaaagagatccatcgaggaacatactacacaaccaacatgccgcggacaagggcaccatcaaacagtaagctctgcgtagggacaacgtagggaaagtaacaataacgacgagcactacatcgtgggcaagacagaacaacagcgagtgaacgacagcagtgtgcagaaaaagaacatccccttctgcaataaccgataccactaatacgagacagccctccccttagtgtgcacgccagaaagacaacgtaagatggccagaacacaacacagagcaactcgacccactaacaaggtctggtgcgacgccacggaaacgcacccaatataacgcgcacagaatcgacactgcggcaactaccgagtgcgccaacacacacagtgacgccagagcacagcccacccgactggccgaaccgacaccaataaacaacggaacacagtgtaccaccaaagacaataagtcgcacaaaacaaacaaatatgtgaatatgcacaactagttgtgtacctctgtggtttatataggtgaaatatttgacgaaaagaagatattattgtaaatactactaatatctaatagactaatggttttgatgttttgatcacataatgaacgtgcctcacgacaagagtgacagaatcatcagccattgacacactaaccacaccatcaacacgatgaaggaacaaggcagcgcacaatgtagctctaacgactcgagtgctacatcgcacctgacgactaccacactccatcgattcaaccagcatacaccacatgaggcgagagaccagtagcccagccccacgcaccgtgcgacgacacaacaaacaagattcgacggctgagcacagcgcgtagataacaagaaacacagtcgaagacgcagatcagcaccgaccatctatagcttaatcaagacatatgaataagataatacacacataagaaagaaagcgtgacgtgtcatgaccctcacctcaatt

SEQ ID NO: 616750 - DNA, 299 bp, Homo sapiens
tcgaggatccccccccctccccgggtaacagcacgtgacataacctgtagcaataaacgaaagtttaactaagctatagtaacttcagggttgggcaatttcgtgccagccaccgcggtcacacgattaacccaagtcaatagaagccggcgtaaagagtgttttagatcaccccctccccgggtagaggtaaaactctcctgttgtgtcaaaatctactgctgacgcagatttaacttctatggtcactctatcatttctacccacactgtagctagaacccccactgtgcttagact

SEQ ID NO: 616751 - DNA, 908 bp, Homo sapiens
  misc_feature (110)..(110): n is a, c, g, or t
  misc_feature (857)..(857): n is a, c, g, or t
gggggtttgggggcctggagcttcacagtctatcttgctgacatgaaactactttttatgttcaaaatcatttttataggttatgctattaattgctagattggcattangaatgttacacttttagaagtcacttttttaaaaaaaagtatttgggacagtatagtttgttaggtgggtgtccacgagtgactagctgtctttccataggtctggtttggtctgttgtattcacaaggtccttatgcctcatggacagtgtgaattaaagttctattatctagaaaaggactgactggtgtgctgatggaaagtcatctaaactgatttgatagcatgtatgaagtaccttgatgagacttcctactctggaatcttatgtgtatatttaacaaaaaagaacaatgtagtttctttttgccacttcagtctgggtttatgccttgtaaatgagtttgctgtgacacagagaatgtgaaactgctattttgtcaggcagtgttcctaaataagcatttcagttgcactacatatatgtgggttacattccaataaaccttatcatatgttgagaatatcgtaagtcaaaaatgcatttaagaccctggaaaacccattagaaagtcaaaaaaattgtaagtcaaaccatcataagttgggtaccatgtgtattaaggaaaaaaaatcaagaaaatattaatggttgtttataatcttaacatatctgctttaactttgaaattttcaaaatttacagtgagcatgcattttataatcagaagatgttaataggctaatttaaatttgttagatttttaccatttttaagattatgtttaaaaacctgtatgagagancatatttggagacaggaacaaaaatatggcttggaacagaaacagtatgtg

SEQ ID NO: 616752 - DNA, 487 bp, Homo sapiens
gtacaacaggctgcccgccactgttatttaccactggacgacggtcacattacaccatctagtgtcggctggctcaatgcaagcattggtcatctctgctacagaaagctgctcatggtatgctttctcagcctagatagacaggggcatatgtgactcagattggaaggtaggatgccggggtatagcaaccaggtaggtctgggagattctgtcagtgtcaactattcatcgctccctcacatctctaggtagcattgatggaggacacaatctggctaataaggtgcttagggtcaacgtaatgtcgtatgctcgatctcgatgttactatgatagatgtaatacattgcctcattgtctaccctgaacggactatccgagtgctccaggctggagtgggtgacgaggatggagtagtaaggctcaactacaggtgtggtaagcagcggcgccggttaactagagaactccagattgtatttct

SEQ ID NO: 616753 - DNA, 1183 bp, Homo sapiens
acgcacagctacgtgtctccgacgggagcctgcgtgtacaagtgcaggcaacatctgcaaccacgttcttcacccgaggcttccttaaggcggtcaccagggagtttgagcctttgctgaagccacacgtggctgtgaagaaggtcccgtatgtggatgaggaggggaatctggtaaagccgctaaaaccgaacgggactacaagactggacgacacgttatgtgtattgactgtgttccggtttgctaacgaacctttgctgccttggaacgtgctgcgggacggaggaccttttccccactgacacgaaccgcagacgccagaccgacagggacagatccccgcaccgacatcgcacaggccctgcatcaccacagacacataccggatgggacatctgcgggccggggcaccgaatatcctggatgcccaatggaggcctggactcccagagctgcaccagattgcccccaaatggagaccctccggacatctgtgagatatcgcccattggatgtcttacatctggagagggttaagaagtgtacctgcaaaggccagggaagtcccaagtccaccgactcaatccttggatgaagaccaaggccaagggagccgcaaactgcaaggagatacatgaccacgaccaggaacatgcacaccgaggaacaacacaacggagaacaagaaagaccacagagcaatcctggacagacacaccaaagacacaaacaacacacctgaacagagcacaagaaagaaccaggagcaaggacgcgacaaacaagacaaagacacactaaaacacatgaacaaaaaccaacacgacagcacaacaagaggacaggagaacagaacaaaaaaagagaacaagagacagacacacacccccaaaagacaaggaacaaggcacgacagacaaacgcgaaaaaacaagacgaagccaaaagcaggaaacagaggacacgaaccaacgcaagagcagaacaaagagaagaggaacagagacaaagaccggagacaatgaggacaaaacacacaccaaggaaaaaaaaacagggaacagagcaacgaggagccgaaagaacaaacaaagaggaagacagtgagagaaggcccgcagagcagcgagaacaaacagggagcgaagagcagcagaaaacgggacacgcagaagatgaa

SEQ ID NO: 616754 - DNA, 150 bp, Homo sapiens
tttgagagacttagtgatattctgcagtgagatacacgagttggtactcatgtctggggaatggaactgggaatcagagtggatgaactcttcatcatggatccttcatgttgtttgaatttttaaccagtgtgcacatattactttttc

SEQ ID NO: 616755 - DNA, 191 bp, Homo sapiens
gcttacagtctgcgttgttactcggaaccgaacttcgcgctaaacatcgtttaatcaccgatgtttaggtctggtctgaattcctttacccaacgcagattgtacgtcacggttctaggattcagaccggcactatcgggcgcgggttaccacttcgtgtagtgcgagacggtagtcctgccgtgatgcct

SEQ ID NO: 616756 - DNA, 143 bp, Homo sapiens
tactgttctcctgtaccatcattgcctgctagcaaaaaaatgtgtgtgtaacaacccattcttacaagctttacctaagagcgagactataagctctttttatagactctgatatgtataaccgacaagtgtgaggggggtgg

SEQ ID NO: 616757 - DNA, 186 bp, Homo sapiens
gagcctcgtctacaaccatcgagagggacggaaaggcctactcctcctcccgcacgcctccatctcccctgtgcgcgtgtctcccaacaaccgctcagcaagtgccccagcttcacctcgggacatgatcagcctcaaagaaaggaaaacagactacgagtgcaccgggagcaacgccaactacca

SEQ ID NO: 616758 - DNA, 1431 bp, Homo sapiens
ggagctcgggccaatcagagggacggccccagaatggcatggtagatggaacgcagctgagaggtctgacaagatgtaccaggtcccactaccactggatcgaggatgtggacccatgagatacaggaatccagcttcaccactggtgagccctgagtcaacggtcatgctgtccacattgatcgcacttcactcttctgcaatccatctggtccctgctcattccacattcaaaggagacaaacagagaccacacaacatgatgggagatgccccaaatatacctgacccatcgagatgcagcatcaggccatcggacgtgggagagtgcccccagacgcttacgatgctggccgtttacatggcatcgagcactgccacatccgagcggaccatccggaataatcatatgagatgagcccatatcagacatcacatggagaaaacaacatacacattcaagcttgcaacacatcacacacgattgattacactgactattccggacacggcatcatggacaggccatcaaagatatcgagaccataaacaagtacaggtggacagaaaaccactcagctactttagcatacggttggcatacacactatattgattcatacacataccaataccagaagggaccgatacaccccaaatacaaccgaaacacacactgcattacccaacacggtggtacacaatctgccccttccagtcccacatccggcgagacacacatttggagaacatcaacaccatggcacattacctccttggagccggagactgggacccgcacaaggacaagaacaacacagagaaacacgagcccacgagacaggaatacgacaaaagatccaaacacacgacatggagaaaaaccagacgggacgcaacaacaacaaacacgacaacagcgaacgccagccacccaccaaccatacgaggccgagcagagcacggctacacaccataaacagcgcgacacaaaacatcgcacactggctcaacagcgccggaacaacaggacacacaacaaaacagatgagcacaaccaggaaaaatcacaacgaatgaatcagaccaacacacacaacggtgaatccaacagtcacagggcacagaagtgagaacgaacgcacaacacagcagagacgccagcgacaacacacacagcgacacacaggcacgaaacagcagacggaacacacaaacaaaacgcaagagagcaagaagagaagacaagagaccacacacgacaagaacccataagagacagccgagacaaacaaagaagaaaacaggcgaaggaaagagacgaaaagacagaacaagagacaccaacaggagaacaacatcaaacaacaacggaacacgaaaacgacgagacaaaaagcacaaacggcgtcgcaaaaccgaaacacgaca

SEQ ID NO: 616759 - DNA, 295 bp, Homo sapiens
aacaaccctcccccacatagccatagataactattagtcttctttttgtctatatagatttgcctattctggatattttctataaatggaatcatataatatgtggtcccctgtgttctttcaggtagaataatgttttcaaggttcatccatgttgtagcttgtatcagtatttcattttttattactgaataatgctccattgtatggatatacaatttatccattcatcagctaataggcatttggattttccaccttttggatattatgaataatactgctctgaacattc

SEQ ID NO: 616760 - DNA, 792 bp, Homo sapiens
  misc_feature (294)..(294): n is a, c, g, or t
  misc_feature (316)..(316): n is a, c, g, or t
  misc_feature (361)..(362): n is a, c, g, or t
  misc_feature (405)..(405): n is a, c, g, or t
  misc_feature (421)..(421): n is a, c, g, or t
  misc_feature (440)..(440): n is a, c, g, or t
  misc_feature (450)..(450): n is a, c, g, or t
  misc_feature (453)..(453): n is a, c, g, or t
  misc_feature (463)..(463): n is a, c, g, or t
  misc_feature (465)..(465): n is a, c, g, or t
  misc_feature (477)..(477): n is a, c, g, or t
  misc_feature (479)..(479): n is a, c, g, or t
  misc_feature (481)..(482): n is a, c, g, or t
  misc_feature (486)..(486): n is a, c, g, or t
  misc_feature (493)..(493): n is a, c, g, or t
  misc_feature (496)..(497): n is a, c, g, or t
  misc_feature (516)..(516): n is a, c, g, or t
  misc_feature (518)..(518): n is a, c, g, or t
  misc_feature (524)..(524): n is a, c, g, or t
  misc_feature (536)..(536): n is a, c, g, or t
cggcctattaaacttgggatttttctggttgattcaatggcagtatgttctctctgattccaagtatggtatcttgttgtagaaacctagtagtcatattgatttttaagacgactttatgttctatcttaatcatgtgaatttgtacttcttgagctgccttgaatgcaaggtcatttatattttgttaagaggaaataatcaagatcactcatatgcccaactgaatctgaggttttataaatccctcataacgattgctgagagcctgattgtggaaagaagtgagatgcnccttattttcaagaagtcctgngaagcgctctcctagcacgtccatttccaggaggagaagcaagcnnatgagaggttttccattttgtcatccaaggtagctgtgcactngccttgttgctgaagntccaataatgtgaaaaccnaagtagaggnttntttcttcttntnttgctttctatnantnncacntataccnaanngtctgaaagtatgaaatgngntgcttnctgagttatatnaggctacttcatgaccaagaactgctctatggaatacatgcagcattgttgttactacataacttcagatcactcatgtatctacatataaattcagattatacctaaattttccaaatagctatgtgggaatgactgattttcattttagtaacgtaagctggaaacattttgcattgttacaatagttctcaatggaacaatggaaattttcgaaagctgagtatatgataaacactgggtcgtgtatgtattc

SEQ ID NO: 616761 - DNA, 723 bp, Homo sapiens
  misc_feature (701)..(701): n is a, c, g, or t
ggctttcgagtgcatgacattctagcttctgaattgcgtgcacacacacacgcacgcacacactctggtcagagtttattaaggctgtcgagtcatgacattatagcttttgagttggtgtgtgtgacaccaccctcctaagaggtgtgtgcttgtaattttttttttcagtgaagatggattgaaaacctgttgttaatgcttagagatattatgctccaaggaaattccctcgaaccgtgtcaattaaactgggttatatgactcaacactaccagcagatgattattaactctattcttggctctttttaggtccattttgattaagagactcttggctggatcattcagagctctcttctagcctacccttggatgagtgcactcaatgaacttcatattttcaaggacctgggagccttccttgaggctgtgttagaaggtgtggggttgggggagtcctgctacacgccagctctgtcgtagctgtagaggaagggatgaaaccagctgctgttgcgaaggctgcttgtcattgatagaaggactcaccgcctcggatagactaagactaaacatggagttggcaaactttcttcaagcattgagttctgctcactgcactggacacgcgatttaagggtagaagacgagagctggcggtaggggacagacttggaggtggctgttcccactgtntcctccctaattcggtgcactg

SEQ ID NO: 616762 - DNA, 956 bp, Homo sapiens
tttcccaagtgctatagcaataacagttgatactcatttaaggtaccaaaccttatgagttcaactgatcaaaccaaaggcaccacagctgttgctcagagaaacctcggggaacaaggtgaaaaagacaaacacactggtagtcaattgagcagaaaacaattaattctcatatactgtattgacttggcaacccagactttactctaacgtagaactgaacttggcctaggaacaaaagaaacaactgacatgttaagtcacttttcctaagactgtccattttgaggcttagctcagctcttattgcggaaacatgtttaagcgattcatctccattgcctaattcagtaactcattattactgtatgtttacccctatcagtcaagactatctcaccacatctttacgctctcttcatacgtgacctgcacacaggactctcatctattctacaatttactaccatgctgttgctcagatcaatattctgggcctttccaaggcataattattaaccctcttacacctttccaaatatgctttacacatttactagccggctcaacttggtcactacgcgtcatatcctactctgggctggtaaatcatctaaacagacccataattatactctggacacccaagccaacaacctataggggcctttcggcactaaaatttaattaacagggagccaacgccttcggaagattaaaagattaaccgcccaaaccctttcaacttttctctcccccacacccaaatcagaacaccttggttccacgacctaagctcttgggacccttggaccattctacatcctcgcttcgaactagcttaattcggtaaattaccccatggacatcaaaacctaacttgcacccaaacgaacaaattccactatctcatacacgcaccgttctccggcaagttatgaccttaatcatgcaac

SEQ ID NO: 616763 - DNA, 1356 bp, Homo sapiens
ggaggagagagagagttttttttttattttatttgaaggaaatttggtattattccaattattttagatgtacagaaaactcaacgtgtgtccatttaccccagtttaggggcaagtccttatacccttgtgccttttcaagcttggcgatacgagccacagacttaggacccaggacatttgccaccccagtgacgggggatctcatcgtatctgtcatggtacatgggtcctgatagctaccaccagccttagccaaagcgccttgagtctatccgagtttcacctgtgtgaaagcgcgacatggtggttgcacggtctctccgtggtggaccataaagcgtcccaggtcttgtgcctttccctttgaataatgtgcagaaaggtgagacccccccagtttgtacgaacaacagagtgcaggcaaagaagagacaacccaggtgtcgaagtggaggactcccaccgttcgttgttgcaaatccaccacacagtcttgagcttcgccttggtatctacacaccaaagggttgggtccgaccggttgtaaaactccctgtctccagaatggaccactgttggtcactcctacactgtatagagagacctgtcccctcttatggcccaggaaagcactgttctctctcgaggccccggggcccaaacagagtcctacggagataccatctcctcatgaggaattgaggacctccgtgagcacagtagctacactttgagtgggggccaacggtttttaacaccaggtgtgaagtataagcgtgatttgtggggggggctcccagcgcccttttggatgtgaacaccgtgggtgaaaattcggcgagagacgggcaactttttcagacccgagtttttataacaagggaatgggcctcatactgtgtcagggtgcaaaaacccgtggaaaaactatggcgggcgggacccaattttagtcacgacaaagccggggcgaagtaaggactctccatatagagggacgactaggaaattgctcactttgcttcccatgagtcgccgaaacaagttgtcattaagagggcgtttgttctctcacgacgggggggaatttcacgccagttgtgagttagtacgcctcccggtgatgttgatgccgggcacaggtgttgtggccagcggaagcccagctgtgttttcttcccggttggtgcctgtgtgttagccttttgggggcacttgatggggtggcgtaggcgacgtgcgccctgtcgtggttcgtccccgcgtggaccacagtggtgtgtctggcacacacacggttgttgcgtcgtccccgtgtgtgtgcagccgggtgccgcggagcgagaggcgccc

SEQ ID NO: 616764 - DNA, 140 bp, Homo sapiens
attcaacgcgttgtgagctctccatattgttactgcatgtggcggaatcactataattgagctgaggaggagctgactatcgctggttcatggcatcgacgtctcatagtgtgtctccagctcgtgctgcagtatccggc

SEQ ID NO: 616765 - DNA, 126 bp, Homo sapiens
ccctcagcgactcaacctgctttttctctccctgtgtctttgggaagctgccatcatttgctctgtccccaagtctggacaccattttaataataataataataacaacagcaacaacagttaaaa

SEQ ID NO: 616766 - DNA, 457 bp, Homo sapiens
cgatattatctttgatctgtgagaaaccctcttggtcactactagatagatatacaactattgtttctccgacatgtacactcgcacgccaattttctaaaactagtcctccttaacacaaatagtggtggtaacattcaaccataacctaatcagtgtgtccattatgcttccacgactagccagtcttctcacacttcttctggtttcaagtctcaaggcctgacagacagaagggcttggagatttttttccctttacaattcagtcttcagcaacttgagagctttcttcatgttgtcaagcaacagagctgtacctgcaggttcgtaagcatagagacggtttgaatatcttccagtgatatcggctctaactgtcagagatgggtccacaaacataatcctggggacatactggccatcaggagaaaggtgtttgtcagttgtttcataaa

SEQ ID NO: 616767 - DNA, 159 bp, Homo sapiens
attctctagcgtcgcctaagacgtctgttgagaatacagtgttaactgtccttaaggctgagaacgacgagatgttcgccgagggcgtctttgattgtgtagtactgggtggaacggtgatttcccgtagtgcgaggttattcctaagggggtgtatgg

SEQ ID NO: 616768 - DNA, 278 bp, Homo sapiens
tggtactggtacaaaatacaggcacatagaccaattggatcagaattgagagccccaaaattaggctgcacacatacaaccatctgattctttacaaacattacaaacttaactgagaaaacacttccctattaacaaagtattcaggagaattaatcttggccccttcctttaccacatttcaaaaaatcaactcaagattgagttaagagcttaatttaaacccaaactataaaatccctgaagagcaacctgggcggatcccttttgagcatgga

SEQ ID NO: 616769 - DNA, 310 bp, Homo sapiens
aaggggggggggggggaaaaaaaaatgtaaaggggggggttttttcccgggcggccccatttttgttcttcccaggggccccaaataaaagaagggccaacccctcccccccccttatgttttaaaggtttccagtttgaggggaaccaaaaaagtgttttttggggcccaagggggggggttttcccaaaaggtaaaatttattttttttttttctttgggttttggtttttcccccgcccccaaggggggccttggtaacaaatcagaaatttgccaatttatgttttaagggggggtttgcccccca

SEQ ID NO: 616770 - DNA, 110 bp, Homo sapiens
caggatttatatggacctgcgctcgcgatgtgctgctccctctccgacgcttctgctcttcggccagctgcttcaccctgcagctgactcctgcatggtctgccaggctc

SEQ ID NO: 616771 - DNA, 337 bp, Homo sapiens
acatcagggagtcataaggaccattatggctcattacacacagtactttatggaaaggattatctaacactatgcgagagaaccctgctagaacatcatgaaagtctggaaggatcacagcactgaagatgccatcgatacacaaaaagctgtgaaagcgttaaacccttttcaacacacttcccctgtggaggaaactgtgtccagaaggtgcgcctgacttcacaagattttcaattcagcccacccaggggattaccaaggaaatcatgtacaccggaaaaagggtggtgaggtgaaggttttcaaatattcaccctggggaaatttgggagcc

SEQ ID NO: 616772 - DNA, 417 bp, Homo sapiens
  misc_feature (46)..(46): n is a, c, g, or t
ccttcctgagcccctagtaccacccatctacttcggttctagaatntgactactttagaacttgatataagtcgaatcatacactacctgtttttttgtgactggcttacttcacttagtataatgtcttctactttcatccatgccatacagcatgtgacatgacttccttacttttttatgactgaataatattccattatatgtatatatcacattctgtttatccattcatctgttaataggcacttaagttgcttccatcttttggctgttgtgaatagtgctatgaaaatggatgtgtagctctctctttgagagcctgctttccattcttctggatatatacccagaagtgggattgctggatcatttggaattctgttcagttttctcgggaacctccatcctgttttc

SEQ ID NO: 616773 - DNA, 274 bp, Homo sapiens
gatgggtcagatggacgtggaagtcactaggaacgcacccagatattggccaaaagccagtcgtataaagcataccgaagggagcgaaaatagggtactcatactacccggagataaggttgagctaggataggcaatagtggacaatctatgtaggccaggtacttatacagcaagcagatgggagcggacaggaactggagtagtgcaggggtctagtaaaagtacggcatacgaagccatccagcagctcaaaagtccacgatagaaaata

SEQ ID NO: 616774 - DNA, 517 bp, Homo sapiens
atctggcgaggcagtctcagctgagcctagcccagcaagccagtattgcctgaataaacaactgtggggagagaaggagaatgtacaggattgtggtaccggacccgaacaaaggtgtgaagatgtatatggcatggcatgtttctgggaacccactgaagtggccagtgtgtaagtgacttgactttgaagctgggagggcatgctggcaccacataaaactaatgctaaagagtttggactttatgtcataaccagtagagaatcaccaaaggtttctgaaccagactaggacataattaagtaaatggtttagaaatataagtatggcagcaatatggcaaaaggactgggaaatgaggaagcctgaaggcaaggtgagcagttaagaagtttttttttatactggtgttaacaatatcctcggcacaatgatttccttatcatctatgacaagatgatagcttctattaacaaatcaccccaatatggatactcccattgagacagaacccac

SEQ ID NO: 616775 - DNA, 205 bp, Homo sapiens
  misc_feature (6)..(6): n is a, c, g, or t
  misc_feature (40)..(40): n is a, c, g, or t
  misc_feature (104)..(104): n is a, c, g, or t
  misc_feature (125)..(125): n is a, c, g, or t
  misc_feature (136)..(136): n is a, c, g, or t
  misc_feature (200)..(200): n is a, c, g, or t
tgcctntggcccgcactcatagaaacattcacacaccccntgcctcccctcttttccctctccgcctcccccttccccccctcttgttatgaagacccgttggnaggagaggggatgaagatggnggacgcgaagnagaagcggaacgagcagttgaaacgctggatcggttccgagacggacctcgagcctccggtggngaagc

SEQ ID NO: 616776 - DNA, 229 bp, Homo sapiens
tcgagccggtcccacttcacatttagcatgttgttaacaacttttcacagccaaccctgactttcaggaagtgaaatgaaaatggcaggacttatctgaagatccacagtctagaaaaagcaaccactgctcttttgagggctgccatttcagtggcatcactggaaagtttgactgcctgacatattggtaaccagttattgggggttaggtcccaacaggtgtctgg

SEQ ID NO: 616777 - DNA, 294 bp, Homo sapiens
  misc_feature (44)..(44): n is a, c, g, or t
ccccgcccacccgaaaccaggatactctactggcacctctccancgggctgaggaagcacagcagcatcttcaaacatgtacaaaatcgattggctttaaacacccttcacataccctccccccaacttatccccaattatccccacacataaaaaatcaaaacattaaactaacccccttcccgcaaacacaacaaccctcttaaaactaattggctttttagaaacaccccacaaaagctcagaaattggctttaaaaaaaacaaccaccaaaaaaaatcaattggctaaaa

SEQ ID NO: 616778 - DNA, 412 bp, Homo sapiens
  misc_feature (259)..(259): n is a, c, g, or t
ctttttaggccctctggtaatttattaagtatgcacacagccagaattaaccttttcaaaaagtataggtccaggtaatgtcattacccctgcttagaaccttccagtgttaatcagtaaaatccaatgacttggtcaggtgtggtgactcatacctgtaatcccagcactttgggagactgaggcaggatcacttgaggccaggagttcaaaaccagcctggccaacatggcaaagccctgtctctacttaaaatacnaaaatcagctgggcatggtggcaggtgcctgtagtcccagctgctcgggaggctgaggcaggagaatagctggaactcaggaggcggagactgcagtgagccgagatcacaccactgcactccagcctaggtgacagagcaagactccatctt

SEQ ID NO: 616779 - DNA, 362 bp, Homo sapiens
cataactgcatggttcaaacctaatgtttgttgcctactgaccccacggcctcggtcaggttgtctgagctctccgtggtgtttttctcagttgtaaatgggataaccagtgttcttctgaggatttgcagtgcgtggaagccttggcctgacgtgtcctacggtgtgctcttcactgctgctctcaggatgactatgatgatacctttaatgtttcataaatggacatagtgtatagggttcttgtagatatttttataagattagtgaagtttgtatctattcttcagtgtttatgttgtaggtgggtattgcatgctttgtttgtttgttttgacagagtgaatccgtctttaaaaaaa

SEQ ID NO: 616780 - DNA, 329 bp, Homo sapiens
  misc_feature (77)..(77): n is a, c, g, or t
aatggcttcctgcctgtaaatccagccagtttgggaggcccgacgcaggcagatcccctaaaggtgaggagttccanaccagcctggccaaggtgatgaagaggctgagacaggagaatcacttgaacccaggaggcagaggttgcagtgagccaagaatttgccactgcactccagcctgagcaaccagggccaagcttcgtctcaaacaacaacaacaacaacacaacaaccctcttaaaactaattggctttttagaaacaccccacaaaagctcagaaattggctttaaaaaaaacaaccaccaaaaaaaatcaattggctaaaa

SEQ ID NO: 616781 - DNA, 172 bp, Homo sapiens
gcaggaagccaaccagcacaaaaatagagaattaaaccaccaaagccaaggaccctcacggagtccactacacccctttgccacctccaacagaacaggtactggtatccatggctgagagaaccatagacccacatcacaggactctgtgtagacaactcccagtacggcg

SEQ ID NO: 616782 - DNA, 278 bp, Homo sapiens
caagtagtgagacactgagcaggaatccaaaaatgagtcaggtactatgcttcagtgtgacaatatactgcacaggctatcactctgacagctactgatgtaaggacaccctggttaatagccttaaaagcatattctacttggtagagccgaccctcgggtgaaaaaatggtcatgtggcggtcaaaaccggcgctggaaccacgggacatgtaggtagaagcactactttaaacacaatccctgggccccgtagctcccgcaccaggcacccgcga

SEQ ID NO: 616783 - DNA, 275 bp, Homo sapiens
  misc_feature (158)..(158): n is a, c, g, or t
gcacacacagcctcacacaaacatcacagcacgtgggtctcatgggcacatgcaaataacacacacggacttcacagcactcacatgggcttcatgggcacacaaataacacacggatgtcacagtgcacagcctcacacacagaatcaaagcacacntgtgggcctcacacaaacatcatggcacacacaaacatcacacaccgatgtctcagtacacatactggcctgcacggatgtcataaatgccacagcacacatgtgggcctcacaaac

SEQ ID NO: 616784 - DNA, 489 bp, Homo sapiens
aggctacaagacgtataggaaataattaatatggccatagtaagttcttccctgtcagtaattattttaaatgcaaatagattaaagtccccaattaaaagacagagattagctgaatggactaaaaaccaggatccaactatatgccatctacaagagtcccactttatatcttttcaaataccaaactcttgtggccaggtgcagtggctcacgcctgtaattccagcactttgggagaccaatgtagaaggattgcttgaagtcaggagttcaggaccagcctagacaacatagaaagactcttgtctctaaaaaagttttttacttagtaggcatagtaacacacacctgttgtcccagctactgtggaggttgaggtgggaggatcgccgtgagcccacgatgttctaggctcgcagtaggcatatcataggtgccacgtgcactccacgttggtgtgacatcagcaagacacactgtctctta

SEQ ID NO: 616785 - DNA, 165 bp, Homo sapiens
tcacgctttatacttcagtaaagaagaaatagctttggaggatttgagatgcaagaaaaaaatgacaagaaatgtgtttacatatggtaatctaagtggtctgtatgttaaataagaaattagaagaaaaatgtcatttgtgggtctgtaaaaaaaagagaaaat

SEQ ID NO: 616786 - DNA, 271 bp, Homo sapiens
  misc_feature (128)..(128): n is a, c, g, or t
  misc_feature (131)..(131): n is a, c, g, or t
  misc_feature (149)..(149): n is a, c, g, or t
  misc_feature (152)..(152): n is a, c, g, or t
  misc_feature (163)..(163): n is a, c, g, or t
  misc_feature (174)..(174): n is a, c, g, or t
  misc_feature (187)..(187): n is a, c, g, or t
  misc_feature (206)..(206): n is a, c, g, or t
  misc_feature (214)..(214): n is a, c, g, or t
  misc_feature (216)..(216): n is a, c, g, or t
  misc_feature (220)..(220): n is a, c, g, or t
  misc_feature (241)..(241): n is a, c, g, or t
  misc_feature (246)..(246): n is a, c, g, or t
  misc_feature (248)..(248): n is a, c, g, or t
  misc_feature (251)..(251): n is a, c, g, or t
  misc_feature (270)..(270): n is a, c, g, or t
gggaaagcctttgtcagtattaatcccttaattgacctaagtatactcacactaggaaaaatcctgtgtacatgtagcaaatgtgggaaagactataggcaatagcgaaatctcctcgcgaaaaactnccntaccagggagaaaaaagnttngtatgaaatgntgggaaaactnttagaaaattganagggaattttttccagttnccaaagtngncatncccttaattctaataggaganataananctnggagacaaaatctcatttna

SEQ ID NO: 616787 - DNA, 120 bp, Homo sapiens
  misc_feature (2)..(2): n is a, c, g, or t
tnagaggatcctaaagaccaggctgagcttaggagtaggaagagttcttaggctaccttcatctactccacaagtgaaaagcccttagcgtacagaaaattccaggttgaaggtctcttt

SEQ ID NO: 616788 - DNA, 1071 bp, Homo sapiens
  misc_feature (225)..(225): n is a, c, g, or t
  misc_feature (247)..(248): n is a, c, g, or t
  misc_feature (258)..(258): n is a, c, g, or t
  misc_feature (262)..(262): n is a, c, g, or t
  misc_feature (272)..(272): n is a, c, g, or t
  misc_feature (312)..(312): n is a, c, g, or t
  misc_feature (368)..(370): n is a, c, g, or t
  misc_feature (375)..(375): n is a, c, g, or t
  misc_feature (377)..(377): n is a, c, g, or t
  misc_feature (379)..(379): n is a, c, g, or t
  misc_feature (420)..(420): n is a, c, g, or t
  misc_feature (427)..(427): n is a, c, g, or t
  misc_feature (441)..(441): n is a, c, g, or t
  misc_feature (466)..(466): n is a, c, g, or t
  misc_feature (484)..(484): n is a, c, g, or t
  misc_feature (488)..(488): n is a, c, g, or t
  misc_feature (514)..(514): n is a, c, g, or t
  misc_feature (526)..(526): n is a, c, g, or t
ctctgcacaggccagttagccagctcaagttcttttgcggagaaagggacttggccatgtggtttaagtacctgccccttcacctctcagacgaggcagctgacgaggcagctggcccagtcttgggagtctgctcaggacagtggtggagctgggtcttgaaccccagtctgcacctaaaaaactaaaggaaatggattttctttttttttttttgaaacgganaactcactctgttgcccagaannggagtgcagnggcncgatctgggnttactacaacctccgcctccggggttcaagcgatcctccngcctcagccccccaccagctgggactacaggcacatgccaccatgcccggctaatnnntggantnanagtagagaccaggcttcgccatgtgggccaggctggtctcnaaccccntgagctcaggtgantccacctgcctcggcctcccaaagngggaaaggggctcatttncaanggggcaacagggataccatcccgtgnactccggggccnggctcttccaatgcccaaggcatggcatggtgggcatgttggtgcccccgcccatggtctttgggagcacagatgactctgggggcagaggtggggctctgtttaggagggcagtgagaccacccagccaaatggtttctcaaccttagaaaaagccttgggccaagagggaggtgctgttagtggggcagcccttctggggttcagagaccggggtggctcaagacgggtctcatctccatggcctaaatgccaggtggccaggagtacccatgcacagagcttgtgcggtgtgggcatctccggggtggtgtcttggtaaaatccgttagaaatactgtatgaggaccccgtggcggacctgacgttcacggggggcgtgtgatttcacccggcccctgcgtagggctgccaaggaaggccatgggggtggaagccccgtccaccaatgttaaacccgctctgtcccaagagggttccggctgcccaataaagacccgaaaaagagaagggcccaacatctcgggggcaacaggaccacgttc

SEQ ID NO: 616789 - DNA, 486 bp, Homo sapiens
aaggatgaagacgggtgccttctgggatagcatgggtcacaggccacctattcaaataccaaagagaatgggatcaatggagagctgacctcagctgacagagaaacagtagaggaggtgtctgctaggatagttcaagtactcactgctgaggctgtaacagtcctgaacggtgaacaagagacagaagctcaacatagagagcggactgtagctctgcctttagtgagctgacgaaagagctaatctgcctccttctccagccccatcagctgcctcagaaaagactgtcacagtgtaggaagatttagttacaggtctcggaagatggagttccacgatcagtaggaatggactccctctatagctgagccttcagatcacaaggacctggagtcagagaagcaaagtcagcctggtgaagaccttaaacatgctgccttagtttgtcagccagagacaactaaaacttagcctgtgggaaag

SEQ ID NO: 616790 - DNA, 190 bp, Homo sapiens
gagcgtaatggctgcgctgactttagtttcagcttagttgaaaaaaacaaaaacaaagttaaaaaaaaaaggaaaaacaaaaaacagtcacaggaacattccccgggcacaatgactttcagtgagctctcaacaagagggatgtggacacgagctggaaggagttacctcgacattacaggtgctattt

SEQ ID NO: 616791 - DNA, 120 bp, Homo sapiens
attcgcagataatttttagcttaggggcctggtggctatggtcgggttctctcctttccagtctggagacctcttgccgcaaacatgctccgccagatcatcgggtcaggccaagaagca

SEQ ID NO: 616792 - DNA, 122 bp, Homo sapiens
gatcgaaggcgagatggcggacgtgctagatcttcacgaggctggggcgagatttcgccatagatgaggatagggacgagagattcacaactgaaagaaaagcgagaacggagggtcgcgct

SEQ ID NO: 616793 - DNA, 784 bp, Homo sapiens
ggctcctccttgagtcgacggctcttggctgtgcgtgacggtccagaaggcaaatagatagccagggttatcaacgctgttagccaggatggtctcagtctccagacccagtgatccgcaccgtgctcggactcccaaacatgttgtggatttacgaaagtgtgacgcacaccgtgactcgttggactcggagggctcctgtcctgttctactgcaggatgcgcggaagggtcacctctcgtgacgagcacacgtaggtatgtagcctgttggtgtgagcaattgatcatatgtagcatagtattaacgcgagtgcacggagtcagtgcgcgttcttatcgaatcaactgaatgggtcaacatcatgggccgtgccccgactactctggtccacgtcgtgcatagcctagcctgatgtgaagggccaaggtccaataaagaatttgtggggccccgggctcacgggacactaacccccgtggtacttgagctgcgtggtagttgacgaggcgtagacgacgcacctgcaacagatgtctgatgcgaggggcaaaatgggtcttggttgaattccccgccaatggggccaatagaaaggcgcacgggggaaacgattgcccactggggaagacgccccccccttgggccatgcaccagaaaccacgcaagggagaaaagggcccggcgatcggccctcgagatggaacttccggggggtctatcgggggcccccccggagttgtgtcacccctttgtttcccctttcccgttgggggactccttc

SEQ ID NO: 616794 - DNA, 194 bp, Homo sapiens
acctctgttggcggcacgtcagggtgtgagtgggggtgaggtggcataaataggatggccccaggcctatatcactcctggactctgtgtctcccggccaggtgtgtgggccctggaaggaaatgggcccagagtgaagaattgagcatactggattacacgcgcagtgaaaagcttctagtacacagaacctc

SEQ ID NO: 616795 - DNA, 839 bp, Homo sapiens
caaatcatgctgctgttattttctacatttgtattttatccatagcacttattcacatttaggaaaagacataaaaactgaagaacattgatgagaaatctctgtgcaataatgtaaaataaacaaaaaatagattaacacgtctggtttcaagggtcgaccggagaccatttttattccaccaacaaggggttttggggttttatattttttgcccagtgtttcagaacagtgggtgatactagtgaatattaagtgttgaccagcgtgccttcttatgtggggcttttggcagtattcgtagtataacgttccggcaagtgtgagcaaggctgatgatgtggctgtgatttccgacgtctgggtgtgtggacgagtactggcattgagcagagttcttctattataaaattaccatatctggccattcacagcaggtcctgtgaaatacgttttatactggagttgtctttaaaactgacggtggtctctaagacagtgtgctgaataatgtattggtgcgggtgacctcttcgactagtgagtgtatctcttactgtttggttaacgcaaatgccgatgtgtacctgaagaagctgattcggggatgcagtggtctaggtcgtgagatgcaatccctatagagggggggggggacccctgaacaccatttgggtcaataatactggaacctttattatactttccaaggggatacaacacccagggatgcccaaaaagttttaaactccgggaaccacgtcccgtatctgaagaccggaatgcaccctcaatacttgggaaaacatggtttttgaaaggccaatacctatgaacca

SEQ ID NO: 616796 - DNA, 298 bp, Homo sapiens
tctacttcttagaaagtgatttatacaatgatttagaccctttattaggctgggagtggtggctcacgccggtaatcccagcactttgggaggccgaggcaggtggatcacctgaggtcaggagttcaggaccagcctggccaacatggtgaaaccctgtctctactgaaaatacaaaaagtagccagttgtggtggtacatgcctgtagtcccagctactcaagaggctgaggcaggagaattacttgaacccgggaggtgggggttgcagtgagccaatattgcaccactgcactc

SEQ ID NO: 616797 - DNA, 823 bp, Homo sapiens
  misc_feature (120)..(120): n is a, c, g, or t
gctgatttgacaacaatttgtagcctacttcagtatgaatcaaagtattgttttaaaaggagagattccttctgacattaaattgcgttggggcgagaaccagcaacatcaaccatccanactttaattatggaatcacaggtgcaactgcgtatctcctcagtagaggacaggaagatttgcgtgactgggactttatggatttggcatctcctgcaagatgtgtgtccaactcctgggagggctgtggcatgattatagaattggtttctattgactggtttctgtgtggtgctctttcataagttaagtatcttggatttcaaatctatagggggacacttttggttataatttcttatttaaaaaaatgggtaaatatttctatattaagtattttttcaaactatttgggcttggtatggggcagatggtctctttggattgggtatttgtggaggggctaaaaaggatcactaagacattgtggagtataacagagggagggggaagccattgtactgactactttgttatcagttaacagataccgagcttttatatttagtgatcagaagagggcggtaaggcgtctggcccttacacagacccgccccgcacgcgctctcggtagacgcactggtgttcgatccggtttgcgcgccgaacgagggcgcgcgggccgacccgcggcaggcagggtgtagtgcgcgagtggcggggaggggcgccggcgctgggtggccgctcgcggggcggacgggtcggagcgcggggcaggggccggcggctgcgcgcggcggggtccaggggccccggaggg

SEQ ID NO: 616798 - DNA, 1057 bp, Homo sapiens
  misc_feature (828)..(828): n is a, c, g, or t
agcggtggtgagaacaggatctttccatgctgaacaaagtcagacacagcagcacagtacccagtcggctagaattggagtcaaagtcccaaaggacatgccgcttgtgtgaatgtgctgtgtcacatgtgctgctaggggacgccctttgtgtacactggctgctgacatgggcttggtgtcgctttggggtggaagtggcctggtggtgtgctgggacatttgagagtccctctacctgtccagcaggatacacgtcgtctcttggatggacctattattgtccaaatatagctgatccagagtactatgtgctatcttcagtcaatggtgatgccacttgtcgcttttccgagtatgtcgatctcatgggagatcgtgcctctgttcttcttccttttatggtgcgtcctcctggctggactgtacggctttgtacacctacacgcgcggtccagttcatggcatgatcttgtgtgcgaccttcgagaccgccagtctgtgggcccggggctgagccgcaactggttctctgggggttcagacgggcgagggcgttccaagatggctctacatccccgctctgttctgttggcagcgtgcctgtgtcctcgtttgggacaatatgggtttggtgctttcccggacaaggtttgtgttgcttttcgtatgccctgaccgtgttgtggcctccgtggttgtcgccgtgatctgctgtgtctgtgtccgtttccttgaatagcgctggacatctgcagtttatttgccttgccccagttgaaagctctgcagtatggccaggttcttgtgatgatccagatgtgtggngggccgcatggaatgtttgcctggcacagttgaggctccagctttttgtcactgtaaatgttgttcaaatatgtccacggtgattgggcatttacagggtgccataggggtccgcccatagaaggagaaaatagcgtaaaatgaggggacatataccgaatctttataaagaacaacaagggacaccagaagaactatatgaaacgaaagtagccattttatcagagaa

SEQ ID NO: 616799 - DNA, 199 bp, Homo sapiens
ggggggcagcatgcccgcgcgcgctgcctgaggacgccgcggcccccgcccccgccatgggcgcccctgcctgcgccctcgcgctctgcgtggccgtggccatcgtggccggcgcctcctcggagtccttggggacggagcagcgcgtcgtggggcgagcggcagaagtcccggccccagagcccggccagcaggagca

SEQ ID NO: 616800 - DNA, 238 bp, Homo sapiens
tacaaaaaatttttaaaactagttgggggtagtggcgcacccctatagtcccggcgaattgcgggggctgagaagggaggatcacaaaaatttagctgggtgggtggtgtgtgcctgtaatcccagctacttgggagtttgagccaggagaatcgcttgaacccatgaaacggaggttgcggtgagctgagatcgcgccattgcactccagcctgggtgacagagcgaaactcgtcca

SEQ ID NO: 616801 - DNA, 946 bp, Homo sapiens
  misc_feature (310)..(310): n is a, c, g, or t
  misc_feature (328)..(328): n is a, c, g, or t
aatttcttggcccatgtggccccccaaatatgggcccgtggaccctggctcttctctcgtggttattctggcccaccccgcccttttcccctccgggttccccccgattcgagggtccccacgcgccacctttagatgaaaagttccttgggttgtgcagaaagaaactgtgtctcctcctcttggctgttaacctggcgagaatgtccccaaaatttttgtgacattcttggtgaggcccgccccatctgtgtgaacagggtctccgcggcgaaccccacccatcgtctgttggggaaccattttcctnacgcctcctacgccaccnctgtgggtgcgccactctccccgggtcgcaggataactaccgaccccaccacaccagttcccgcgcggtggggggttctactcgcaacacaccacaaggggcacgcacaacaaaggacgctcgctcatgagctctgcacgaaatgcttcccccaacgtacttccgccccagcaagagctctcacaggagacgcgagctgattcaaacgatatgtctacccctctaacacacgccgctcccaccgcccctctgctgagacaccactcgggtgcgaggaagacaccgcgccctcgcaacagacgcttatctgtgtctccaacactggcgccaccttcgagctctatgattagctatgacagaatgttgtgtctcagatgatgacccaatagcgcattgttatgacacccctctcccaagcgcaagagtaaagatctatttgtatgtggcccacccatgatcgttttgatctgctgtgggcgcaccattctttacaattgattggtttctattaaacacccgtcatctttgtttacgggacacccacgtcggcaccccacaatgtcgacgaccacgaattttgggacccccttacacaaaattaaaaagggaaacaaaaca

SEQ ID NO: 616802 - DNA, 210 bp, Homo sapiens
gcctacagcctcctgccctctacatcacattgctcatccccaccttgagctctgctatgaacaaatggagctttcttttttttttagagacagggtctcactctgttgcccaggtggagtacagtggtttgattgtagctcactgcagcctcgaactcctggcctcaatcgatcctgttgcctcagcctttaaagccgctagttgtacaa

SEQ ID NO: 616803 - DNA, 1199 bp, Homo sapiens
  misc_feature (1199)..(1199): n is a, c, g, or t
ctggatgcatctacgtcctgccgagcccctgtggtgcgaagagtgccgcgtcctgccttcatgtttgtgtgcctggtgcttctgcccccttgacccttctgcccccaaagaccatgctctatctgtgatgctgcctctgtgcctgcctctgccccatgcctctgtacagcgcctgccatgcctctgcccatgcctgtgtgtcctgtgatgacctctctgtggtcctgttgtcccattttgttgtgtgcacaatgctcatgctgtgtgtcgcatgtgctttgtgctcatgatgttgtcacctacttctgtgctgtcctgatccccatgtgccccctgactgcttcctgtgtgctgctgctcctgtgcaacctccagtgtgctctctgctgtggtccctgcttgtttcactgagcctgtgctgagagtgtggtggctctagctgtgccccttgatccgcactgtggaatgctgctgctctgggacgtgcgtgtgtgagacccctgtgctctgtgaccctgtgagcactgtgcctgcctgcctatgtctggggctgcgtgtgcttgtgctggcctgtgctggcccttcgcgacctttgcgtgcttcctgcctgccaccgtgctccttgtgcctgttcgtatctgcctgctgcgctgacgtgcctgccttggtgctgcccgggtgcccagactgcccgacgtgcaccacgcttgctggacgggcttgctatgcttgacgctgcgggacccctgaagcatgtgcctgggtgctgctttcctgtgcctgggcacgtctggctggggctgctgcggacccttgggtgccgcgttctacatctctcgcgcgcgtggtgccccccttggcactgtcacgctctctcctttacaagccaatccgctggactgggcccccccgcactcgccaatgcgaatcgcatgccttaccatggtcctttccaacccaaggtcgcagcatgcgcgcttggggagacagcacccctcacaacgcctttggccaactattaccattcgaaaaaccctttccaaatgcgcaacgcgcttcaacatactgtgactgttcggcaatgcatcccttagctcccacgacgtgtttgccaaccctctgttggagacacgtgacccgcaacttgtcctcgagcagctgacgcccaaactctccacatcatcatagcccctagggcn

SEQ ID NO: 616804 - DNA, 1672 bp, Homo sapiens
  misc_feature (1025)..(1025): n is a, c, g, or t
cacctattaatagacgagcttatggacacttgacatgatcagcgcccttcataatcatgtgcacttatgtgctgtcctcaggtcctgatagtgcccgttagtgccctatctaactctgcaacgaaatacttaactgagatacgtaacactcgtcagacggctcgaagcaatatgagcaatactcgtctggaacctaattccctggcgccggcatcagtcgctaggtcgctcgatcgctcgcttccgcgatcgcctacgtcattctcattctagcattaacgaggatcgagggtctaagcggagttcacctacccttgacgcaatcaagattcaactctggccacccaagtgggtacgttgacacgccttgcgtagggtgaccacgcggagggtgacgtgaccggacacatcatatcctgtgcgaagcgtaccgtaaccaatcactgtcacgcgccacatgtgatttcccgtcagcgacaccggaggactggagccgtgccgacacatcccatctgtgagcggtctgggagcaagtcgccacagataggctacactcgcacgatgtctgacacggaccaccacatttctgcggtgaatacaggtaacatgtagcaggtacaccagaaggacccgaatgcgtttgggcaggcgttcagatgcaagagcttgtttccgcccaggcacgtttaaggggccctgtacacaaacatcacagaattgacacaattttgccgcgccgggaaccctgtgcttagaggaggcccaagaacattcgaggctcttttaccattcgcggtcttgtagcaacttggagtcggcggggggggggcggttgattcaaccttcaatcgggtggttgccccactttgacgttctttggtaacacccaattcctcaggtcgtgaacggactaaggagacccaaatcacaggtgggtttcagtaggccccacaaattgcggttggccttaggcagatttgtacactgatcgcccaccttaaaaatgagattgtcctttgttgganacaagttacgggggggcctcggggtgaaatttttgaacccccattaagttaggccaaccccgccgtggctaaaccgcccctttcataacgggaagtccgacatgggaccttggggaacactacatgtgggtgggagggggcgcgcgacatgcaaccaataagagaggtgatccccccacggaccgacgtggggtgccccgcagattgttagacacgcacgtacacgaccaagccatggacctgctgtgggtccccacgagaggggggggcccgcacaagataaggcgggagcaattcgcgaacacatagcaaagggagaacagcccaactggagcccccctccgaattgtgtcaaaaccgcgggctgcggaaaggtgcggcaaacaaaagctggttaacaggggggaccacccttgtgcggaaagaggaacccaataatgcccgggggcgggggggcacacaccaatgggcgcacacacaaccacgcgacgacagatgatctgagcgacgccacagccggtcacaacacaacaaccagacgggcgtcaagaagcaggacaggaaccgcacacccgaaaggtcacgagagacgagaaactgaccaacgcgtgatcacaatgacaactacccgagacagagagagatgg

SEQ ID NO: 616805 - DNA, 116 bp, Homo sapiens
atactcactgtctcggcctcccaaagtgctgagattataagcgtgagccaccagcacccggcctgatttatttttaaggttagctttcctgaaaatgccttcttctctaactcctg

SEQ ID NO: 616806 - DNA, 660 bp, Homo sapiens
  misc_feature (483)..(484): n is a, c, g, or t
gctgacatggagcaggagaggacgggtttcacatgtgttgggcagagatggtctcgatctcctgatccttgtgattcgcacccagcctcccgacctcccagagtgctgggattacagccctgcgtgctgaggccgcggccctcgcgccggccgctgatggtgggtggccgcagccagggatgatgcaagacgtgacccagggaagactgagcccggagagctatggagccgacagcctggctctggccgttggtgctctcgctggggctcctcactgtgcccacagaccagagcctcatcctcgagacctcttttccgccgctctgagaagcggaagggccatactctagatgtccgccgtcgaccgttcgtgtcgtcttcgttcagccttccgacgctgaactccttcgaatctcgccctgcctcctgggtatccatgcgcacatcggtgcattatatcccgaaacaacgagagctatcacnngtaaggagacattgccgagccaggcagactcagtcccaggtagcaatctttcaagaacttcccttcgtatcagacatcctttgtcgctggtccttcgttccggcgttcctctggacggtgctccctaggactagtgcccgtgcgtgcgggctcgcgggcagctgggtggcgtgcat

SEQ ID NO: 616807 - DNA, 440 bp, Homo sapiens
  misc_feature (35)..(36): n is a, c, g, or t
  misc_feature (38)..(38): n is a, c, g, or t
  misc_feature (52)..(52): n is a, c, g, or t
  misc_feature (55)..(55): n is a, c, g, or t
  misc_feature (59)..(59): n is a, c, g, or t
  misc_feature (64)..(64): n is a, c, g, or t
  misc_feature (67)..(67): n is a, c, g, or t
  misc_feature (71)..(71): n is a, c, g, or t
  misc_feature (73)..(74): n is a, c, g, or t
  misc_feature (76)..(77): n is a, c, g, or t
  misc_feature (80)..(80): n is a, c, g, or t
  misc_feature (83)..(83): n is a, c, g, or t
  misc_feature (93)..(93): n is a, c, g, or t
  misc_feature (96)..(96): n is a, c, g, or t
  misc_feature (106)..(106): n is a, c, g, or t
  misc_feature (108)..(108): n is a, c, g, or t
  misc_feature (116)..(116): n is a, c, g, or t
  misc_feature (120)..(120): n is a, c, g, or t
  misc_feature (122)..(122): n is a, c, g, or t
  misc_feature (139)..(139): n is a, c, g, or t
  misc_feature (148)..(149): n is a, c, g, or t
  misc_feature (153)..(153): n is a, c, g, or t
  misc_feature (192)..(192): n is a, c, g, or t
  misc_feature (202)..(202): n is a, c, g, or t
  misc_feature (216)..(216): n is a, c, g, or t
  misc_feature (252)..(252): n is a, c, g, or t
  misc_feature (254)..(254): n is a, c, g, or t
  misc_feature (258)..(258): n is a, c, g, or t
  misc_feature (260)..(260): n is a, c, g, or t
  misc_feature (263)..(264): n is a, c, g, or t
  misc_feature (266)..(266): n is a, c, g, or t
  misc_feature (293)..(293): n is a, c, g, or t
  misc_feature (351)..(351): n is a, c, g, or t
  misc_feature (374)..(374): n is a, c, g, or t
  misc_feature (420)..(420): n is a, c, g, or t
ccggaagtggcgccctgggctcgcggcggtgcccnngngatggcgggagccnganctgnagccnganctcncnncnnacngcngcgggggtcnacnctccacctcncnatccaccncccncncaccgcgcacatcctcnccaccctcnncctnccgctcagccctcggcccgcaggatggatggcgggtcanggggcctggngtctggggacaacnccccgaccactgaggctcttttcgtggcactgggcncnggcntnacnncnctcacccatcccctgctctacgtgaanctgctcatccaggtgggtcatgagccgatgccccccacccttgggaccaatgtgctgnggaggaaggtcctctatctgccnagcttcttcacctaccccaagtacatcctccaactcgcatcctaanatagggctgttcccaggcct

SEQ ID NO: 616808 - DNA, 329 bp, Homo sapiens
ggcctactgtacctggatggtgactcttagctacataatacaactcgggcgcataaagtgtggtcttctcttcctactactggttgtgtctgtatctgagtgtgaccactcggccgaagccacgaggattcgtgacgggaatggacgcctggttgcgggtttgctcctttttcttgctttgcgtgctcagtttttacagactgtaaaggagatgtgttgtttgtgaagatggagcggagtcaaatctgtgcttctaactgagatgagagtgtattaatcacgtatcgcagggctccagctgttttagaagccacatcatgttaaacatc

SEQ ID NO: 616809 - DNA, 899 bp, Homo sapiens
  misc_feature (1)..(1): n is a, c, g, or t
ntgttagatcgtctgccgctagcccttgctgctgtctctgtctggtcgccgcgcatgttctccccctcaattggggttctcatctgcgcgcgacacagcctggttgtcgcaaaagacgcgcttctttgcgccccctacgcgtccccatgggcccaacaaacaccccctgggcgtcgcgtagtccccggtgtcttcccaggactttgccacaagggtcccgtatacaatgcccccctcttgtctatattcatctgggggccccgctcccgcggcgcgtgaatcaaccacgcctctcttggattcttgcccccgcccgtttcccctctctaatttcaccttcggggtctcccatgggtcggcaccgaccacccccgccccttcgtcaaggggtccagatattgccggcaagccctggccctccctcgggcggctacccccgcctggtggttgtcgtcccccctgttgcacagctccttcgcaacgcaagatctgatcttctgaagctccaccctcggggcttttctatgttgaccctaaatttttcttccagcggcgtggggcagaaattcccccacgacccaatattctcccagccgctatatcgttccccagtagccccttgccacatcacctgtccgccggacattctaacacgcccgtggtgcacgccctttccctgcgcccagcacctgggtggacgcgtcgtccagacaacatgcagggccgaaagaaccctggtgcctttgaacagggggccccacgcggccccccccccaacgtggggggttctcgtccggcagttaccatgaggcccccagtataatgtttctccccattccccccgtctgcgcttaaccaatacttcccccccgtccacctaaacccttttccacatccca

SEQ ID NO: 616810 - DNA, 892 bp, Homo sapiens
  misc_feature (807)..(807): n is a, c, g, or t
  misc_feature (820)..(820): n is a, c, g, or t
  misc_feature (823)..(823): n is a, c, g, or t
  misc_feature (836)..(836): n is a, c, g, or t
  misc_feature (890)..(890): n is a, c, g, or t
tttgcgttgtaagagaggggcagagaacgcgagaagaaagcaggcagaggggttctcccgcgtcattgttcaaatatacgagagcatcgggctggttttccctcgcggtctttcacgtttcagagtgacagggagagtcttccgcaaacctgccgtggcctgcaatttcagacgttaaccgaggtcactttcttcgggaaacacacccctgtaagccttttagaaaaggcctagttgccttctcagagtattcgcctgggtgtggccgcccatcttgggaccaccttatccaccagcccccctgccagaaatgatgttttatgaaaacccatgaggctgctgcccactcccagccagggaaataatgcagtttccctgtcttatttaagaaaaagagaaggctctcttttctccccttgtcattgccgttcttttccttacacgccaagaattttttaactattgcagattttcatcccattctactgcttgattgaccatcaactccatcctatcgagatttatttaagaatgaagaacataattttctgctgatgccgtaccctcacccttttcagcaaagaatagtggagagtaggaaactgtactttatctcggcatcctcttgaatgatagtgcaagtttctccagttgggatgttgtctctgcccggttggacctcctccctttgttgaatgtggtgtgcagcctctcatctcacactgtgagtccagcggcgcagggtggtaccaggaaagaggatattctaggctttgcgtgctgctagctgggttcaggcttcacccnctggaaagaaccnccntctgctctaaccntgtagacttattgcggcctggtttctctgttaccataaaattactgtagacccnaa

SEQ ID NO: 616811 - DNA, 2430 bp, Homo sapiens
gtcgccatccagggcatcgctaacaaggacgccacccagggcatcgctaatgaggaggccgtccacagcgtcactaacgcggacgccgtccagggcatcgccaacgaggatgccatccagggcatcgctaaagatgacaccgttcagggcatcgctaacaaagatggagtctacggcattgctgaggacgctgcccagggcatcgctaatgaggacgccgaccagggcatcgctaatgaggacaccacccagggcatcgccaacgaggaagccgcccagggcatcgccgaggacgccatccagggcatcgccaacgaggaggttgcccagggcatcgccaatggggtcgccgcacagggcatcgccaatgaggacgccacccagggcatcgccaactgggacgccgtccacggcttcgccaacggggacgccgtcctcagcttcgccaacggggacgccgcccagggcatcgccaacggggacgccaccaagggcatgggcaacgaggtcaccatccacggcatcgctaacgaggacgccgtccagggcatcgctaacgaggtggccgcccagggcatcgccaacgaggacgccgcccagggaatcgccgaggatgtcgcacagggcatcgccaacgaggacgccgcccagggcatcgccaacaaggaggccgcccagggcatcgccaacgaggacgccgcccagggaatcgctgaggacgtcgcacagggcatcgccaacgaggatgccgcccagggcatcgccaacgaggaggccgcccagggcatcgccaacagggtcgccgcccagggcatcgccaatgacgccacccagggcatcgccgaggacaccgcccagggcttcgccaacgacgacgccgtccagggcatcgctaacgaggacgccgtcctgggcatcgccaacgacgacgccgtccagggcatcgctaatgaagatggagtccacggtatcgataacgaggacaccgcccagggcatcgccaactgggactccgtccagggcctcgccgacggggacgccgtccagggcctcgctgactgggtcgccgtccagggcctcgctgacggggacgccgtcaagggcatcgctgatcgggacgccgtcaagggcatcgctgatcgggacgccgtcaagggcatcgctgacggggacgccgcccagggcatccctgacggggacgtcgtccacggcatcgctgacgaggacaccatccagggcatcgctgacgaggacgcagtccagctcatcgctgacgaggaccccgtccatggcatcactaacgaggacgccgcccagggcatcactaactaggacgccgcccagggcatcgctaactaggacgccgcccagggcatcgctaacgaggacgccgcccagggcatcgctaacgaggacaccgtccatggtatccctaaagaggtcaccgtccagggcgtcactaacgaggacgccgtccagggcgtcgctaacgatgacgccgtccagggcgtcgctaacgaggacgccgtccacggcgtcgctaactgggacgccgcccacggcgtcgctaacgaggacgccgcccacggcatcgctaacgaggtcgccgcccacggcttcgctaacgaggacgccctccacggcatcgctaacgaggatgccgtccacggcatcgctaacgagaaaatcaaatgttaaccagcagtgccctgcttcaacaccatcatcggaagtcataagttgaactcttttttgatgtttaaagcctgcataatattcgctgtgttattattcagcctattactatttccttcatgatggaaatttggtttatcccaattttctattctatcaaaacaccgctacataaaaaatccccatgcacatatttctcctaattgtggaaatattttacctaaaagactctagacatgggatgaaattcccaggttactggaattttaaaatagataggtacttccaaattgacctcttacaaattatatgaatttgtaagcttccaactgttatggagttaccccttttgagaaatctgtgctaaaaggacccaaacaatgctgatgacaatgatcaggataataagtacgctgggaagagaacaaaatgatttagatcttagacaagtcattctaggtgtctccactgtttcagttctcgcgttcgttcattcttgtgctttttcgttttaccaaataaaatagccccttgatgtcatatgaatccacgctatgcttaatgagtattggttagtaaaatgcctataactagtaatcttcatctatgcaattaaatattaattcataaaacacttcaaatgtaaacaataattagtaaatgaaaagtacataatacctcgattagaaaaaaatcactccattaaaagacattatttgtgtgataaaaaaaaaa

SEQ ID NO: 616812 - DNA, 549 bp, Homo sapiens
gtacagtaaagcatcgtgaagcggtgtagaggctcaactagcagttgtatgctggataaattgaccgttgtgtctccacctcgtgccatcgacctgaaccgacaatgttgagagagtgtctccccctcatcatattcctgaggaacagacttaagtatgccctgacaggagatgaagtaaagaagatttgcatgcagctgattcattacaatcgatggcgcaggtccgaactgatataacctaccctgctggattcattggatgtcattcagcatagacaagacgggagagaatatccgtactagatctatgacaccaagggtcgctacgatgtacatcgtataacacctgaggaggcaagtacaagttggcaaagtgagaaagatcttatgtgggcacaaaatggactccctcatctgatgactcatgatgcccgcaaccaatccgctaccccgatccactcatcaaggtgaatgataccattcagattgataaagagactggcaagattactgatatcatcaagttcgacactagtaacctgtgtat

SEQ ID NO: 616813 - DNA, 387 bp, Homo sapiens
gctaacatcacaccaagtgaggaggagctgaaagtctttcctctaagaactagaatgggaaaaagatgcccacgttcaccactcctatccaataaaatgctggaagtcctatccagggcaataaagcaagagaaaaacataaaaggtaccaaattggaaaagaggaagtaaaattattcctctttgcagatgacatgctcttacatctgcaaaaacttggaagattcataaaaaaattcttagatctgataaataaattcagcaaatttgtaggacacaaagtcaacatacaaaaattagtagtgtttctacacatcaatgatgaactagctgagaaagaaatcaagaaagcaatcccatttacaatagctacaaaaaataaaatac

SEQ ID NO: 616814 - DNA, 93 bp, Homo sapiens
ggatttgctggtgcagtacaactaggcttaataggggttagaagcttgaattcgagcctcgaattcagcttctaacgttagaagcttgaattc

SEQ ID NO: 616815 - DNA, 285 bp, Homo sapiens
cttggttctcgcttatgactcctacagcccttattacagtctttgttaaatgttaggagagctttaggccactgattctctctgactttctcctgcccttctttcacccgcttctttttctccccaaggcaggactctaatcttcccctcttcccattaaaatgttctctgacctaccttgcctgattgtgggttggaagacttccattttaaaaggggtcctgccctatatcctggaagagggaatgctgcacagagaggccaagaagcatctgcacaggcctt

SEQ ID NO: 616816 - DNA, 290 bp, Homo sapiens
  misc_feature (21)..(22): n is a, c, g, or t
  misc_feature (24)..(24): n is a, c, g, or t
  misc_feature (26)..(26): n is a, c, g, or t
  misc_feature (108)..(108): n is a, c, g, or t
  misc_feature (235)..(235): n is a, c, g, or t
gaattcggcacgagctcgtcnntnanacgatgatgtcgatgcctttaattttattcgcaccattgcggtcgcgcggatcatgatgccaacctcttacgtgcgcctttntgccggacgcgagcagatgaacgaacagactcaggcgatgtgctttatggcaggcgcaaactcgattttttacggttgcaaactgctgaccacgccgaatccggaagaagataaagacctgcaactnttccgcaaactggggctaaatccgcagcaaactgccgtgctggcagggggggccc

SEQ ID NO: 616817 - DNA, 192 bp, Homo sapiens
atagctttatgtctagaaaactctagtacatcttcattgaaaactcctgctaaacacctgttgtgatcataatgaggactcagcaagtaggaacctatactgttgtgtagggccttgcctgaatgtcgatgggctgctgactgatcagggcggtagtcgttcaaggttgctattgaaacttctaaaactagg

SEQ ID NO: 616818 - DNA, 139 bp, Homo sapiens
  misc_feature (19)..(19): n is a, c, g, or t
ctactaaattcgcggccgngtcgactgaggcagacagctggttggcggggagcggaaagagagattagaaccctctcgcgggcatcccagtcgttatggcgacgggatgtgcgctggatcactggctctcgcctgaaag

SEQ ID NO: 616819 - DNA, 138 bp, Homo sapiens
tggtagtactgtctggggtactgaaaatgcgctagattgtggctgcataactccatgagtacatgaaaaacactgatcaggtgttaaatggatacattgggtggtatgggcaataccaattaataaaaattgttatga

SEQ ID NO: 616820 - DNA, 105 bp, Homo sapiens
ttttttgccttccccacctagactgtgaaactcctcaagggcagatactctattttatttgacctttatatcttcagtgcctgggacaatgcgggtaccgagctc

SEQ ID NO: 616821 - DNA, 366 bp, Homo sapiens
ttttggggccctttttcccagggggcccccccccccttaccgggaagggggttaagggcccccccccccgggggaggggtttgggggccccccactttaaaggttttttaatttttttaagggggggaaatttttttgcccccccaaaaaccccgggggggattttcctggggggcatatccccggtaaaaatttttttggtggtttttttggaaaagccccctttggggggggtggttccgggtttccccatttggtttttcggggtttccagggggggggggccctttccccccccccctttttccgggatttaaggggttttttttaaaaaaaaaaaaatttttggaattggtttttttttta

SEQ ID NO: 616822 - DNA, 184 bp, Homo sapiens
atgtgtaactatgtgtacaatatgacagaatgtgagggggaagttgcacacacagaggaggttgtgtgtgtttgcatgtgtttgaattcacaaggaagaaattatttatcttgagctatttcctttgttattcatgtatgactgtttgagaattattaatgataataaaatgtacacacggtca

SEQ ID NO: 616823 - DNA, 262 bp, Homo sapiens
attctgaagcaaggaagctaggaatgacaggagaggtcacctgatggttacactttatcccctcactatcaattctattcttatactccattaacttagttatgagagctgattttccctctctccaggttgaacgactacattaggccacttctgtccgcacgtcggcactgtctcagcacctcattgaaaccctcacagagcttgatgtcaccctggttctgggcacactccagaaactgtacgatctcatagaggcaag

SEQ ID NO: 616824 - DNA, 664 bp, Homo sapiens
ttatagcaagtcatgcaaatttttgatttcccagtgcatatacaagttatattcacacgatgctctagtctattaggtgtgcactgaatcacgttatatctaaaaaacaatgtacataccttaattttaaaatactttattgctaaaaatgctaaccatcacctgtcttctgccagtcatcatctctatgctggtggaggtcttgccttgatgttgatggctgctgactgatcagggtggtggttgctgaaggtggaggcagctgtggcaatttcttaaaataaggcaacaatgaagttcgctgcagcaatgaactcttcctttcatgaaagctttctctgtagcatgcaatgctgtttgatggcattttactcatactagaacttctttcaaaattggaaccaagactccccaaccctgctgctgctttaccaactaggtttatatagcagtctaaatcctttgttgtcatttcaagaatgttcgcagtatcttcaccagggaatggatgccatctcaagaaaccactttctttgctcatccaataagaagcaactcatctgttcaagctttctcatgagattgcagcaattcagtcccatctttcatatcccatttctaatttgtggttacctggtattccaacaacattgcagttgtgcct

SEQ ID NO: 616825 - DNA, 300 bp, Homo sapiens
acgaaaatcttgagcatagggtgtctgaggctgagaccaccctcctctcctgaaggaaaagaacccctccccattcaacgttaaaaagtcacaaggggcccggtgcagtggctcacgccagcaatcctagcacttgaggaggccaagatgagcggatcatttgaagtcaggagtcacaaggatctaccaaataaaactgatattattgtacacagagctcctgttcaaaactttaagacttcttcaaattaaaatggaggagaattacaaacggataagcatggattttgttctctctct

SEQ ID NO: 616826 - DNA, 316 bp, Homo sapiens
gggcccaagggagtagtcagcgtaatcccaaaacggttttttttaatccaattttaattttgaatgtttggggtgggcttaatcccatgtttattaatataaaccctcgatgatgagagagttacaaagaacaaaattccagacccaaccctccaattttttcagcaaaagcattttgggtcgttgagttgaggtgggttttgggatccatagggggccgcccccccacagcacgtgttgtgacgatggttgaacggaaagtgtcccctgttcctgaatattgaaataaaccaataaacttttaatggtttttgca

SEQ ID NO: 616827 - DNA, 560 bp, Homo sapiens
tgatgaatggccggaacaaatttgaaggggaggtcaccaaggagaacctgctggactttatcaaacgcaaacagctgccccttgtacatgagtacaacgagcagacagacccgaagatttaaggaggtgaaatcaagactcacatcctgctgttctatgcccaagagtgtgtcttgactatgacggccaactgagcaacttcaaaacagctagccgagagcttcaacgggcacagatcctgtatcatcttcatcgacagctgaccacaccgacaaaccagcgcatcctcgagtatctatggcctgaagaaggacagagtgcccggtcgagcgcctcatacacacctggaggaggagatgaccaagtacaagcccgaatacggaggagctgacggcagagaggatcacagagtactgccaccgacttcctggagggcaaaatcaagcccacacctgatgagccaggagctgccggaggactgggcacaagccgacagtacaggatgctcgcacggagaagaactcagacagacgaggactacaggatgcgacacaccaaca

SEQ ID NO: 616828 - DNA, 480 bp, Homo sapiens
acgtcacgtgacagcgagtccagcgcccggggcctgggagaacaaaggcggctgacccgtcacaggagctgcacggcaatgcatctgagaccatgcggtgtcaccttcacagaagtgctctggcacagagactccagccttgccggcctctcgcctcccaagcacagaagcctccagaacgctgcttcaaggacaagcccaggagacctgccatgctcatgcgtgtctttggaaacagaagccggacaggaattgatcacatccactagtgaaggctcagaaagtgacaagatttcatttggaaatcgtacctgtgtccttgggaacatcctgaaccttgggaagcatcagctcatggagttcctattaactggataaatttatattctagattgaaatggaatggaattaagtaggcccacggttttgcagcacgtacatttgaagaatcattaaaaatcatcatagaaacaatttaaa

SEQ ID NO: 616829 - DNA, 437 bp, Homo sapiens
gctcatgcgtgtctttggaaacaggttctctaaattttgcttgtggtttgttaaaaaaaaaaaaaaaatcagaagtgtaatcaaagacttcaacaaacgaagcaccaaaacacttcagctttgaaatgtagaattgcaatgactggaaacacggctcgcaaagcaaaagacattaaaattcagtcatccctacagaagccggacaggaattgatcacatccactagtgaaggctcagaaagtgacaagatttcatttggaaatcgtacctgtgtccttgggaacatcctgaaccttgggaagcatcagctcatggagttcctattaactggataaatttatattctagattgaaatggaatggaattaagtaggcccacggttttgcagcacgtacatttgaagaatcattaaaaatcatcatagaaacaatttaaa

SEQ ID NO: 616830 - DNA, 327 bp, Homo sapiens
  misc_feature (218)..(218): n is a, c, g, or t
  misc_feature (239)..(239): n is a, c, g, or t
  misc_feature (258)..(258): n is a, c, g, or t
tccacctaaacacaacattagggcccttaatgcctggattattccactttgctcattatatgtataaaatcataattaatgtcacttctgtttattcagaaccacagactaaatcctcttaactagaatgaacgccaaggctaacaaaaggagggcagggcaaaaaggaaagaggacgtaaaaggaggacttagtttctagtgcagtgcctgacactncagggattcaaacattcaatnaaattctttcaaaaggtgnaattgggcaaatgtcgcaaagctacatccctcaatcatgagagggctattctgaaaggacaggacaaag

SEQ ID NO: 616831 - DNA, 1269 bp, Homo sapiens
ggaatgggtggcagagcagcctccccaactaagcctgggtcgccgcctcgtgtgaatggggcctgcggggccgagctgcggtgaagtgtgcgtccagtcgtgtttttgggcatggctgatgatgccatgatgcgtgagaaccctcccactggctgatggggcaatgcccttgatgacttgtgactatgcatatggtcgtgagtctctctgtcagctcttccgcagtctgaagtgggctgctggtgtgttgcgtgggaccgtgccctgaactgtgccaagtctccctgctccggaagcggaagttgcaatgcactgcgtgtggtcctgatccagttgtgagcccgaaccgatgctccagtagattccaggccagctggtcaatcgatgcccttatcccacttgccggtgtccttgctccgccatgtccccggcacaatgctcgcctctaggactcttctctggaccagatgtgcgggcgggatgaacaacgcgggcacgcctctcattagtcacagtacctagattttctggacattgatttgtcctcatcgcgacaacataattgcatcatggaagggcggtcttaacctggcgtcacaatcacgctttgagacaagtggatcaagcttcccggacatcgactcggctgagctgaccatccaagcgcgccaggcccttgtcacaccctgtcccatctaccaatactcggaaaggcacgcatccttcctcgttgacgctgcaccaaactctgaagctcgcacggcatccccgagtacgcaacactggggggacggacacgccgctgggcactgtcttcgcgcacagacgcagcctagtcaccggtgtacacagcacgacagacacttgcccgtaaatagtgccatcaaccccgagagcacgcctctgaaagcgagcactctacaagtggaaaatatgccacacacgcgatggcggcactacattagccaaggctacttgaggaacgcgaacaggcgcacgcacatcgatcacgaaggcccgggagccgcacacgcacccaggacacgggaccgacagaagaagaggcgaactggtgcgagacaaactacgggaagcaagcaatgaacagaacacaagcagtggagagtaagagaggaaggacaaagccaaggaggcgaacaaccgagaagcgagacagcacacagggccaaaaccacaaagacaacaccacagcccacgctggtagaacgcagaaacacagtacgacaagacgaaggcaagtaggagaat

SEQ ID NO: 616832 - DNA, 195 bp, Homo sapiens
  misc_feature (13)..(13): n is a, c, g, or t
  misc_feature (15)..(15): n is a, c, g, or t
  misc_feature (71)..(71): n is a, c, g, or t
caaggcacgagtntngctacacgctagtcgagctggttgatgatgcatcatgaacgacacgtaactatcgnctagaaagttcatgaccaaccgactacttcagaggaaacaaatggtcgattgatgtccttcaccccgggaaggcgacagtgcctaagacagaaattcggcgcaaaaacttagccccaaacatgt

SEQ ID NO: 616833 - DNA, 145 bp, Homo sapiens
atctcacgaagacactctgggcagtctggacacacggcttctggcgcgtattctggaactgagaatggcacattgtgtgcttaactccgtggctggcactgtctggcatccccggtggcattgaataatggaaattcaaagggtt

SEQ ID NO: 616834 - DNA, 998 bp, Homo sapiens
  misc_feature (243)..(243): n is a, c, g, or t
  misc_feature (321)..(321): n is a, c, g, or t
  misc_feature (336)..(336): n is a, c, g, or t
  misc_feature (346)..(346): n is a, c, g, or t
  misc_feature (766)..(766): n is a, c, g, or t
  misc_feature (789)..(789): n is a, c, g, or t
tcattagagcttatcttgtcagatcgtccattgcctttccaagggttcattttacgcttagaagtttgttgatagaaccattagaaactgccttttctcggtgcttgtattatcaggtgtaattactcgaagcgtccagcccatcacctggattcagaatgtcttgacgacattcacatgcacatcgcacccattccatcgagctgttccagcttctgaacacatacacgtagcacttagatnacttgtggatattttaatcaatgcgtggatatgactctagctgcccattagattcgctgcgagaatagtcctccactnctgcactactctagnattgtgattncgctgctcacttattctgtgaagttcctaccagaaggttactcctctacactgtttccagatgtgtgtgctagtgttcacgtgaaactggattgttttacccatcttcagaaagccccctagtcgattaagatgtggtgcgacatagaagagaatagtatagagaagattataatataacatagcaatagcaaagctgcgtacagagatccacacattatacagagaccactaggagaccatgagttgggcctcatccaagaacgaaacctagtgaggcttgctaccaattactgtcttgcaggcgttttgcccgcgcagtctcgattgagccacgttgacacattctggggaaactggccttcttgttagtagtagccctgcttggaaataaacttcgtatcgcccagatgatgtgccnacaagtacaagtaggaccgcgtnggattaaccgccccgtccaattcggggtaacctcccccagggaggaaggttgttccacgagaagcagggaccgggcaaaggaacaggcagcttaccaggccttcagccagcatccttgaatgcctacgcccggcgcagggagtgtcgaagaaaacccaaagttcttacgccttggaaagtcaccccattcagggcctgaactccgccgg

SEQ ID NO: 616835 - DNA, 568 bp, Homo sapiens
  misc_feature (39)..(40): n is a, c, g, or t
  misc_feature (54)..(54): n is a, c, g, or t
  misc_feature (56)..(56): n is a, c, g, or t
  misc_feature (115)..(115): n is a, c, g, or t
  misc_feature (177)..(177): n is a, c, g, or t
  misc_feature (212)..(212): n is a, c, g, or t
  misc_feature (252)..(252): n is a, c, g, or t
  misc_feature (272)..(272): n is a, c, g, or t
  misc_feature (279)..(279): n is a, c, g, or t
  misc_feature (281)..(281): n is a, c, g, or t
  misc_feature (283)..(283): n is a, c, g, or t
cccgaggatcccgagacgaccttagagaggtttagattnntgttttttttggtncngcctcaaagctcagtttatggaagacattggtaagctatgggatcatcacttgaatcangatttggactagtgagcttaatggtccatttcttacaatttcaaagttacagtctcagaaanggttaattttaataactgtcctatcataaattaangtgggaataaatggaggtggtggataaatacttcatgaanactaaagtctgaaataaatnactggtntnangtccaatagctactacatttgatagaacagtttggaggaacataccattctggaacgcagcatctgacgtggttctcagcaagtgggaatagtaaggattatgggcttgtttcgatgagtggaagcggcaggtaggtagcatacaagttattcaataatctggtgctgatgacctaaaaatatgtcttacctatccatcaaggaaagcctggtgaagccttaactggtaactacttcaacagttggaattagtagctctattaccctgatgaaacaaaactatac

SEQ ID NO: 616836 - DNA, 232 bp, Homo sapiens
cccaagaaagcccctttttaaagaaaaaacaattccctgagctctcaactccaagttgtaaatttggggttttccttgttcttactttaaaaagtcatgtgttaattttttttctgccgggatttgtatgcaaaatgtcctctatttgctattaaaaaaaagctacgtaaaaccctccattgtaaccttttaagtaataataaataaaaaaaaatatattgccgttaaaaaa

SEQ ID NO: 616837 - DNA, 446 bp, Homo sapiens
  misc_feature (35)..(35): n is a, c, g, or t
  misc_feature (62)..(62): n is a, c, g, or t
  misc_feature (100)..(100): n is a, c, g, or t
  misc_feature (108)..(108): n is a, c, g, or t
  misc_feature (126)..(126): n is a, c, g, or t
  misc_feature (138)..(138): n is a, c, g, or t
  misc_feature (169)..(169): n is a, c, g, or t
  misc_feature (184)..(184): n is a, c, g, or t
  misc_feature (245)..(245): n is a, c, g, or t
  misc_feature (269)..(269): n is a, c, g, or t
  misc_feature (356)..(356): n is a, c, g, or t
  misc_feature (358)..(358): n is a, c, g, or t
  misc_feature (375)..(375): n is a, c, g, or t
  misc_feature (381)..(381): n is a, c, g, or t
  misc_feature (384)..(384): n is a, c, g, or t
  misc_feature (412)..(412): n is a, c, g, or t
gggggccttgccagctccagcggccttcttgtccnctgctttgttgaccccccccgcaactntctgtctcatatcacggacggcaaagcggcccaaaggnggatagtntgggaggctctcaacacncatgggcttgcngggggccgtatcaccaatggcagcctcaccngacttcaagagtttngggccatcttccagctttttaccagaacggcgatcaatcttttccttcagctcagccaacntgcctgccatgtgagccgtgtggngatccgatacgggggcagagccggcgcttatttggcctgggtggttcaggatactcacctgagcagtgaagccagctgcttccattngngggtcatttttgctgtnaccaanaangttgccacgacgaacatccttgacaganacattcttgacattgaagcccacattgaaaaaaa

SEQ ID NO: 616838 - DNA, 591 bp, Homo sapiens
  misc_feature (521)..(521): n is a, c, g, or t
  misc_feature (568)..(568): n is a, c, g, or t
gaaataaaaatcttttagcaagatttctgcgtgaaaatttttcattgtatgaaaaccctgagtttctctagtgaacaaactagaacccagtcagaataactagaccagcagatggcactaaaaggaaaactaacagtctcagattttcctagggcttaaaattatagaacgggaagattccaaagtgaatataaaatagattgaaatctatatttctgattatatatgtaaaggcaaagaaatagattttgggaaaagcaatataaggcttatgtctactttttttttcattttgaatgatcggctgtggtacaaataagttttacacatcctaaagattgtttctagtcaacaaatatattgtctcaagttatcattaaaatgattatgtagagatattattataacagttgttctactgggaaaagcagcaggtggttaacgcttgtaagaaacgaacagcatctcagtgggtggctattgcaaggggcagtttggggtcataagatttttgtgacccnctgcttgccctaccattgaggatttgtgtagacaacacttgtaaagnagaaacagttttaccattaatga

SEQ ID NO: 616839 - DNA, 749 bp, Homo sapiens
tcggcacgagggcgagagagaactagtctcgagttttatcttgttctgtcttttaaaccttcccttatgagcatgcctgtgtggggttgacagtgagggtaataatgacttgtgggttgattgtaaattttgggctgttaattgtcagtccagtgtttaaatctgacgcaggcttatgcggaggaaaatgttttcatgttacttatactaaccattagttcttctatagggtgatagattggtgcccacatggggtgtgaggaagtccagttatatgttggggatttttaaggtagtgggtgttgagcttgaacgctttcttaatgggtggctgctttaaggcctactagtgggtgttaacattttttactctctctacaaggtttttccctagttgtcccaagagctgtcccctcttgtggactaacagttaaatttacaaggggatttagcagggttctggtgggccaaatttaaagttgaactaagattctatctgggacaaccagttatcaccaggcttcggaggttttgtccgcctctaactataaatcttccccactagtttgtgctaaaaataaacgggatgagccccattaagcatatacaaaagaagcccggcaagataacagaaggacaaacataggccccccttcacagatattccaaaaaaatcacaattcacagagataaggggaaaccctgcaaaaaacacgcggaacaaaaacaaaattccacagaaaaaaaaa

SEQ ID NO: 616840 - DNA, 93 bp, Homo sapiens
tgcaaaaaaaaaacgccgtgttggggtttaaaatttgtgtggccccccccccaagggggggcgggggggggccaccaagggggtggcccactc

SEQ ID NO: 616841 - DNA, 179 bp, Homo sapiens
tctgagttcggaagcgacatggacgatagcattttagcgtgattcgagcccctgggctattgtagccagactctggtctcccacactttgtcacagaacgaaacatcgagcccccgagatgcgcaggctggccatggtcagattcatgatgcccgtgtcactccttcagccaatgctat

SEQ ID NO: 616842 - DNA, 293 bp, Homo sapiens
cccccttgcccccccccccctggggggggaagggggtcccatgggccccggctgggggggggggggcaagtcaagttgtttgaccctgggacattagggccccccattgaaacccccccccccccctggcccctttttccttccccggtttgggaaaaaaattgacaaggggggccccatggggggggggggggggggggggggggggggggaagggggggggatttgggtcaggggtttggccccctttggtttttggaaacttgaaggttcaaaaaaaccagggggtttta

SEQ ID NO: 616843 - DNA, 269 bp, Homo sapiens
gagattacatcccatcccttacccactccccccgccaccaagacaggttctcactaccgttccccaggctgcagtgcattggctcaatcacggctcactgcgggcaagacttcctgggctcagctgatcctcccacctcagcctgccgagcagctgccacgacaggcgtgtgccaccacgcccagatcattcttgtgtttttagcagagacaggattatgccatgctgccgatgctggtctcaaacctctgacctcagatgacgaaccc

SEQ ID NO: 616844 - DNA, 1036 bp, Homo sapiens
gatatccaccttggggtgtcactctttattagtgtccccttccctttttctcgagttctggttggcatttctcaggctggaacccaggttttcagggtttttccgagatccttaggtagaaggcagataatagccttgttaaagactgtacgcatgtgaaaagttagctccatgaccaccatcgtactcggggattactattaagttcctgagagagtcgaagaagccgtcacctgaaggctccctccaaaatcgccatccagaaaagaagagactccgcactcttcttttccgaaaagaacccagaaaaggagaaaagtttgaggcctaaataaagtcttttgtgataattattacttatagacaatgtgacattgcacatctagataccacatttaagtttgatcattaatatgcaaatggtagatcagattgggggatgtagcacactggacttttaagaactggaaagaggttttacaaaagaaaaactttcagactcatctctcatttctatacgtccagaaatggcttttgaattttaagcaattactagttgttaattagctctgccctcatgaagtaatctattataattcaccatgaaacagcttatctgtgctgaatttacttccaggccttctgcccataatatctgttagaaagcaattgccagtgagcaagtgagaattttttatttcgtgcaatacctgcttcacttgataatcatattataattttttgatcatgattattgactatattttctggagtcccattgtttcagtgggcattcacagaatgctttccgaaacttctaagacaagaatctacttagcatatagtatacatctggcacataaacttgttttgaaacaagttctttagagaaaagattcatattggaattttattcaccagtataaaatttcctcacctgaagtaactttgtttgcccaaaaagttgctttaataaactataagtttttgaaaacttccttttttattagtctagcaagcccctatttttcaacga

SEQ ID NO: 616845 - DNA, 150 bp, Homo sapiens
ttgctgcggccgccgcgctccccggcccgaggcgatggagaacggagcggtgtacagcccactacggagaggacccgggccccgccaagaggcccccgaggcggcttcgttgcttattatttaatggccgttccatattgttccgcgcgc

SEQ ID NO: 616846 - DNA, 168 bp, Homo sapiens
gcccccccccccccccccccaaagtaaaagccgaaaaaaaataaaaaaaaagggtattgccccgggggggaggtttggggcccaccccggaaaagaaaacccttttttttggtcggggtttaaaaacttttaactgggcgggaaaaaaaaaaaacaggggggccctta

SEQ ID NO: 616847 - DNA, 910 bp, Homo sapiens
  misc_feature (532)..(532): n is a, c, g, or t
tcctcgggggtggttggctctcattcttattcctagggggcccacacattcacacgcaccaaccgcttggttccctcaaagaagggggccttttctatatattcgcgggagttattatttcccttttcttgtttgttttccgccccccccgagaagagttttttttttttttctcccccagcgaggatttttttgttgttgagaacgccctccttgtctaaccaccctccgcagcactccgcttttgtgcccctctctccccccccctcccactttatagagagggggagaccctcttgtggccccccccgctcagcggggtgttctcacccccgctggtgatgtcccttctagtgaggtgtcccacctctccttggtacaaccaccaccacttcggtttgttatcttcgcgcttcaccgcgggtgtatatcacttatcactcctcggggggtgctccccctacaggtgtgtgttatatataggcgaacccacccgccgatcgccccacatattatatttccaggccctctnctttgttttacaccatatgttttctgggttgcgtctattgtttacacctctcttctgagccttctcagaggtgacgtttgagtgttcaccttctctcctcatttttcgtcgccgggatttgtctcggcgctgcacaccatattgttgtggggatgctccaccgacgggaggtttcctccgggttgttcacacgccctaattatgggctccaacatttcgtcttcacctattttgcgttctcttccccccccattaattagttctcctttacacacaccccacaaaccctttgggtttaaaacccccccccgaattggccttttttaaaagttgggtttatattttttttaattttcccttttttgggggggggtttta

SEQ ID NO: 616848 - DNA, 215 bp, Homo sapiens
  misc_feature (3)..(3): n is a, c, g, or t
ttntttcacaaggatttgagtctgatctgctaacattctactgatttctggcgtaatgggactgcactgcatccatcctactctgttcatagctacttgccctcgttaataccactttaagagttttccaccttgtccagaactacagtccattaatcccctcattttctctcttaagagaataaacaggccaggagcggttggaaacctcttct

SEQ ID NO: 616849 - DNA, 1049 bp, Homo sapiens
  misc_feature (210)..(210): n is a, c, g, or t
  misc_feature (403)..(403): n is a, c, g, or t
tgttccatcgggttgcgtgcgcggacggtactggtgttcgtgtacctcggcgtcatgtgtctgtcgcctcctttggtccttgtgtgtcccgtctgtccgcgtcggcgtactttgctccgggggtctgcgttctttcgccccgtgtttgctgtagctcgatcgcgacggctggccgaaatgccatgtgcaccttggtggtctccgtctctnttgccgtcttcgctgtccgggggtgactctggtgtgtataacgggcgtcgcctcctgtcgggctgcctcgtggagttaccccttcgggttgcgctttcctgtgggcgccgccagcttgtgtatcgatggcgctttctctcgcgcgtaggacagtttgccactcctactactacttgcggtcgcgacaaatgancttctcctaaatacgcttgttcctattcagcaatccccctttgcgacccacacatgtagcctggtctccggtaggtgtgtgctccgcagccgttatctggttgaatttttgtaagcgtgagtgttcacccactctcgtaaggggtggttttttttttaagtgacgcggagattcctttccacagttgtgtcgtttatcacacaactcgtccctagagtgtgtctcctctgtgcgatgagtgacacgtctgttcctgtcattctctcctcattatctctccagtacccatgtcgctcgttagcgttggtgtagtatcactctctcctcccttcagctggggtctgcgtttctcctcgcaccgctcctacttccgctttctcctcgcctacagaggcacctccctcctgttgcccatcacacactccccgttgtttcgctcccactccacccctatacttagaacagcttctcgtaccttgcttctctacacataccagtccggcgccctctatctggacacaccgcagacatgccctcctataacactaaacaccccgttttatcacacctatatacattattcccccccttactcagaacctccactccaaacaaagcccccagtgtttgcccccacaacataaca

SEQ ID NO: 616850 - DNA, 143 bp, Homo sapiens
tgggggagggggcaaaatatgtttccacttctttgtcccttaggtctgtctacaatcctaaaggcaaatgactcacggtgtaacagaaaacaagaaaatccaatatcacgataatcagaccaccacaggtttacattttatac

SEQ ID NO: 616851 - DNA, 164 bp, Homo sapiens
gccccgcctttccttttaaaattcaaaggggaaatttttccccctttttcccccaaattaaacagggggtcggtttttcccgggcccctgcaggggttttttgttaaagaaatttggaattttggggggggattaaacttgtttaattaaaaggaaaaccctta

SEQ ID NO: 616852 - DNA, 967 bp, Homo sapiens
  misc_feature (32)..(32): n is a, c, g, or t
  misc_feature (83)..(84): n is a, c, g, or t
  misc_feature (136)..(136): n is a, c, g, or t
  misc_feature (148)..(148): n is a, c, g, or t
  misc_feature (154)..(154): n is a, c, g, or t
  misc_feature (156)..(156): n is a, c, g, or t
  misc_feature (165)..(165): n is a, c, g, or t
  misc_feature (227)..(227): n is a, c, g, or t
  misc_feature (296)..(296): n is a, c, g, or t
  misc_feature (317)..(317): n is a, c, g, or t
  misc_feature (352)..(352): n is a, c, g, or t
  misc_feature (389)..(389): n is a, c, g, or t
  misc_feature (391)..(391): n is a, c, g, or t
  misc_feature (399)..(400): n is a, c, g, or t
  misc_feature (402)..(402): n is a, c, g, or t
  misc_feature (454)..(454): n is a, c, g, or t
  misc_feature (818)..(818): n is a, c, g, or t
  misc_feature (871)..(871): n is a, c, g, or t
  misc_feature (904)..(905): n is a, c, g, or t
  misc_feature (967)..(967): n is a, c, g, or t
atcaacaactggtcagttgttttttgtttttntcttttccacactgctctctggattcgaacctagtgaattctgggctcagnnctcctcctccatctctttcttgatccaatccacgtagttgagcactttggtntagaagccatancccctncngcacccgangccccaggacacgatgcccgttgccacccagcgatcagtgttcgggtcccttactgcaaaancgcccccactatccccctggcaggcgtcctgctttagagatgggtgtccagcacagaacatgttttganagaacacatccatcctattcnttccccggcgcccagtcctcacagcgcctgtgcgnttagctacgggcagacggacaaacctgaggtcatgtncnatcttctnntncatgaccccgaagccactgacatagcccatcaagcccatggtcgtagaaggnatgcgttgtgggggaggcagagggggaggaggttgggacccagggtgacactattttccagctccagcagggcgatgtccccctcaaaattgtaggactcatcctgacggtagtccgggtggacgctgaccctgcggatggggtgatttcctagcttcatgagctcttccacatttgtgtggcccaggaacacatccaaagaggcgttgctttgcgcttcgtgttccttgggatacagggtgtgggcagctgtgaggatccagcggtcgcccagcagggccccgcccccgcgcccgtggatgttggtgaacacctgccaggggaagttgcccatcttgggctttttgccctccgatgatgcgcngcctctgttccacggggttcacgggcttcccacacactggcaagcaccgaggnatcttctctcccttctgttcattcttccaaatnncctgtgctgtgcaggtgtacaccccttgctcagactccctgctgccagctctggtctgcatn

SEQ ID NO: 616853 - DNA, 230 bp, Homo sapiens
ctctacttctctccttaatgacattaacaccattctccgctccgtccctaacaaagctaggaggcgtccttgccctattactatccatcctacatcctagcaatactccccatcctccatatatccaaacaacacagcatactatttcgcccactaagccaatcactttcatttgcactccaggtggtgtggggtcactgcagctcgcaatcgtcacatcatggtcctca

SEQ ID NO: 616854 - DNA, 175 bp, Homo sapiens
  misc_feature (89)..(89): n is a, c, g, or t
tttgagtgactctaaggatccgtgcgattgacaggagctactgtgactggttcagtagcagctacagcactgcacgtgagcagtcttcncacgactggttcagtggacacttacttcagatttgagcacactcttcccacatgcccggacaaattacaaagatcgcagtaccgat

SEQ ID NO: 616855 - DNA, 265 bp, Homo sapiens
  misc_feature (155)..(155): n is a, c, g, or t
ttcaaactggagaaattatttctttcaagattggtagtatggtcagacatgatggctcatgcctgtaatcccagcactttgggagtccgaggtgggtgtatcacctcaggtcaggagttcgagaccagcctggccaacatggtgaaccccatctntactaaaaatacaaaaattagctgggtgtattggcaggtgcctgtaatcccagctattcaggaggctgaggccagaggattgcttgaacctgggaggcagaggttgcagt

SEQ ID NO: 616856 - DNA, 129 bp, Homo sapiens
tctctgagacgggagtgacgggccggctcatatgccacactgtgcattaccaaagcatgtaaggcacctgagctaagttgtcagacaccccccaaatgcaaggacatgttcgaaatcctggacatcacc

SEQ ID NO: 616857 - DNA, 632 bp, Homo sapiens
gtccgagcaccagcgcgctctgagctgcccccagtgtccctcccccgccagcagcagcccatttggagggaggaagtaagggaagaggagaggaatggggcagccggaccgacataccgcagacagagccggtgaatagggttatgttgggtgacccgacagacaaacagacgacaagagacagagagaaacaatagacaaccacgaaaaaagaagcagacaagcgaaggcagagcgagctagacgagcatagaatggaaatgaagaagaaagagaaaaacagagaaagaagcaaggaaagaagaaagaaaacaaaaagaaaagacaacaacaaaaaacaaaagccgatagaacaaaagaccaacaaaaacaagaaaaaaagaaaaagcaggaaatacaaaaaaaaacacaacaaacaaagaacaaagagaaaaagaagcaacacgagaacacatgggacgaagagaacacacaaaaagacgaagaggaccagaacagacggagaaataaaaacacaccaaaaaaaagaagaaaaagacaaaacaaaagaaaacgaaggaaaacaaagagaaaaaaaggaaaacacacaacataaaaaagaaaagaaaagaacaacaacagaacaaaagaag

SEQ ID NO: 616858 - DNA, 107 bp, Homo sapiens
ctctctcctgacatagtgtcatgcacccggggtctacaggcaggtctgggaaaggctggccagcaggtagcctgtgtgtttgacaaacagcagctcgccccatagtt

SEQ ID NO: 616859 - DNA, 819 bp, Homo sapiens
  misc_feature (43)..(43): n is a, c, g, or t
  misc_feature (46)..(46): n is a, c, g, or t
  misc_feature (50)..(50): n is a, c, g, or t
  misc_feature (58)..(58): n is a, c, g, or t
  misc_feature (60)..(60): n is a, c, g, or t
  misc_feature (77)..(78): n is a, c, g, or t
  misc_feature (85)..(85): n is a, c, g, or t
  misc_feature (93)..(94): n is a, c, g, or t
  misc_feature (97)..(97): n is a, c, g, or t
  misc_feature (99)..(99): n is a, c, g, or t
  misc_feature (104)..(104): n is a, c, g, or t
  misc_feature (106)..(106): n is a, c, g, or t
  misc_feature (108)..(108): n is a, c, g, or t
  misc_feature (125)..(128): n is a, c, g, or t
  misc_feature (141)..(141): n is a, c, g, or t
  misc_feature (144)..(144): n is a, c, g, or t
  misc_feature (151)..(152): n is a, c, g, or t
  misc_feature (157)..(157): n is a, c, g, or t
  misc_feature (168)..(168): n is a, c, g, or t
  misc_feature (177)..(178): n is a, c, g, or t
  misc_feature (186)..(186): n is a, c, g, or t
  misc_feature (198)..(198): n is a, c, g, or t
  misc_feature (204)..(205): n is a, c, g, or t
  misc_feature (217)..(217): n is a, c, g, or t
  misc_feature (258)..(258): n is a, c, g, or t
  misc_feature (265)..(265): n is a, c, g, or t
  misc_feature (311)..(311): n is a, c, g, or t
  misc_feature (330)..(330): n is a, c, g, or t
  misc_feature (355)..(358): n is a, c, g, or t
  misc_feature (375)..(375): n is a, c, g, or t
  misc_feature (391)..(391): n is a, c, g, or t
  misc_feature (415)..(415): n is a, c, g, or t
  misc_feature (420)..(420): n is a, c, g, or t
  misc_feature (431)..(431): n is a, c, g, or t
  misc_feature (507)..(507): n is a, c, g, or t
agcgggtctcgccggcgcagtcaccgcgcagggcggccgcccngangtanctaccacngnctgtgtcaacgactaannctccagnacagcgcnnccntnagacngntnggagggtggctctgccnnnnagctggctccggnganctaccgnnaggangagcggcggangcgacctcnngcctggcntgcaatggccgnccggcnngcgcgacatgancctggtctggcatccgcgggatgctccttaagccccttctncggctgntaacctccggggaacggttgtgaccacaccgacacgtattttacanataaatcattcttgcggcngcgggtcgaacacgtttatttattnnnnattttctcaacaagctnttacccagcacctgtncagtgaaacaacttgataatcgtntcgangggcgtccgcngggttaggaagccactgcctggcagcttgtggaagcctcatttgcaaagccacccctcagatgttttgaagatcgngacgtcttgtaactagcagtgtgtgcacagaatcctactcacggaacgtctgggccagcgatgcaaagaactgaagtttcaagctggaagagcctgtatggtcctcagcaatagtaatagaagaattcaagcagcaggagaagacgagacaacgacccgaagtgaaggactgtagaagaaaaaagaaaggaattgcgagacgatttggaccaagaatctggccaggactaaggaacgaggtaccccagaagggaaaccggctcagggaccatgtatagcagggctatgaccttcgaggaccttggggatccg

SEQ ID NO: 616860 - DNA, 426 bp, Homo sapiens
ctatccagtgttctatgtacatctagatatgacatcagcatgcgctttagtttcctaaggcaaacaaagcccacaccagcccctccacaaacattccccaacgtgtccgtggatgtgtcccagaggggaaggcagtgcaaggcaaacatttagatggtaacctcatagcttccaggtcatcaattgtcttttcccagtataagcaaccgttctctctgcaacattcagcacgggtctcagcctctttcagtatgtccagccagaagtttcatttcttcttcatcattcgtcctcctttacagaatactgtgggagaacacaaaacactgcttaaagaaccaggaggccagccaggggtggtggctcatgcctggcaatcccggcacctgtaggcagcctgaggctgctggcatcattgcagtgtca

SEQ ID NO: 616861 - DNA, 446 bp, Homo sapiens
  misc_feature (416)..(416): n is a, c, g, or t
ttccctctatgtgtccatgtgtcctcatcgtttagttctcacttgtaagtgagaacatgtggtatttggttttcgtcctgtgttagtttgctaaggataatggtttctggcttcatttatgttcctgcagaggacgtgatctccttttttatggctgcatagcattctatcgtgtatgtacaccacattttctttatctaatctaccattaatgggcatttaggttgattccatgtctttgctattgtaaatagtgctgcagtgaacatacatgtgcatatgtctttataatgcaaggatttgtattcctttggggtatcctgggtcacatacaccctttcaagactgagccaggggaggaaattggaatccctggaacaggaccaataaaggggctccaaaatttaaatcagtantaagtaggccctgcccggttttacaaagga

SEQ ID NO: 616862 - DNA, 106 bp, Homo sapiens
  misc_feature (1)..(1): n is a, c, g, or t
ncgggagtggagagagaacggagaagctctggttaggtttgtaagtgaggaggggagtggagagagaaggaaaaagggaggaggggtccctagtaggctgggtgcc

SEQ ID NO: 616863 - DNA, 664 bp, Homo sapiens
  misc_feature (656)..(656): n is a, c, g, or t
ttcatggtatatgtatggtgttgtacatattatatggactaggattgcagattgttgggtgtataaatgtatctttaatggtgctcaagtttttataacttatctgccacaattatagggtcatgaaactagtgccttgttaatactggaaaagataacagatagaaacctcatcaatgcaaccaacgcagccttgcaaacgtgagtactgtcagtatctagtataaactttgtgacctataattataaaaatgataaatggatttttttaaacatgtgactattggaataggctttcattaggtcatagaaagcaattttaaataggttttacaactagtcaaaactctatttcgtaaaatgattcacaaactaaaaagccataattattgtaaaatagctttgtgaactcgaaagttgttatgtatacacattgagcgagataagtgatattctttcttgccttaaatcacaaccatacactaattattctagaagagaaagtaaggtacgtattttaggtgtatgtctagtggaaatatctaacgtataattaatgatggttactgtgaacactaacaaatataatgagagtaacaccgctcccattgtggtgtctcgtaagccaataaaaggtttacttaaagatatcaaanaaaaaaaa

SEQ ID NO: 616864 - DNA, 972 bp, Homo sapiens
  misc_feature (468)..(468): n is a, c, g, or t
gactgtgtcacggtacgcgccgttgggtgatcggaccgcctctggttgcatgaggagccccgtaatgtgtgaaaccacccgagtggaggctgttgtcccgcacgctgtaggttcggcgtcgcgtgtccattaggggattctctgcgtcgcataatgtgcgtgttggcgatgccagttgtcgatggtgcgcgtttgtgcggggtcacagcacatattgcccggaggtgtctcgctcctgcagtgtccgggggctctttgtaaaatgcgcccgcttgttaatcagagggccgcatagatatggtcttgggccagagcgagaacaggaaagcaactgggagggtccacctcatctttgatcgttttcccccgatggggccactcaagccgcggtgtcaggatgacccagacgaccagaaacgacgccccgttgtggtcggtataggtagaacccggcgcaggtaacaccanctcggtgtggtgggcgaaggagcgtgacgcaacagttcagccacgaagttatgggtagcctccactctctgcgggtggtgcgaccaaagccgactatgaccgtttgggacaaattgattgttgtgggcgagatatatcttcattatgtaggatggaccgccctacaagtataggatagtttcctacgctatttgccgcacgctgttgttaatcccgtgaccgacttgctgtgtgtggtagtcccataccacgcagcggtcgctgcctctgagtagaaggggtgtcaacaacaagcttggcgtaggcgattccccgccggggtgaatctctgccgcgaggacagtgagagtgggcggcggacacagtctcccctgccgacgcgtcctctgagaacgccggcggtgatgtgcccgactctcctgctccccccggggctgttgggagggggcgcccctttccctgcttttagccccaaaaagaaaacctaggtccccgccacaaaaa

SEQ ID NO: 616865 - DNA, 788 bp, Homo sapiens
ctttccggccggtccccatggacgcgctggggaagctgaagcagttcgatgcctaccccaagacttggtgaggacttcctgggtcaagacctgtcgggggcgccagcgtgtaccattgtcagtggccttctcgatgctgctacgtgtgtcctgtccgatgctgcagtattacgctcaccacggagagtgcatgctgagctctacgtggacaagtcgcggggagataaactgaagatcaactatcgatgtactttttccgcaacatgccttgtgcctatctgagtattgatgccatggatgtggccggagaatcagcatgctggatgtggaactaagccgaatctgtgtggcaacgcaactgactagtataagagatggcgatccccgatgatgcgtctagaggctgagcggtcatgatgcttgggaaagtctggaggtgatcggtgttttgaccctgacatccacttggtaaccctgactcgtctgtgcagagcctgctactggtgcttgatggcatgaaagatatcaagtgtctgtatacactctgttgcaaggatgctgcgggatggcagtctctgcacgtgaggaggctagccgccttgttcaacgcagaccctaagtatactgatttgcatgtcatgtgcgcctgcgcgaagaggggctctcagccatgaaagcatcgcatggacgcccgaaaggacactggaaggcttgtcatggtgtattggcttcttggcgacgtcccatagcggttggcgcgcatcattttaccatgttttgccccatgg

SEQ ID NO: 616866 - DNA, 257 bp, Homo sapiens
  misc_feature (3)..(3): n is a, c, g, or t
  misc_feature (5)..(5): n is a, c, g, or t
  misc_feature (15)..(15): n is a, c, g, or t
  misc_feature (21)..(21): n is a, c, g, or t
  misc_feature (90)..(90): n is a, c, g, or t
  misc_feature (143)..(143): n is a, c, g, or t
gcnanccttgaggcntgccgngcccttcggctcgccatgcccagcgtcggggaaaggatagaactcggcacgctacgaaatcggcgaagncgcagacattgcttggctggaaaacggtgtccgccgagggacaaaacgcctcngacatgcgcaataaaaactgaaatactgtgccaatggaccaattgaggcgaaggcggacaccgagaattttccgcttgctctcctacttctgactctgggtatttcgtccttcc

SEQ ID NO: 616867 - DNA, 449 bp, Homo sapiens
ggtgaaccagaaccacagatttaggattttcaaaccacagcagtataaactctttccactcctggccactgccatatgccttccagattggtgggcggcatacatgaagcgagacctatcaccggagttaacgaaggcaattggtcaatggggaccatgaagtgaacatgccgtgaagcttcagtgaccctctaccgcatggtacttgcaaggacgtttcaccatccttggagcatgcagaacaactaggtcgatatgacaggccatgtcgggaatggcgtaatgtaggttgcggcactaggagtagatacttcaaattatgccaggctggggatcgtatctcagagaataattgataatggtcgacagatagtttcaatcacacccagagggcttggtagccatttctgcagcggaacgacagataccaacctggatcgacatgacta

SEQ ID NO: 616868 - DNA, 290 bp, Homo sapiens
tcagtcgctcgtggtctcattggggattcgtatggtgaatcactgacttactagcattaattggtaacccccaaatccatattcatggggctggtgtggccattccggggcatgtgcagagggggcaaaatatttggagtcattagatgcttatgtttctagctgagctcaaacaagagggcactgtgccatactgtaaacgggtatcttctcatggacccatggttggcatttggtgctttgggtgggtgatgtcactgttaaaaatggccccaagagcgacggacagg

SEQ ID NO: 616869 - DNA, 831 bp, Homo sapiens
  misc_feature (398)..(398): n is a, c, g, or t
agcggtgcttcggccctcggagctgctgaggagatggcgtcgggctccaaggcctcagtgcccgcggactcattccgcacacatcagcccggacaggcgaggcgataagtccgcctccgcctgttctccggggtacacggggggcaggcacgcatccgtgaaggagcacctgggatgcccaatgcggtcggtggtggtcttccctctcgacccgtgattgaaggtgagaaagtcggggccagtgagacggccatgctgctgctccagcgcctgcacgcggctcagtgccgagggtacagtgggagaggcgtgcggcgtgcggactgcggaggatgcctccctgcgtgtccacgtgcctgacggatgagagatggaggcgcagcaccactgtccccaantctcgctgtgtccgccgggatcgacgtggcggcatcgttggcgcgggacgacgaaggttgtcagctgtatttgcgagggaagtggcatgcaaaagacgtgtaaagggcggcaatgattgctggatggaaggttgatgggttaaatacctgatcagaaataattacaatgtatgaacgacgagaattggggttggagtctgggaagactgatactcgccagatgatactttctttctggtggaaagtaattgaatgaaggcttcatattcccgtatttggatttggtatgagtaggttggaaggtaagcttgtgaagccgagtaacgcagaggactgcatcgatctcgtttcaaaggttactgtttgtgttgctgagccctttttcgttccaagaattggcagatattccaaagagattggggtttgaattgag

SEQ ID NO: 616870 - DNA, 295 bp, Homo sapiens
ttctaccagaccactgaaggagttcctgggaagccgctgcgagtaggctagcactgaagactatttttctattggtataacccgcccacctgaaggggaaagggaaatcaaagttaatttttctcgattagacgataaggcaaatttaacggaaaaacagcgtttcaagaacaagttagcatcagcgctagcactgcagctgcttcaacagcaaagttgcttctgcattcagtgttcatggtgaatggggagtgtgagtctttctgtagggtagaaagcaatgccttccgtaacc

SEQ ID NO: 616871 - DNA, 112 bp, Homo sapiens
agtggtgcataaataatgggatgaggcaggaatcaaagacagatttctgcgacatatggtgctccggttccagcgtctcgcaagtgctatcgcgtgcacaccccccaaagat

SEQ ID NO: 616872 - DNA, 155 bp, Homo sapiens
cccgttaataattcgcttccggatcaagaagtagaactgaccaactgtgagatcagaaggcaccaggtattatctttttgtccaggtctcctatccgagacttagggagccttttctactatcaccggcacccggtccgggtatctccttcagac

SEQ ID NO: 616873 - DNA, 833 bp, Homo sapiens
gagtgcggtggagcggatgccccaccatggttgggatccggaaagactactgtgtgatcgttgagaggatggtgccgtgtgcggaagacgctgcctcctcatcgtgcttcagactatggatcagatttccgtgaggtctacgttccgctaggctggtctataaaggaacatatattgccgcggatgatttgaggtggtactggctaatgcagtgttggtagtctggtcatctgtggtgacaaagaacaggtgcaggtaagacggtatgagtcgatctgcggtcttcttcatcctacccgggacacagatgtatatcctcaatgtggctatactcctatctactagccgtgacagccatgtgaataatcgattcctgtagacaggtggacccctacaggatgaaagcattttctgcaccctagactgtgcttcgatcgatcgcctggttgtggggagataaaggaggggaccatgaccgcgaagtacggaggctacaactcgagtgagagaagctggggccaagcatgaaacgccacgtgagaccccgaaacggatctgagggaacggccgaggcagcacttggacgaaacccggacttcaagatggcgctatcagagctaatccctttgaaggtagcatccaagtcacataatgaacccaaatggggacgtgtgaagtcgcagtctgaagaggaaggtagatgagcaattggtccaccattacgaggcatggagccctccgccagggtccagccacatgaaacataggaggttagtgagagagagcctgttacccatacgttccgtaagatccaccaaggggccttttaccta

SEQ ID NO: 616874 - DNA, 600 bp, Homo sapiens
  misc_feature (39)..(39): n is a, c, g, or t
  misc_feature (176)..(176): n is a, c, g, or t
  misc_feature (198)..(198): n is a, c, g, or t
  misc_feature (224)..(224): n is a, c, g, or t
  misc_feature (272)..(272): n is a, c, g, or t
  misc_feature (280)..(280): n is a, c, g, or t
  misc_feature (312)..(312): n is a, c, g, or t
  misc_feature (328)..(328): n is a, c, g, or t
  misc_feature (353)..(353): n is a, c, g, or t
  misc_feature (368)..(369): n is a, c, g, or t
  misc_feature (376)..(376): n is a, c, g, or t
  misc_feature (460)..(460): n is a, c, g, or t
  misc_feature (464)..(464): n is a, c, g, or t
  misc_feature (486)..(486): n is a, c, g, or t
  misc_feature (493)..(493): n is a, c, g, or t
  misc_feature (525)..(525): n is a, c, g, or t
  misc_feature (536)..(536): n is a, c, g, or t
  misc_feature (553)..(553): n is a, c, g, or t
gcttaagtccaggtgagacaggttttgccatcttcctangtgtcttattgcctcaggcgttaaaccaattcctatttactttgcccagctccatggggttctgagatacatggggccgaaaaggggttatatggccatcttttttcagaaaaagtgtctatacgggaatttaaaanatgaattttccatctgactttntttccaaatacactttcttttttaanaaaccaatacactttctttgaggatgtcagtatttggtaatccatttntacaaaanatactacatctagtctggggttgatatatttntttttgtgttactttntttatgtggcactatttacccagtnactatttggtatctnncatgtcnccccagttctgtaactctgccactgctgcctgtccttgggtcttttctggttgggccctttttcccccccctgcccccccccgngctntgccttcattatctgtttcggngttaagncctgttgtggtgaataaaaagagtaaattgangatgtaagttnataggaagggaatgttngttttaaagtagttaaagaataattaaaaaaagttaaaaaatgttta

SEQ ID NO: 616875 - DNA, 1266 bp, Homo sapiens
  misc_feature (134)..(134): n is a, c, g, or t
  misc_feature (318)..(318): n is a, c, g, or t
  misc_feature (432)..(432): n is a, c, g, or t
gtgaaccactattcacgagagagaaactctaccttcttctatttctagattctccgctacatagatcgtccttaatttataatcattcatcgatgccctagatgctcctcattattttaattattgctttcttntctgataatccagcaacatttattcctcgctagcactattgagtctcattcactctatcgctctgtagtgaacgtgtctaagctcatgtcgcgatcaatccgtcctaataatcagctatgcccttacttcctatacttacacgcctagttagagactcctctttccctcttactgtccctcgtnacttgattgtacgacgtctagcgagagcgacccgtaggctcacttcaaactatgtctcactattcatcgtcttctcctgtacctacgaaacatattctacactccttgccctcntaacaacctttaacctatgtatctagactttacagcgaagcaatctttcccattacgttaaatcgtattaccctacgttcttaacgagagcataccagttttattggaactttcccctaacaaaagactctcgactgtttcgtaaagacacacgcgcaattccgtctggtgggttcgacttagggttacttggaacctttcagataaccttccttttgagaaacttgaaagacccgtctaagtgccttactaaccttaacattcgcactatcacctacatttctctaaatgcgcccctggaatctgaacaacaccataaaccccatgatccccccttatcctatgtctcccctttagtcctccctatattcaacgttcctaaacattattattaggagaaagaccttcccagattctatggctccatatcggtaatcaaacaaacaaggaatctccttttataaaaagccggccttcacgttggctggattggccgtccggtctcgaaatctccaatttgccaccaattagaccccccgatccgtatataggttgaacccaagttcccattttacttttccattccgaagaatggttccccccctctgaaaatgtccgtttcaaccccgtgttccccccatggaccacgtttccctgtccagtttgaatccggcgcgcatcaggaccctttaatctatatcccctccagttttacgcaaattttccgtggggccggtagtcacataatcttccaaaacctttaccgaaatctgccaactcccacccagttccgggcctttcacttgaaattcttcgaccatccagagggcccat

SEQ ID NO: 616876 - DNA, 573 bp, Homo sapiens
gatgttcctgctaactttccacttcatggcttcactaactatgagctgtctggtgttgctttagtgaagatactggccatcattacataggtaccccagagactatgacgaatcactttacagcatccaaggtcatcaacagagaatcctaaatgtcggtagcgttcatcagtttcaaaaagagtgttgtttgtatatggtccaaaaaatgccaaaccagatgatgggtcaataaagtcagcccaataaccctcagctcgaagagcaaagcaaatttccttagcaccattgatgaacttttctaagagcacttctctttcaatttctacttcttcactccaaacagtcatatcattcttagtttttggtgttacagtcagaatcattagtttgccattagctacttctggaaacagtgattcaaaatcttttcgcagcaattctggacatgtttgtattgcacactctactctggcactttcaaagtaagtttctgcactgttaatttcttgttcgacaggtgcatcattaccctgaaattcattcacatattgtgccatcaatactcatgta

SEQ ID NO: 616877 - DNA, 744 bp, Homo sapiens
agtgatgttatgtgtgaaaagagaggaagaaggctatggagcaaatatatcttaataatgaaaagttatctgaaacattttcaaatgtgttcagaagaggaaaaaaaggaaatatttggcagggcgtggtggctcatgcctgtaatcccagcactttgggaggccgagatgggtggatcacaaggtcaggagatccagaccatcttggctaacacagtgaaaccccgtctctacaaaaaatacaaaaaaattagctggacgtggtggtgggcgcctgtagtcccaactacttgggaggctggggcaggagaatggcgtgaacctgggaggcagagcttgcagtgagccgagatcgggccaccgactccagcctgggcaacagagtgagactctatctcaaaaaaaaaaaaaaaaaaagggaaatattggaggtagtattctaaaataggtaaggaaagcaaaagtttaattacccgggagtcatttatttaaaattaggaaaaatttaaaatttcagaatattaaagtgtacttcagtttaggaaatttggcagattttaaaaggagtaaaggtggggcgtgggggttcacaccttgtaatcccagcattgtgtaaggctgaggtgggtggatcacctgaggtcaggagttcgagacccagcttacaacttggtgaaagacatttgtagtaaaaatacaaaaaaatagtgggatgtgggcagccttgtatccagctactcggag

SEQ ID NO: 616878 - DNA, 657 bp, Homo sapiens
accagttcaaagtaacaacagaagttggagatctctgaaaactctgggaggtagagcaggcaattcaattcaaatcaattcatttaaactcacctcccttcattaggtatttgagtccctactatgtatagaacatcataccaggggggtgggaaatgacacactgaataatagataaaacctgtcttctcagtgagcatattaacaactaaatataatattgatcagaattagataaatgttatattgaaagttctttaaatcttaggccttaaattttaaaattataacttatacagaaccagattagagaagtaatgcctggtgctcaaactggttaatttccacctcttgagggatagcttatattgttggatacaccttttatgaagacagaaaaaaatgaccttatgagaaattggctgttactgcaaggaataagtaattttatcatattagcaatggatattatcaaaacaccttgtgagaaatcaatcaaatcaaccttaacatacccaatactgtatttggtgggattcaaattttacaaaagctttcccaaaatagactacccccccctttaagtcttttcccagcacttaaacagaatttttttaaaaaagcaagaaccctgctggaataaaactaattcttgaa

SEQ ID NO: 616879 - DNA, 648 bp, Homo sapiens
ctgcccccgggggtggggccccgcctttttttccggctgctctttttgcccctccttcttcagacgaattgggcgggttaaacccccccggcccccttgtttgatccccgcccctgcgcccccttggggggtaaaatggcctgaccgccgggcccccctttggtggagtgtgtctcgcaacccccgcggggttttctcccccccccgggggcccccctctcttctgtgtggggcttctcctggggggtctccccctctcttctcatggggggcatgtctggccgttctttcccacaagacaaggtggggagcgcccccccggccgcccctcctgcccccccgccgtgggggtcccccgggccggtgtggctctgggcgcgcggctactctcttcttgtgaaggcgctccgccttccccgcccgccgcgctttatggcgccccctcttggcgcccccccgagattgttcttgaaggcgccccccctccgccacagtcttaatatgggcgttcttgccgcaatagccctttctccctcccccgccctattggccccgtctcttttctactattctctcttcccaccccttggcgcccccaggggcacaatataaaccttttttacatgcctaatcataatcagaaaacaa

SEQ ID NO: 616880 - DNA, 118 bp, Homo sapiens
  misc_feature (1)..(1): n is a, c, g, or t
  misc_feature (49)..(49): n is a, c, g, or t
nggtaatcaggtggtgagtgtaagtgcacaagggggcttgactgtgaanactgacagggtcgagcagggacgaaagtcgggactagtgatctgacggtggcttgtggatgcgccgtca

SEQ ID NO: 616881 - DNA, 338 bp, Homo sapiens
tacacctttgtagctctgttgccaggcagaggaaccacctggaaactgagctaaggcaggttccgtcttccaacagaagacacagatgggcagggaatgtgcagactcaagagggacaggccatctaatggccagtcagtgttccatgtctctcaccagtgcctggagggacccccagccaaggacagaactggtcagttcctgccagcagcttgagcttcaatgccctgagagggtcagtaaagggtggtcacttgatgagcttcagcacagaggcggatgtcaacatcgcagaggaagatgtccatgaggtcatgtcctgcctcctgtgctaactg

SEQ ID NO: 616882 - DNA, 820 bp, Homo sapiens
aacatcccagcccccacctacgacgagggcggggtgctacaggctcacgtcaccaacctcgacgcctccccctatcttggccgtctagccctgtgccgtgtcgtctccggtgaactcaccaagggacagacggtggcctggtgcaagcgcgacggctcggtccaaaacgtcaagctctccgaactactcatgaccgaggccctggaacgcgtccccgctgagaaagctggccccggtgacatcgtcgctatcgctggtatccccgagatcaccatcggcgagaccctctcagatcccgagaacccggtccctttgccgctcatccacgtcgatgaaccgtcgatgtcgatgacgatcggtatcaatacctcaccgctgtcaggtcggtccggtgacaagctcaccgctcgtcttctcaaggctcgtctcgatcaagaactcatcggaaacgtgtcgatcaaagtggctgacaccgaccgccccgacatgtgggaagtgcaaggccgcggcgaattgcagctggccgtcctcgtcgagcagatgcgccgcgagggattcgaactcaccgttggcaaaccgcaggtcgtcaccaaaaccattgacggcaagctgcacgaacctttcgagcgcgtcaccattgatgccccagaagagttcatgggccccgtcacccagatgatgggcctacgcaagggccagatgatgcacatggtcaaccacggctccggctgggtgcgcatggagtcgtcgtcccagcccgtggccttatcggcttccgcacgaggttcctcacccagacccgcggtcaggccatctgaac

SEQ ID NO: 616883 - DNA, 251 bp, Homo sapiens
cctactgtatcctaggttacgagagagtactctttttaaccaggacacactttaagattttagaaataagaatatgtttctacagacctgaacattagtggtttttttttttttttttttttggaaacaaattttggctctgtgtggccggggtggaagggaaggggcagaatctcggttcaccaggacctcggcctccaaggtcaaaccaatttttcttgcctcagcctctgtgaatgggcgggaattac

SEQ ID NO: 616884 - DNA, 344 bp, Homo sapiens
gggctgtgttaggccagggttgtcagtgcagcccagcaaggcttttcacaggccagcatcaaaatccaggtgcacacaaatgaaagtggcatttttgaggagaaagttaccttagctggttataaagggttctacgatatagtaacaactatcagtaaagtagatggtgatcttggtattgcacatttgaaaaggttacaatcaaataccttacaaatttgatcaggcacacttttattttctatcacaagaaaattcatcaggtaagcaaattcatagcatgcaggaatcaatttttaaacacgagcaagtcactttcgatttaactgtaaatttgctggata

SEQ ID NO: 616885 - DNA, 173 bp, Homo sapiens
tggtagagatcaggtctcactatgttagccaggatggtgtcgatctcctggcctcgtgatctgcccacctcagcctcccaaagtgctgggattacaggtgtgagccactgcgcccagccgagcatgactatttttaaagttcatggggcttctagcccaactgggaggactac

SEQ ID NO: 616886 - DNA, 242 bp, Homo sapiens
gggcccctttttttttggacccccttggggggggggggggccccctttgggggcccggggggagggggccccccggggggggggggggcccccccccggggggggttcccgggcccccccccccccccctttttgggggtttttccccccccttttttgggttttttttccgggggggttttttttttttttttttcccattggggggaaaggggggccccccccgggggggtttttcccca

SEQ ID NO: 616887 - DNA, 1107 bp, Homo sapiens
  misc_feature (1)..(1): n is a, c, g, or t
  misc_feature (582)..(582): n is a, c, g, or t
  misc_feature (667)..(667): n is a, c, g, or t
nccgccgacgtgagctgagtcaaattgctcgctattccactaatgactatccggctgcaggcggatacgcccgtacgtggttacgtctggcttacgtcattgcggttacagctctgtcagctgtcgggtgccctgtgagcgactgtgtgtgcgtccgtctttatgttcggtctggggttgtctggtaggactctttctggatgccgcctgcttggggaagccgcatgccgcccgcttgcggtgtgagcgcgcgccccgaagttggtgttatcacgcgcctcctatgggcgccgtttcgttcgccacatcccctaatggcgcgtggcccgccgcattttttcttgtgtggatgtacgcgcggtcgcaagacttttgttagccaacgccgcttattagaggttttcctggccgcgggtccgcggcaaatatgcccgggtttctcgcccccttttcccgggggcgcctttcacactggtgtggaatggcgggctgcccccgtttcgccgcgtgtttctgtgtcaaaagcgcgtgtcgccccgcggattctttcccagagtgcttgggctccctcttgcgcctcgnacaggtttcgggggaccctctcttagtgccccgcgcattggcggtgatgtctcctgtcccccctggcggccagacagccaaaggngtctgtctcccccccggtgggtggaacgcgttgttataacacgcacgactgggtctcacaccccgcgcggcctaccgctcgtcccccgggagagttcgcttggggggtggggcccaagacccacaacatatttggggcctactcgtatacacgcgtgtccatattcccggctccgcttcttacgcggcgtgttcctccagaatttggaggccccccggcgtctctcgtcgcaaaccccttggaggggcggttatactatgtcgggtcagggaccccacatggtgcgcccgccctatttgacgccccgccggcgccagaaagtagtgtctgacagcagttcctcctgcacagtctgccccccccacaaaccccttgccccccccccctggggttaaaaattccccctttccccaacataaaaaaaaatcaaaccataaaaa

SEQ ID NO: 616888 - DNA, 432 bp, Homo sapiens
  misc_feature (146)..(146): n is a, c, g, or t
  misc_feature (150)..(150): n is a, c, g, or t
tcctttgtttttagagacagggtctcgctgtgtcacccaggctggagtgcagtggtgcgaccatagtttacttttctgggctcaagcaatcctccgcctcagctttctgagtagcaggactacaggcacacatcactatgcctggnttgntttaaattttttttttttttttttttttggggggagagtggggccccagggggttccccaggcggcagccgcgaatctcatccctttccgggcgtgtatttttcccacgggggtgattgcccaggggtgtcacccattctttgatggacgctggaagattttggtacccatatcccgagacggggtgcatgattcctcggggggggggtccagggaagggaagtgccgggttatcaataaagcctatctccgggttataagagagatggctaaaaagtttcc

SEQ ID NO: 616889 - DNA, 163 bp, Homo sapiens
ctcaaactgcgcccggtgaaggcggcaggcctcaggtggagcccctcgggaaaggcggcccgagagatacgcaggtgcaggtggtcgccgcatcccagccgtattgtgggaagacagatcgggcagctggtcacccacagtgcctactcgtttttcaccgaac

SEQ ID NO: 616890 - DNA, 1953 bp, Homo sapiens
  misc_feature (1)..(1): n is a, c, g, or t
ngactgtccatacggcctgcgtagctaggctatgtcgctgtggtggtttgctgtactggccgtgctggtgtggctgtgtgactgcgtataggctggtttgtgtgctggtcggtgagtgtgtgttgtctcgtcatcggtgtccttctgcgtgtccgctgtttgtgtttagcgagtgctcgtttgttgagtgtcggctgttgtggcgcgtgttgcgtgtttgtcctcggggtgctcggtcgtggtgtgtgttgttggcggctccgagttcttttggtttgtcctttgcgatctggctgactgttggtggcactgcggtgtttattcctcgccgctcgtggtgttttgtggccccagcagtggggtcttgatcgtgcggatttcgtcgtggctggcgcagctgttgtgggcacggtcatcgttgcttgtttgtgtggtccgcgtttgtacgctgcgctgtgtgaggtttcctgtgtgttgttggtcgcggttggtgtcgtcgtgggggtgtgtctgttgggtgtgggtgtgtcgtctgtggtgttgttttagttcggtgggtgtcagttggtgtgtgctgggcagcgccagcgggtgtgtgagtgtgctgccagcggtgtggtggctggtctaggtgcgcgcgttgcgacaccgtgttatgttgtttggttggattggctgcggtttgtagctctgtctctgctcgcgtgcgttggctgtggtgtgcttgtgtgtgtattggaccggcgcagcagtgcaggttgtgtattactgtcttgcgtggctggtctcgatgtgtgtgtggaggcgcgtccctggggggcgagcttgtctccctctgtgcctcgtttgggtcttgcacttagccttcggtgggggctgtcttgtccgtctcctcattcgacctcatgcggtggggtgggttgtctgtacgtatctgtggtcggtctgctggacgtagatcgctcgttgggtactctgccctgttgattattactgtctttttgttttgtgctgcgcacctcagctccgtgcggctgaggccgctgcccatctgcctgtgtgtggccccgcggcgttgtggagctacgactcacctctcgtggtgcgagtggcgctcgctctatcttccgcccgtctaggtgtcttgttgcttcttgtctgttgccgcccacagtgatgcgttctctgcggtgaggcgagggtggttttttgtgctagatagctactggggagtttgcgtcgccagtcgggtcgtgcggtgcagtcgttctcaggtgtacgaggtggcgtctcctcttggttgcgcgtcactccagcaagcgcgacacagccgagtctttttctcctctcccgctggtggtttctatgggtgctgatgcccgtgcttctggtctccgcggcttgcgtgctcctctgtgtgatgtgttctgcttctgcttgtgtgtgagattcttctgcagctgcgccgctgaggtcgtggtgttctgctcagcacggtcgtggtgggtttgtgacgaaaggatgtgtgcttagtctcacgcagcggtgtgtcgtccccgccgctgtggtggtgcgtcgcgtgatgtcgtcgtctctcacgctgtcgttccttcttctgctctcttcgtgatgagatattggtgtgtggggagtctcccccctgctcgcacgcccagcctgcgcgcgacgctgttatacgctgtgcggtgttccgcgctcgcctccgtctcctcgcacgctgctctccggcgcggtgccccagctgcctgatgtgtgtgcgtgtgtggggtgaccctacccccctcgcctgcgcgtgtgtgtgctttgttgttagagcgtgtgtctgtgtctgtctctaagtgctgttcataaccccgcctggtgtgaaacgtggtgttgcaatgtgtaaacaaatgacacctcccttcttgtcaaacaaataacaaacaaaat

SEQ ID NO: 616891 - DNA, 195 bp, Homo sapiens
taatttctggagccaaatgcaaaacaaaaatacatggcccaggttgggtgccatgactcacacctgtaatcccagcactgtgggaggctgaagtgggcagagtacttgaggtcaggagttcaagaccagcctggccagcatggtgaaactccatttctactaaaaatacgaaaatttgccaggtgtggtggcagg

SEQ ID NO: 616892 - DNA, 734 bp, Homo sapiens
  misc_feature (511)..(511): n is a, c, g, or t
gggggggggggcaggaaaaggaagtcccgcctctctctcctcgagggcagaagaaaggcggagaaaaggggaggtgaaggggagaagcgtaggtgaccactcagtgagccctccttcaacaagcccaagaaggtgagaagtgaccccaagagaggagcgtgcagaaaagcgaagaggggagggaggacattataaccacgggctccactctcgtgggcttcaccacgagtcagctcagaaaaacaatcaccccagaggtgcttcactctaaggggccgcaaaacaattaagaaaactcgcggggggccggcgtgtgaagaggggccttcgcgaaatgagggcaccgtggcaaaccaatgggtgtggcgtggaaaaaaagcgtgtgcaggggagacagtggtgggcacgtggaggttaccacacagacagtggtgggcagggggcaaagaacagaaagtatccaaagcacagctcacacaaagagacgccgttacattctctccaaagatgngttcccttggccgcggggagactctcaaagtcaattcggggggctccttgtgggagaaacccggatcacattcgcgccggggccacattataagggcgcccgccctgtgtcttggttggaacagagaacttcaacatcactttgtgtccttattagaaaaacccggtggccaatgggcgggttgacaaacttaataagacgctctgggggtttttcccaaaaa

SEQ ID NO: 616893 - DNA, 118 bp, Homo sapiens
acccaccagcacatgacccctcctgtcttgctgagcttgtgttcttcacctatgtcggggctactctacaactcctgcacatggtcaccccccatttcctaccctctagctttacccc

SEQ ID NO: 616894 - DNA, 115 bp, Homo sapiens
aaaagctaggtagtagcctgtgagtggccagcacagccagaaacaggttttttttgttgttgttgtttttacctaattccctacattgtctatcacaccagatcagctgttgtaa

SEQ ID NO: 616895 - DNA, 163 bp, Homo sapiens
agagcacaccaataaagctaaaactcactgagtagtaaaaaaactccagtagacacaaaatagactacgaaagtggactttcacatatctgaacacacaatagctaagacccaaactgggattagatacccccctactgcttacgccctacaacgcctctgaa

SEQ ID NO: 616896 - DNA, 152 bp, Homo sapiens
cgctggccggcacattgaccagatatagtggctgaacaaacaagctggaagccgcagacctgttgatattccagagtaagaaggcagtgctttccatcaccacgtggttggcagtggctccatgtatctctactgcaaggtgatccatcggt

SEQ ID NO: 616897 - DNA, 782 bp, Homo sapiens
tgaacaatgtaatgtagccaccctcgtgagaccccctgcgctggttgacgttggatgtgccgggctgagcctcggtgacctctgaaatgcctatagtgatggctgctggggacaccatgtgcctgagcctctgaagttgatgtgaatgactgtgcgatgtgagcgtgctctgctgtgagccccccgtggccctgtgaatggcctgaaccctgcccacacctgctgcctctgtaagctggccaatgaacctagtgcccttgcttaaatgccctgctaccttctgattgttgacctattgactgttgtgtgctgactgagtaactgagatcatctgatgaccatatgggcaatctgtgtggcctatgtgacgttgtgtgtcctctcgcgcctgcctgcctgtcctcacctgtgccaggcagtgttggccatcaatgcaagataccctaattgctttacgagttgttggttgaccaatttgccatatgctgggaccctacagtggatgctgaatgtatacctcaatgcactatatataacactgacaaacatacatactgccatacaatgtgacatatccttgatggcccacctggtgccctaattgtgctgaatttcaagattctttgtctaacgttgtgtacctttggacccttgtatttggaaaatgctgatcctgcatcagattcatcccagctacctacacgagccccttcactacttgggaacacggttgcgccaacttcccttgtaccaacttgcttgctgttgcctttgaagtacca

SEQ ID NO: 616898 - DNA, 182 bp, Homo sapiens
  misc_feature (22)..(22): n is a, c, g, or t
  misc_feature (27)..(27): n is a, c, g, or t
  misc_feature (172)..(172): n is a, c, g, or t
  misc_feature (177)..(177): n is a, c, g, or t
aggaacggccctgcaggagcanggtcntgccgactcccccaaccaaggaaggagccctgagtccgcctgcgcctccatccatctgtccgtcagagccggcatcttgctgtctaaagcttaactaagactccgcccggctggcctgtcagaccttactcaggggatgtttacntggtnctcgg

SEQ ID NO: 616899 - DNA, 157 bp, Homo sapiens
gatgggctggaacagtgtttgctctgacaaggatctctgcagcatggcatgagagcacctgaatgactttccagaaatgccatcatcggatgtgacacagactttagaaaaatgcctttgtgcaagaatggccggcagagggaagctactggtagag

SEQ ID NO: 616900 - DNA, 133 bp, Homo sapiens
aaggtctgagctccgttgtggcacagtggttgacgaatccgactaggaaccatgaggttgcgggttcgatccctgcccttgctcagtgttgccatgagctgtggggtaggtcgcagacgtggctcagacctcc

SEQ ID NO: 616901 - DNA, 444 bp, Homo sapiens
tgtgcccccactaccccctttctactgcctattttaaaaaaataactagtttgcgggaacggatctaaaattaaaaaaataaattttcttaaattccattataaactttaatttacatgactctaagactataaaaaaatctgagggcagcgacaaggtgctagcatttatggtaatctaataaagacctgtgagcatttgtgcaccttagtgagtgtatcagtggtggcagtgtaattttggccttgtgtaaagccgggacctggtaagaacttgaaattttatttttttttccaaggacgagctatagaaaggctatggagagtatctagtcacccggggcagtagtggagaccctggcgggtgtttgtgatgtgctccggggctttggaatggcttaatcatcaagtctagggcaattttcccttggatgtccaggtccta

SEQ ID NO: 616902 - DNA, 191 bp, Homo sapiens
ccatcccgtttcatttcagttcagttactatagctctgtagtataatttgaagtcagataatgtgattcctccagttttgttctttttgctcaggacagctttggctattctgggtcttttgtgggtccatataaattttaggattttttttctaatctttaaatctgcagtatttttaactttcctattc

SEQ ID NO: 616903 - DNA, 280 bp, Homo sapiens
ctagggtaggggacgaccaagcggctctttctacggagcagatttagaaaaacttcttgccataattttttggtgattttttcatttcccttactacaaaaaatagattcaccctcgtaatatttagagtccttttctttcagttttgtaatgagataattaagagtataaagatatattaaagacagtcaaaagaatagtagggacatagcaaaaaccttcccaggaaggttttcgaaggcaggagcaaatataaaataaaaaattaaaccagctatta

SEQ ID NO: 616904 - DNA, 144 bp, Homo sapiens
tctgggatagtaatggaagtagaatggtatgggatggagagaatggaatggagaatggaagggaatgggagggagaatggaatggaatgcagaatggagaatggaatggcaatggcagaacggaatggaatggagaatggaatg

SEQ ID NO: 616905 - DNA, 229 bp, Homo sapiens
ggccatgtgccctaggctgatattccccctaggctgcttcctgtctgccatgtgatatgccagctcttccttcagtgttccatcactgattgcaagcttcctgaggtcccaccagaagccatgcacgatctggtgcctatggctgtacatcctgcagacaccatgagcctaattaattcctcttttctttataacattacccagtcctaggggccccctaggtctgatt

SEQ ID NO: 616906 - DNA, 192 bp, Homo sapiens
agtatgacaatggaagggcaagaacacacagcagacacaaaacaagaggactagccatgggcaaaataaacagagcagattacctcaccaacatgcaagcatacgcagatacgtaaaataagtccatgaaacaggggctcagcgatcactatgtcggtgtacctgagctcgagattcgctaattcactggat

SEQ ID NO: 616907 - DNA, 259 bp, Homo sapiens
  misc_feature (41)..(41): n is a, c, g, or t
  misc_feature (66)..(66): n is a, c, g, or t
tcctttttccccccccccaaataatggcaattttttagggnaccaagggggggttttccctgaccnggttccttaaggccctttgcccccctttggccaggcctttttcaaaagggattccctcctgggggtttatcattcagctttggttgaatttttttatccccctgaaacctctccccccctttggccccaaggaaattgtttttgggggttttcccgaccccttaaaagtaaatccttttttcctttgggtgga

SEQ ID NO: 616908 - DNA, 365 bp, Homo sapiens
tgttaaccatctcagatagtcgaaaacgcagaatcctatgaaacccaaaagttcacgacgaagttcaaaaattcttccaagacctttacctcgagaaagccacttcacctctgtatttagaaagagtcctgtgtgttgacgcacccttttcctcacataaaatttttaatagtctgaattaatgtggtcaagctttaatataattgatgatttgtactgctgtggtatagcacattttttagagatgtaggcattattttacctgcacgagtgcatgtctgtataatagcacagtgactactggcgctttcgagagccacatattttattaaggtcacagcttcggcaattttccctcgtgccgt

SEQ ID NO: 616909 - DNA, 114 bp, Homo sapiens
gcagcattccagcagcgctgtggtttacaagcaatttatgcttttacctttctacttccagaggcttgtatacttattagtaagcattaatttagtgtcccctcatccgcttat

SEQ ID NO: 616910 - DNA, 375 bp, Homo sapiens
  misc_feature (219)..(219): n is a, c, g, or t
  misc_feature (229)..(229): n is a, c, g, or t
  misc_feature (235)..(235): n is a, c, g, or t
  misc_feature (246)..(246): n is a, c, g, or t
  misc_feature (250)..(250): n is a, c, g, or t
  misc_feature (370)..(370): n is a, c, g, or t
  misc_feature (372)..(372): n is a, c, g, or t
aaaacatacacattacattcaagagcttaagattaacagctgggcttctcaagaaatattatggaagttattatagaaaacaatgaaataatacagtagagctctgaaagaaaaagctgccaagctagaattctaacccagcacaagtattcttcaaaaatgaaggtaaaaataaagacattttcagatcaacaagtcctatcaagaatttgtgcacancacattcacnttacangaaaacaatanaggnagttttttaggcgaaagaaaatgattccagatagaaacatggatcactagggagaaataaaaagcaccagaagggtaaatatatgggtaaataggtactttaagctttatgagtaaaggncnttg

SEQ ID NO: 616911 - DNA, 588 bp, Homo sapiens
cacgcgtcgaaaaaaaaaaaaaaaaaaaaaaaaaaaaaaaaaaaaaaaaaaaaaaaaaaaaaaaaaaaaaaaaaaaaaaaaagggggcccccaaatttcccccgggggggcccctccccccccttttttttgaaaagggggcccccaaggggtgttattatattatatagatgcagcagaccacgcgcccggcgttattataaaaaaacagccgtctgatgaggggaaaaaagcggttcctcagcgggggcatcttttttgagagagaacgccacccctccctaccttgacgggaggaggagcagcaaccactattgtgggaaacaaactacttatcctggtagtgatatatattataagggctgctggtaagggaggtaatatatataataatattttataagagtgtcgatatacggtgggggtaacacaaagagcggcgtctaattattactgcggcgtggacagaaaaatcgttgttggctaagctggttagttgtatttttagtagaaaaatatttatttatcccgaggaggctatcttaatactaaaaatttaaaacgagcaaatatatatataaaaaaaaa

SEQ ID NO: 616912 - DNA, 819 bp, Homo sapiens
catgccccattgccctccagcctaggggacaaagcgggcccctgtttccaaaaaaaaaaaaaaaaaaaaaaaaaaaaagaagaaatcctcagcaggctgagatggaactcattcttctcatgaagaacgtggcaagcattatacagaggggccatagtctggaaagcaggagatgcttacagacatataagttgtttccagtgttttgctcttggtactcatggttccactatttacatcaaccttttgagaaacagatttatacactgtcttatacttccctcctttgctacagaatgaatctacttgtaacctaccaaaaatttaccctgtcacatttccccagctgctggtttaaaaataaatatcctggatttaaagccaattgtgtctaacaggtgccaccatccaagtgaggatttcactgttcacaggcatttgagacacaccagcggccggcggttctcactgctcttcatatggaggcaaccatatatgggtaagtcatttagtctcttaggtaggcgaactgaggccaatctccccacttttagggctgtgaaactgttctgtatgatacaataatggtggatatgcgtcactatacattcgtccaaatccacagaatgtacaacaccaagagtgaaccctactgtaaactatggactctgagtgacaatgatgcatcaaataggttcatcagttgtaataaatgcactgctctggtgcagaatgttgatgatggaggagacaggggtacatgggaatctccgtaccttccattcaattttgctaaaactactctaaaaaataaaaaaa

SEQ ID NO: 616913 - DNA, 726 bp, Homo sapiens
gatgttctgccccggctgcaggaacgcgctgatcgtggacgagggacagcgctgccaccgcttcgcctgcaacacgtgccctacgtgcacaacatcacccgcaaaggtaaccaatcggaagtacccaagaactgaaagaagtggatgatgtgattgcgtggagcagtgcctgggaaaatggtgactctactgcagagtcgtgtcccaatgcgaacatcctcatgcttacttctatgcaggttcagacccgctctgcagatgagccgatgaccagcttctacaagtgctgcaatgctcaatgtggacaccgctggagggattagggccaggatgtcccacgctggcctagtgtgtgcttgtcttgtccatcgggttagatgctaagctggcagatatgcagttgtgtgtcctgagggtcttgtgctagtgtggtggaaatgataacacgctttgaggctgaagagaccagcggggtcagagaaatattggtcctagtctgccaagagaggagtgcctgtacactcagtgaatgtctgggcagattgtactggtgttgctggagggaagacaacaaggacgccaataagctaacattactgcctcgtgttaagaggtcctatgtctgtgcatctgtccactttatcggcagtcgacagttccctttactcccaatcacgactcttaacgtagtctgtacagcttggtaaaaacttaagtagcatgtcc

SEQ ID NO: 616914 - DNA, 128 bp, Homo sapiens
tctttaaggcattgagatgtttctgtatatgcacatcaaaagcacagcacttttttctttaccttgtttatgatacagagacatttgttcacgtgtttacctgctgatcttctctccactgttatcct

SEQ ID NO: 616915 - DNA, 555 bp, Homo sapiens
ctagagaccccgaacatgtgagctatacctgtatttgtactttcacttatattggacatttctatcatccgcgtttgctattatgaagaaactatcatgagcatccatacgtggcaggccaggtctcactaacacaggcctccctaacaactgtttcagtaccgactgagtggttcaattaaatattaagaggaaaaaaaaaaagaagccagtgcccttatacaaaggctggaatgtaacaaaagcccaccaagagttttgcctaggtttttcctgggccttaaagcatgacgaaataacgaaggcattcttaacaggagccatttagtattcaacgagttttatggggggtctgaagaaactccccaggcctccacaaacaagtttatgggagatctgaagggactctccaaacctctgtgatttagcaggagacaagataagggccccagcatctagacccatttagattaactgaatttaactgaggtaccagagaagggtcttcaggactcagacttatagataaaagaagttatcattatgtatttgata

SEQ ID NO: 616916 - DNA, 260 bp, Homo sapiens
ggtagctactacaagcttgaaaaagggaaggaggccaggcatggtgctcacgcttaaaatcctaagctttaggaggctgaggcaggcagattgcttgagcccaggagctcgagaccagtctgggcaacatggtgaaactccatctctacaaaaaatgcaaaaattggctggcccaggaggctgaggcaggggcatcgattgagtctgggaggtcgaggctgcagtgagccatgatcacaccagtgaaccccagcctgggc

SEQ ID NO: 616917 - DNA, 455 bp, Homo sapiens
gttcaactcttggagcacgactgcagttttttgggagggggcagcgcacccgcaagggctttcctcctctgtctttgggggaccaggggctctctcaggggctctgggggctgcgggctgtttcagccagggaggccaaaatcaagagtgagatgtagaaagttgtaaaataaaaaaagtggggtgggtgaatcggttgttctttcctccccttgggaggattgtcataagggttttagcagggtccccctttttttccccccccccttttttttttttttaatcaagagaaacttcaaagttaatggggggggggggtttcccagggtgagaactggttccccccccagcctttcatgaaaaagggggtttttttttatcatccaacctctccccctgagggggagggtttccccaacccttccaaataaaaagtaatggctttggaactgcca

SEQ ID NO: 616918 - DNA, 171 bp, Homo sapiens
cggtgataaagtctatgctgaaagatggaaagggagaagatagatccaattaaaaaaaattaaaaccaatttaaaaaaaaaaagaacacaggaaaattccagttctacttgaatttagcatcaatacagaaagtccccttctactattaacttttatacaaaaaaagttaa

SEQ ID NO: 616919 - DNA, 828 bp, Homo sapiens
tggtccacgatgttaatatgtcgaccacgcgctcgttccaggaggcggaggctgcagtgagcgttagatcatgtcacgtgcactccagcctccgcctcctgggttcaagcaattctacctcagtctcctgagtagctgggatgacaggcacgccccaccacggtccagctaatttgtttattcgggtttctgagacggagtttcatgctgctgcccaggctggagtgcagtggtgcaatcttggctcactgcagcctctgccttctgggttccaagcgattctcctgcctcagcctcccgagatagctgggactacgcccagctaattttttaatagagacggagtttcaccatgttgaccaggctggtcttgaactgacctcaggtgatcttgccacctcgggctcccaaagtgctgggattacaggcgtgagccactgtgcctggcctaatttcggtattctcgttagagacagggattcaccatgtcggcctggctgatctcaaaatcccgacctcaagtgatcctccaaactcaccctccccaaagtgctgggattataggcatgagccactggggcccgccaggcctttattgagacacgtatcgctctgtacgaccaggtaagagtgcaatgggaccaatctcggatcactgcaacctccacctctcgggttcattctggttactcctgcctcagccttcccgaggtagctcgagattgcagacgcccaccgaacatgacaagttacattccgtatctcaaatagacatggatttcaccactgtcgcccacctggtctcaaactcctgacttccgtaatccc

SEQ ID NO: 616920 - DNA, 170 bp, Homo sapiens
attaggtgatcgttacccactgagcaaatggcagggaccaaacccgcaacctcatggttcctagtcggagtcgttaaacactgcgccacgacaggaactcctagagttgaaatttttaaatttaattttatttttgtctgccatgccacaggtatggccctaaaaagacc

SEQ ID NO: 616921 - DNA, 360 bp, Homo sapiens
gcacgaatttgccacatgtgtccagtctatcagtctacggcgattactatacctgacaggcagattgcaatgtactgaattagctatcacgtggcctgccgttttggaggaaaggcaagttggattgaatatctcatcatattcttcaactagtttccgttctgttcaagaacatactccagctaccacgtggcaggcacatagttggtatcagggcattctgaaatgctgaaatgctgctctgcctatcagcttctctctgtcccagtctctccctggggaaaggctgcatggggagcaagcccctgcatgcccgaacacggagtccagatgaggcttgctgtgctcactccatccctt

SEQ ID NO: 616922 - DNA, 261 bp, Homo sapiens
tgtttatttcctgaaatttcagggtctcaacgatagttgggctcccctaaaaatttagtttttttttgggtaatcctaattcaagtaatgtttttaaagtttccctgcaaaagtttatgttccaagcccttgggcagacctgctttaaatatggcccgactccagtgagcccttaaaaaaatatgagggttttaaacgggggctttcctttgattttggccttttttgttttttcaaaaataaaaaagttggatgtggtta

SEQ ID NO: 616923 - DNA, 498 bp, Homo sapiens
tgtcatatagtcggcatctctctattgtagcttgcgattgtttgatcatgggcttgagaatgccatagctaggatcgataagatgaccccagaccttatatccaagacgatccagaatctccatatcacagtgtcaccgtggccagaaaggatccggactataatcatctgctcccctctccatagtgtgaagtatcgattgcataacatcatttggttggtctgagcccaacaacaggtaatccagggctagtccgatcaaaaatggtcagcaccatgcaattccctaaccaatagcttaggtaagtggggagtatcatacatgtgtagaggcagaacaatcagttcaccctactctaggccagaagaggtatccagtgtctggactctctacgaagccccagctcaaagacgttaaaaaaggcaactgtaaaccttctggtaagtcatattattcatctctgtcctgttcccccaagtttctgtgcagtcaagata

SEQ ID NO: 616924 - DNA, 860 bp, Homo sapiens
gtgacactggcatggaagaggtcaagcctgccgcttcgggcttctcactgcagctgggcttggacttgcggagttgcgccagtggcagatgggacgtctggagacgtttctccttcaacgtacttgggagatcactctcttagcagggtctgcgcttcgcagaccgggatgaatgctggtttccgtcgacccgtgatgtagcctgggttcggtcgccttcctaggcgtctgacaccgctcggatggagtgtcgcgtcggagtttcgaatagaagtggaagtaagtgggctctgagtcgtgggaagagggaacatgcggatgtccatgcagcatagctccacacgggctcgctgacagtgaaggccgggcctgcctcagaggcctgtattcggcgccaggacatgaggggtgcctctcgaagccccgaagacagcagtccggatgccgcccgaatccgagtcaagcgctaccaggcagagcatgaacatacttcgagggcctgcggtagcttggcatggcgtttcgggacgttgcacggttgcatgaagcgtggtagaccagatctaccaggttcacagatgaggacacagggacaacgtgcggcccgcaggagcaagatcagtccccagggcctacggtcgccggggccggcgctccctgcccgaggccggccgggtcggacgtcaggtgtcgtgctaagggcacacagcagacgggggctccgagccccgccgaagtggagagtgtgcgccagagagcgtcagagagttcaggggcgcccatggtgacagggaattagtcggcgcaagcatcccgggtggtgccttcccggggccggagggacttccgagcggtgtggg

SEQ ID NO: 616925 - DNA, 181 bp, Homo sapiens
tcagtgtatttgccagaaatggaaatgtcacgcgattgcttcggtgttctggagattttggcttttatccaccttttgtgagtgcaccaactccactcttccactccttatcattttcctggtttctttctggtctttatcttccgacacatcattcttcagcatggtggctggagggaaa

SEQ ID NO: 616926 - DNA, 255 bp, Homo sapiens
cctgaaggaaaatagtagctttttcaatgctgttctgtgtgtgtgtgagtgcctttaaatcaagtactgattaactattaagtgacaactttgtagatttttagttttaactcttcaggagccagatgctgtaaatagaaatttgggtatttctcaaagactctacagataaaactctaataaagctatatatagagtacacattcaaatgtacacacacacattttgatgtggaaatatgatacacgatgatgt

SEQ ID NO: 616927 - DNA, 314 bp, Homo sapiens
actggactggtcaagaacaaagctcatggcaatagtcttttggaatgttaaaggaatttttctagttggctttctggagggccaaagaacaacaacatctgcttattatgaaagtgttttgagaaagccaaagctttagcagaaaaacacctgggaaagcttcattagagagtccttccccatcacaacgcttctgcttattcctcttataaaacaagggcaattttgtgagagctactgacgattttcccctcgaaatttactatttctacagcttattaatctcaaatagtaagcatgtccttgccgtcact

SEQ ID NO: 616928 - DNA, 376 bp, Homo sapiens
  misc_feature (75)..(75): n is a, c, g, or t
  misc_feature (109)..(109): n is a, c, g, or t
  misc_feature (136)..(136): n is a, c, g, or t
  misc_feature (158)..(158): n is a, c, g, or t
  misc_feature (162)..(162): n is a, c, g, or t
  misc_feature (187)..(187): n is a, c, g, or t
  misc_feature (204)..(204): n is a, c, g, or t
  misc_feature (207)..(207): n is a, c, g, or t
cacggacgagtcctttatcaatatatgtctcagatttatcaactcaagtgcagccaaattctgtctctaaaaaangagtaaataaatgaataaataggccgggcacggnggctcatgcctataatcccagcacttngggaggctaaggcaggaggacngctngagcccaggagttcgagaccagccngggcaacataacaaganctngtctgtatacaaaatttaagaattagcctggcatgtgggagcccacctgtggtcccagctactggggagactgaggtgggaggattcttgagccggggaggtcgaggctgtagtgagctgcattggcaccacggcactccggccggggtgacagaacaaacccggtctc

SEQ ID NO: 616929 - DNA, 588 bp, Homo sapiens
atggccttcgtgctctctctactcatggccctggtgctggtcagctacggcccaggaggatccctgggttgtgacctgtctcagaaccacgtgctggttggcaggaagaacctcaggctcctggacgaaatgaggagactctcccctcacttttgtctgcaggacagaaaagacttcgctttaccccaggaaatggtggagggcggccagctccaggaggcccaggccatctctgtgctccatgagatgctccagcagagcttcaacctcttccacacagagcactcctctgctgcctgggacaccaccctcctggagccatgccgcactggactccatcagcagctggacaacctggatgcctgcctggggcaggtgatgggagaggaagactctgccctgggaaggacgggccccaccctggctctgaagaggtacttccagggcatccatgtctacctgaaagagaagggatacagcgactgcgcctgggaaaccgtcagactggaaatcatgagatccttctcttcattaatcagcttgcaagaaaggttaagaatgatggatggagacctgagctcaccttga

SEQ ID NO: 616930 - DNA, 680 bp, Homo sapiens
aagaggcggactagtcataaccgatctttacttaccgagatgaacaggctatcaattaacagcgcctgctcgacggggggagttgcaacaccgagaacgcaatctcgctgcgaatgactacagaaaggattctgactctggtcaggacctgtgtctgatggaaggcacgcatgctctctggattcccagaggaaacaacggcctgtagactgacgtcttaacactgctttacaaggcttaactgtcataggcacataccttggtgtagtgggcggcggacactctgcctatattgctcaggagcactggaatatctggaacgccatggaagagctcaaacagcagtaatgatcacaacagcctccttcacttttatagagagtgatgaaatcgcgcactggctctctaaacgtgagagtaacagtacgaactctctgcaccttaaactcaaggaaacatatctctgaatgctgcagcaatgtaacgcactatcccaactccgtcgcattgaccaggtgccaattgttcctcaagtgaatgcaggtgccaactgtacactctggaaagactatgcactgcttaggctaagccatttaatatgcctgaaattggaacataggtgacacagcatgatatgataatggctggaaggctctttggcctagcacatgttgctcttt

SEQ ID NO: 616931 - DNA, 381 bp, Homo sapiens
  misc_feature (5)..(5): n is a, c, g, or t
  misc_feature (12)..(12): n is a, c, g, or t
  misc_feature (16)..(16): n is a, c, g, or t
  misc_feature (19)..(19): n is a, c, g, or t
  misc_feature (22)..(22): n is a, c, g, or t
  misc_feature (24)..(24): n is a, c, g, or t
  misc_feature (36)..(36): n is a, c, g, or t
tgtgntgtatgnacgngcnatntntatgaagcacanaaggatcactcaatctagacgcgaacatctggtgtgcaaattaaagaaaacattgtacgtattaaaacagtctctgagacagtggtacaagcggtttgattcatcatgattaacatttgctacaagcgatgtgagcatgattgttgtgtttatgttaaaagccttgatgatgggtcatttatattttgttactgtatgtggatgatatgttggttgctgcacaacatatgcataagattgttagtttgaaagctttgttaagttaggagtttaatatgaaagacttctccactttcggatctcgcaaagagagaacatgttttttcctcataacaccacacaatt

SEQ ID NO: 616932 - DNA, 128 bp, Homo sapiens
cagatatatatgtacagtactcagaatataagggaatggacgatagacgaaaatgagatactctttagtgagtacagaattagaagaaaaaaaagaagaggggtagagcagtgccagaggcaaacggg

SEQ ID NO: 616933 - DNA, 988 bp, Homo sapiens
  misc_feature (1)..(1): n is a, c, g, or t
  misc_feature (77)..(77): n is a, c, g, or t
  misc_feature (133)..(133): n is a, c, g, or t
  misc_feature (189)..(189): n is a, c, g, or t
  misc_feature (192)..(192): n is a, c, g, or t
  misc_feature (194)..(194): n is a, c, g, or t
  misc_feature (200)..(200): n is a, c, g, or t
  misc_feature (251)..(252): n is a, c, g, or t
  misc_feature (254)..(254): n is a, c, g, or t
  misc_feature (276)..(277): n is a, c, g, or t
  misc_feature (284)..(284): n is a, c, g, or t
  misc_feature (290)..(291): n is a, c, g, or t
  misc_feature (301)..(301): n is a, c, g, or t
  misc_feature (304)..(304): n is a, c, g, or t
  misc_feature (307)..(307): n is a, c, g, or t
  misc_feature (319)..(319): n is a, c, g, or t
  misc_feature (321)..(321): n is a, c, g, or t
  misc_feature (323)..(326): n is a, c, g, or t
  misc_feature (332)..(332): n is a, c, g, or t
  misc_feature (334)..(334): n is a, c, g, or t
  misc_feature (337)..(337): n is a, c, g, or t
  misc_feature (340)..(340): n is a, c, g, or t
  misc_feature (352)..(352): n is a, c, g, or t
  misc_feature (354)..(354): n is a, c, g, or t
  misc_feature (356)..(356): n is a, c, g, or t
  misc_feature (359)..(360): n is a, c, g, or t
  misc_feature (374)..(374): n is a, c, g, or t
  misc_feature (391)..(391): n is a, c, g, or t
  misc_feature (396)..(396): n is a, c, g, or t
  misc_feature (399)..(399): n is a, c, g, or t
  misc_feature (413)..(413): n is a, c, g, or t
  misc_feature (422)..(422): n is a, c, g, or t
  misc_feature (434)..(436): n is a, c, g, or t
  misc_feature (450)..(455): n is a, c, g, or t
  misc_feature (467)..(467): n is a, c, g, or t
  misc_feature (504)..(504): n is a, c, g, or t
  misc_feature (532)..(532): n is a, c, g, or t
  misc_feature (539)..(539): n is a, c, g, or t
  misc_feature (601)..(601): n is a, c, g, or t
  misc_feature (604)..(605): n is a, c, g, or t
  misc_feature (726)..(726): n is a, c, g, or t
  misc_feature (910)..(910): n is a, c, g, or t
  misc_feature (981)..(981): n is a, c, g, or t
nggaaataaagttttatcaatttaataaaaaaattttacaacataacatggggaggtaataatttgatatctatatnatagtatttattttgaaaaatattcccagcttgagggtaaaacaattaattttgcnttccaaactctagaatcatgattttcatgtgagcctaatgcagaattacagcaganaancnaaaacnttttcattaatttcctttgtcattaaatcaataaaatctttgactgccacnngnctcctttaacaatatatatttnnctccccnattggnnccatattgcnaangcngccttatatacncncnnnncccaancncancanatactgtataanancnaanngccaacattgagtngtaacatttatatttancttanggntttaatggattttnacctttgcngacacccaaaannnaaataaaataaatnnnnnnctgactgtcccngacttaaatgatggctacagggataaacacggaaggnagccttgccaagttaatcactgccaatngtaaatnatgactgccaaaaacaaacagaagtttttttcttttaaaggaaaccatagagcagtcctganaannatttcttcctagtcctgcacaggataattacagcagaagacatgggaaaagtcccatggcaatcaccaattgcttaaagaggttttgttacaataaaaatttggatagtataatagcagtnttgctggaacattagcaaaagtatatacattccagttacctttgatttagccataatcacatatgtatgcttttttttttcttggacaaaaatatatatttttataaaaaactgatcatccaactttaatgatttcatatatggactcaagagtggtagtaaaaggaacagacccaattatganaaggcgatccagggacagaaaaatcaagttcctcaggaaaagaaagtataaattagagattcaacacattnttcagcc

SEQ ID NO: 616934 - DNA, 142 bp, Homo sapiens
gtcaccagaggcagctctgcggcggagcgctcaggctcagtccagcctggaggcaggctctctacagctcgtcttggctggccggggacatcttcctcctcatcttcctccttgtcctcctcatcctcctcatcctcatctt

SEQ ID NO: 616935 - DNA, 362 bp, Homo sapiens
tacaccatccccacctccacctacattaaccacatatcctaatactgaatatcaaaacattctaagtccctaaaaatattaaaggaagccccaggacttacaattgagtccctggtggtttgtggtttgtgggttcaaaattacacagcactcctgcactcctgcacttcttgctgcttgcaatctccaggaacctactagtcaaagcagcatctggtctagatggcacctgcagctctcctctacaggatactcttagcaacctcatttcctacagtggttgtagcgtggtgcaccagggggcttgttgaacagatcaacactgctctaataaagttcccatccttaatgaaaaaaaaaaa

SEQ ID NO: 616936 - DNA, 947 bp, Homo sapiens
atctgcattacactttctgaataaaagtgaagatcatgggtgattaaggatattgaaagagaagacatgaattcatttgtaagacaatggaaccaagccaattggtcaatagtgagcaactgggttgggtcctaatagtgcatctcaaatatactagagccttaacctatccttgccatctatagttactgcagcctttctcgtctgcgcaccattgcattcgcgctcctcgccgtacgagcatgtcgagtcgcacattcgctaaggctagcactgtgactcaagctgcgccacgtgacttcgagttgacaaagctgttgtcactgcaactacagggttaaacactgtttcataaagtcagtcacgcaaatgcgagagctttggcatctatatttttaggctcgaataagtttgtaatgactcgattccgtttcgatcttactcaagatgacgatagaggagagggaaacgaataagtaacagagatggacaatagtaagaagagaacgtgaataagaaacagaaagagcaagggatacggcacacccacagcacaacacggtggcgagccggcaatggcgaccaacaaataacgggaacaccgtagcacccttccagccctcaactacggcggccagcacaaaccatggcgcgcacagatgtgggttcatatgacacaacattccccatcaacgctaagcaccgccacgaacgcgtggcacacaccacacgccaggcgagggaggcctaactcagacaacgggctacacaaccaccacccacaccggccaacaacactaccaaaacccccgacagaaacatacatgcacccggattcgtaaggcccgtctcccaacaacacgtatcatcagccatggacaaaaccaatgcgcaccacactcgcaacacccccggtcaactcgcaccaggggaggaaggcaaaaaag

SEQ ID NO: 616937 - DNA, 932 bp, Homo sapiens
  misc_feature (298)..(298): n is a, c, g, or t
agcggttagagagtaatgaatcaggtggagctgaatgatggtcggtcagtcttgtatggctatagtgtgtatgatccggtttgttgcctgttaagtgtccagtttgctccagtccacaacttcgtcttggaacgagctatctattggctatccgattccggaattgtggcatcagtagttaactgtgcattggaatatatcgacattgcgacatcacattatagtatggcgtaccgttagtatttgggagtatcagatgtccttcctggtgactgatatgcatcgtggtagtgtatcnctaccaccaagacattcataaactagattcgccaattaactcgtaatgactaattagtgacatcaaggtgcggaataaagtcgaggagtaaggagccggaattccctccatccatctctatagtatactatcgccatttgcgaatatgggtcatcaagcataattgctcagtttcatttgccttgttcggtcatcaacatattgtagagatatgttctatgtctaaatcatgctgaccagatagaatagtgctttagacttagggattgatacactcagggaattctacatataaagacggtggttgtgatacaacttttggggaactcgaatctaagcctgtttgctcgtggctgtagtctatatgtaacgtggagtttgatgcgtctcgcatgtttacttagagtgctttggaattcgctagccaagtagtcttggtgatttgccagaagtgccaagtattcctgatctattgtatataggaattatgccattcctgtcattcatgtgcagtggaattggtggttaatggtagacgaatacatatctaagaagagcgagttaggttgtaaaataaacagaaaattttaacttaatacacaaggatccagatgctagagtatctggagatcaa

SEQ ID NO: 616938 - DNA, 111 bp, Homo sapiens
ggaatcacactggatcaaccgcgacgtttcgttctctcgaatggccatgcatgtgcgttgcagtacatcatgctgcatctcatgggttacgacctgacgatggatgacctg

SEQ ID NO: 616939 - DNA, 863 bp, Homo sapiens
ggcgccaggtggtaagccgtcgggcggcttttggacatggcgactttttctggcccggcttggccagttcctgtcgctttaattccggcacgacaacgattgtcgagtttacacaaggacgcgttggcgcaggtttcggcacaggccgcattatcgcacacgcggaaaaaagatgcagggaacccaagtttttacttcctgggaagtaacgttcaaattgttgccgccaaatcaaaaactaaagaccatacttttgaagtgaaacgaccgcacaaggaaattccttttgcgccaaataaatttgtcacttccccgcaagatgtgtggcgccacctgtgggttgaaacccacggggtatctcccagtgcactgtggtcccctcaatggaaatcgttctttacaccacgggggtgcacacgtggcgaacaaatatgttacgcaccaaaggggggcctatactgccacaacttttggtgattcgacacagttatgtggcaagtctccgttgaagcgaacacattgtttgtggacccaaacgagagttagagcttagcgggcatgtggaaaccagcccctatagtgttgggcactaccacaatgttgttacacccacgtgtgatctggtgcaggacgtgcacaacacagagcgcaacccaatcactgttggcgacgcagcgtatgggcatcccacacttcttagttaaaacatgttgcgcccaacagccttgttgtgaaacaaacacagtgcgtttaccgatagtaacacaaccaggaaacacctctgtctacttttcatcaacgacagcgcacctgtggggcgaacaactatacattttccccacagtttataaaacacgtcctag

SEQ ID NO: 616940 - DNA, 115 bp, Homo sapiens
tggtccatcctctctgcgagcttctccttctaattctgatccagtcagaaataagattttttgagtaacaaatcaatcagatcagactctgacacaaaaacaaacaaacacacac

SEQ ID NO: 616941 - DNA, 359 bp, Homo sapiens
  misc_feature (338)..(338): n is a, c, g, or t
  misc_feature (340)..(340): n is a, c, g, or t
agaaattgaaaccaaaaattaatagaacctaaaaccataagtttagccaagatcctcaggatatgaggtcaacatgcaaaaatcaattgtacagtatttcctatatactaacagcaagcaatcggaaacatttttatcccatttgtaatagtgtcaaaaataaaatgcctcaggaataaatttgacaaaagacatgcaaaatatgttgaaaactacaaaacatgggctgggtgtggtggctcacacctgtaatcccagcactttgggaggctgaggcaggaggatcgtttgaactcaggagttgtagaccagcctgggcaacatggtgaaaccctgtnancttgcaaacatacaaaaaa

SEQ ID NO: 616942 - DNA, 427 bp, Homo sapiens
cattactatgtacaggaactgatttccaatcgattagtaattaccaatatacacccatacctggagggttcaggacagagaacagggcctctgaggaaagcaaagccatgaaacaatatctatagttatctgggtacataaatagtactagctggagctgactgcatttccttccagagcagctttgaagtgaaaatcatacacaatgtcatgtgtagactaacctgagccgaactgcctttccaggatattcctaaagtgcttttaacgatagtaggtaatacagattacatggtcatttaaaaagttttattggcttaagtgtttcgaataaatcggctttaaaattgaacagtagtataggctctccagctggtgtttagtttcgtttggctttgagtgacatgtagctgatccccaggtatta

SEQ ID NO: 616943 - DNA, 266 bp, Homo sapiens
agaccaaacagtgccgcatgggcgtatgaacagacatatagacctagggaacagggagcccacaaataaattctcacatatgtgggcaactgactttcaacaagtgggccccaacaattcaatatagaaagtgtagtctttgacaaatggggctggaaaaactggatatctacacgcaaaaaaaattttccttataaaaagagattaatcatatgccaaagtcaagggccgatggatcaaagtaataacaacctacctaaagctat

SEQ ID NO: 616944 - DNA, 377 bp, Homo sapiens
gttaccggcagagtctcaagggctctcagggggatattccacaaaaaggtttggggcatgtccggggtttagtcgggtccacttcaattcctcttccctttccccttcttcttccctaccccttcttcttggtctctctcgcttacagaaataagggctccagtaagggacgtacattttcttcccccatactcctcttctcagtagacccactcactcacttccactcatcactcagagtcgggccacagttggtgctcatgtgtcgtgtctcataactcaggtcggcaactctgatgacgggccatagcgagcacggggcccttcggggtaccggggcccggcagagaacagcaaggtctctccagggtcagcgg

SEQ ID NO: 616945 - DNA, 169 bp, Homo sapiens
atataaaccctcaaaacggaagatacattgataaaaatgtagcattgtaagcgaaaaaatattgtacagtacttgcagaatttatctttcaatttaaggttacaatgtgcctaacaaataaatagtacttaaaattatagttctcattattaatttaaaataaccatca

SEQ ID NO: 616946 - DNA, 182 bp, Homo sapiens
agcggtccagtatagcaggaggatattgaggcaggagctctgcccgtgactgtatccacgtactctatcttccattcctcgccctgcccacagaggccaggagctctgcccttgtactgtattccacttactccaccttccattcctcgccctgtgcccacagccgagtcctgcttattcct

SEQ ID NO: 616947 - DNA, 163 bp, Homo sapiens
cccccgggcccttttttttgggggggttttaccccaacttttcccccaaaattccccagtggtaggaaggggggggggccaagggatttttttcttggtccttaagtttccaaaccttttttcttcaagggaaaccctttcccctgttggggcggtttgccca

SEQ ID NO: 616948 - DNA, 197 bp, Homo sapiens
ctgggaaggctgcagtgcagataggatcaaagcaagcagaggaacatggaagggctagactggctaagtcttctggcctccatctttctccattactggatgctacctgccctcgaacatcagactccaagtcttcagcttttggactcttggacctacaccaggtgctctcagaccttcagccacagactaaaggc

SEQ ID NO: 616949 - DNA, 142 bp, Homo sapiens
ccccccccgggggcccccagccccccccctgtccccgggagcgggggaagggggggttggccctttcctggcccggggttgctgccctcctgggggttttttggtcccccccccgggttctggaattacccgttttttttta

SEQ ID NO: 616950 - DNA, 167 bp, Homo sapiens
tgcactgtagatcgctccatctgtgaaggtgacttctataagagtaaattgccttgttgagaaaaaaaaaaagaaaatcttatattcgagtgctatttcttttgggggcaccgaaactttatacaacattttgggggcttgccttgtgattacatttcccctccggg

SEQ ID NO: 616951 - DNA, 324 bp, Homo sapiens
taaccaaccgacatctcacgatgaacccagagcagtgagcattcacttcttcctgatgatagcaccaagccatcttagagggatctggtcccatgacccaagacatctcccactagacccatctcccacccattgcacggtcacatttcaatcatgagatttggaggggacagaacatctaaaccatgttcactgcattcaattcatttggaactccatgcagtcagtattttttttcatggcaaatatatgttacgtagtagtccttttctaagctaccaaagactataatggcaagtaatggttcatatatttgctttgcct

SEQ ID NO: 616952 - DNA, 628 bp, Homo sapiens
aacggggcagccatgtggtacccctaggaaacctacccgctagtcctaagggtagttaagtgtgataggccgggttgacagctgcaaagctaggacacagcctagtagcatctcccaactacaacactgtggtgttcacggccaatgttatcaaaggagtgtagaatttggaagcaggcatcttaaacataggctccgtgtggaatatatgaggctactgagggcatgttcaggttgctgtctacaactatggtgaggaaataatactgcgcaatcgcctataggacactgtctttaaacttgattggtcttcaggtgcccgtgtctgtgactccttcctgccataagggggttgtttagacctgggaggttaccgaaaaggggtgtaggttcgggtagcgcaaaatgcactaggatctacaaaacaccaactagtgctcccaccaaaaacgtgggatccgtgcacgttaacgattactaggactatgcaaaaacctgtggtcgtccttagtctcctggatgagcgcccgcgcgcgcttcgtctgcggcgccggcgcttctcccgccactcctttctactcccgtccctcacgcctccgctcgctcctcggggcgctcttgctgctgt

SEQ ID NO: 616953 - DNA, 630 bp, Homo sapiens
  misc_feature (1)..(1): n is a, c, g, or t
ngaggagttcccgcaacagataactgtctggcccaaaaatgacaaactgtggagtctggggcactctgctccagttccagcagactgttgtccatcctccgtacccaccattcacctattactccaaatatgtatggcacagactcagactacatattactgacctccttatttcagaactgtgcacaaacaatatcctcagtccttcatgaagaccaagaatgggtcaaatggaaagaggcttgtggctattactactaggactatgaaattaaataggaaagcctcacataaatagaaatttcaatagtttgcttttagagggaaaaagaatgatcaaatctagttccatcttctgcacagtttacacagactaaccccaaggcctaccccttctcacatatgttgcatcccatcttcttccccttcttaaatacttcactcctgcaaagagggagtgcaatgaatcctcctttctcctccaatcattactttcttcctgtcttttgagtcatccctatccatacacaagaacgctgtggtatctctcatcttcaaaacaaaacaaagccctctcctttgactccacacccgtctacaggacgtgttccactgcacagcagatcttct

SEQ ID NO: 616954 - DNA, 219 bp, Homo sapiens
  misc_feature (166)..(167): n is a, c, g, or t
  misc_feature (191)..(191): n is a, c, g, or t
agagatccttggggccttaacctgagtgggggtctcgcaattccctaatgagattccaccccaatatcatcaggcactttcccccttatcaactagccctagctatacctctgctgccaagaaaatgagcccaaccagtacaccaggagtggggctccatatcagnnccctaaggtcaagcctgtgtccanctgtgggctcattttcttgtggcagcag

SEQ ID NO: 616955 - DNA, 433 bp, Homo sapiens
ctactgcagctatccaagtcttttgttccctcaaatactcttacctctgagctatgtacatgccgatcacctcctcagaatgtgctgtcctggctcttggctgatggtctttcccagtgaactcatctgggcttctgtatttaccaccacacagctaggttagatgtcctgtctccttatttttcagtacatactgtgtttagccgtgttaaaattcttggcacactgaagtctaattgctgagttaattctgtgtgagccctttagaagcatgttgagagcagtagctaatgttttaaattcatcatacgtgtgcatagatctcaaggcagggcctggcagaatgggagtacttaggaggaaatttttactcagggaaagtgggttttcacgcagtaaaatatgtgctacgggtggggcacggtatctggta

SEQ ID NO: 616956 - DNA, 186 bp, Homo sapiens
aagctccaacaagaaaaacaaaacaaaaacattctcttaaataaccatgagacaattatcataactgtaaaattaaataacatggaaacagtactgctagtctaacctacagacctttttatttgtcttttattttattattattattactatttagagatagagtttcgctcttgattgggagct

SEQ ID NO: 616957 - DNA, 715 bp, Homo sapiens
tggtaaacggggtctggctggtttggcgcaggtcgggtctgggcacttcttgggcctcaagcgattctcccaacctccagcctcctaaataatggccaggtatttatagggcttgagccaccaagccgtgacccctcttctttgggcttattattctccgtggttctccctccacattgaacgcaggcctccagtgaaggagaggaacgttgtcagtttaggtgccgcgccagcgtttctccagtggcgtcaacttcatcacacaacaccagcgagggcccaattttaaatttagagggtgcatgggtgtaatggaaaagacatgtaatacgcaaaagaagggtgctccagtggctggaaatggatttccacagggatgggtctctggtgatcttccccagtacgccaggggacgccctttggtctggcccatctggttggcctgggcacgcaagaagcctggtcccgaacactctgggcattgaatgatgtgcccgattgggactccgtggggggcctttcagaaccggtgtggagttcagactgggtcttaggggcccccatacccagggtgtgctggggagggggcaaacatctactcctttttaaggcgtgaatagacccttctggaagcgtgatatccctgtgggacatattctattcaatggggacagattctcgtctgtgtaccccaggctgggaaggagggtccctt

SEQ ID NO: 616958 - DNA, 268 bp, Homo sapiens
ttggcgcgagcacagtgattacaacctccatatactattctctgattgctttggctaagctctagaattggccatctcacctggcttattgcacccataagttatagtaaatcatcatcaataactcctgcgatgtctctgctgctggaaacagcagatacaaaacccaaagtctatgaaatgtaggttctagcggccgggccaggggaggaggaggacaggccatttgcaaatgagcacgcacatttctgcgatcggtctggtgcat

SEQ ID NO: 616959 - DNA, 174 bp, Homo sapiens
tagaggatccccagtttccagagtagggattcaatctttaaaaaagaagtatggctggcaggcatagtggctcacacctgtaaccccagtactctgggaggctgaggtacatggattgcctgaactcaggagtttgagaccagtctgaccaacgtggggctctaccaaaaatac

SEQ ID NO: 616960 - DNA, 149 bp, Homo sapiens
ttttacagcgaacatcataagtaggacagtgcttctgacaggaatggacggcatacagatggatgaagaacttgtggagagactataattaacattcacttccaacgggcaaagaatggaggtggagaagtagatatggtcaagtgttc

SEQ ID NO: 616961 - DNA, 492 bp, Homo sapiens
ctccgagctcgcgcacatcacgacatttattattcacaaatccgaacccatgatctaccgaaaactcttttaaacagaatccccaaaaagacaattttacctaaagatccgcgtctcccccgccggagatttctatttttccattcttcctcttttataacataacccggtgaagccgccgagaccgaccacgttcgcgcgagccggcatcctgtcactatcctccaaagagatgaacaacgagatgagagggtccttatcccgctgttccgcggacctgcgacactcgtaccacacctctgctccccgaccggacagacacggtcacgccagacgagcagatggatacgaccccagtaatctgcgagccgtaaagaagctaactattaacaaattaccggttagattctacctggtacccatcatgacggcaattggacagtcaccaccagagaacaacaagataaacacaccaaagaagaacaagaagac

SEQ ID NO: 616962 - DNA, 168 bp, Homo sapiens
aaaaaagggaattttttttgggaaaaaaaaaaacctggcggaaaaactgggggcaaagtttggtttctccaaaggtttttttggttttcggggtttttcccccccccccttttaattgttttaaacccctttttttttttaaaaaaaggggggcctttggccccttta

SEQ ID NO: 616963 - DNA, 287 bp, Homo sapiens
ccctcatgcagtgctggcatgcagtgtacaacattgtcatcctgggaggacaagcagtacatcgtcgtgcgggaggctctgatgctcttcaagagcatcttggaacaacagatggctgcgcaccatctctgtgatcctgttgctcaacaagccagatctgctcgctgcgaaagtccttgcttgggaaatctgaagatttgcaggactactttccgagaattttgctctgctaaatgtacgtccatgcaggattggtacgtccctgagccgctggtggaggacccgac

SEQ ID NO: 616964 - DNA, 255 bp, Homo sapiens
aaaaaagatatacttttatagtttcagctaacaagcagatggtcgtctttacttatttctgttttgtattgctgtatgaccgatcagcatgataggaacccaaattagcttgttgtctgcaaagcaatggtgtagccatgggaggaaatcttttgctgtatgtgtgtatattagagagagtgcatgtttatgcacttaaatacacacacatacacacacacacacagagtccaggttctagatcgcgagcggccg

SEQ ID NO: 616965 - DNA, 119 bp, Homo sapiens
accttagattattcagctagtatcatactgaatggggaaaaactgaaagcctttcttctaagatctacaacaagacaagagtgcccactgttattcaactggaagtactggaagaccta

SEQ ID NO: 616966 - DNA, 94 bp, Homo sapiens
ggggatgcaggtgaagctgaggacagctcccaggagggcggcaggcagccaggatggccgggcactgactggcaataaactcctactaaatccc

SEQ ID NO: 616967 - DNA, 357 bp, Homo sapiens
gctacttggcaggctgaggcaggagaattgcttgggcccgggagttttgaggctgcagttaagctgtgattgcaccaaaatactccagccttgggtgacaaagttagattcttagtcaatcaatcagtcagtgaaaaatccctttcattcattcattcattcattcattcattcattcaccacccggtgtttttacaggttcaagagatcacattttggaggcttcaatgggtccctgtgaaatgtaaacctttactcttttggtgtaatcccccaagtgtgtctctagggggcacagcccacggcgactctatatatctctctaaatttctctgcaatcaaactctgtttaaacaa

SEQ ID NO: 616968 - DNA, 113 bp, Homo sapiens
aggagaaagcccatatgatgaatgctattaagaaatatcagaaaggcttctctgataaactggttttccttgagggagatcagaaacctctggcacagcacaagaaggcagga

SEQ ID NO: 616969 - DNA, 989 bp, Homo sapiens
aagtagtcgtgctgagcaggttattctcgctcctcaagtgagattgcatttaagcaaatcactactgtcatcagactcaggatgatttcccctctccattcatatgagtgaagcaatcagtggcactcatacatcatcattctgaacacagcttcaaagcagagcaacccatattcgtagctcgttgcgcacatagctgggttcttgcgggccacactcttgttgcaatcattggcatctccatattaacatctgcataacagccgagagggcataatcacttacaacattgtcctaattcatctcgatcccacaatgcgatgctgggtgagacacccaaggacttacgatagttagagaagctaatgtactgtttggttatgggctcacttcccatgatctccgtggaaaatttcctggggactataaaacacgtacaagccgtataagtaaaaggacagtacgtattgccattgattctctgcgttccttaggattcgcgacggcatgtcatttgccctctataccgtttgaggcaattgttcctttcatctcccttaaagaaggttcacccttaatgtcacttggattcgcggcatagttaaaagctaaagttcggtacttgggcgttatttggacttaggttcccccattggtcagttctccgcttttactctcgtggctttcccctttgtccttttgccctgggtctctggattcttcggcttgggctggaagacgcgatctctaaactaacggtttgaaccttatggtatattaccttaatccttaagggtttccacttctccaaggagggcaaaatgttccaaaaggtttatacagcggtttgtcacaacaacttggtttccatcccttaatggatgccaacgcttgtaatcggggtagtttgacacacattggttccaatccctttgctttaccactttttttaacggattgtaacctttaagtttcttatccgcaaagaa

SEQ ID NO: 616970 - DNA, 299 bp, Homo sapiens
cagcctcgatgtcgctgggatacggcatacgccaccgatgcctggctacattttttgtgatttttttggtgaaatggggtttccccctgttggtccagcgcagtcttccaactcctgtacctcaggtaacccattcggcttgggctccccaagttgtgggattacaggcgtgcaacggcgtgcctgggcaatggtatccatttctaaagtgcccacagctatttggacgcgtgaagggtcggggtcaacggcggggactctaggaggagacccggggctggctcacagacccgggaagg

SEQ ID NO: 616971 - DNA, 135 bp, Homo sapiens
aggctcgggaggcacctgccacccagggcttatctactacttagctgacttatttccaggttcttgcagctggaaacaagggtcttgcagcttacaaccaggaacaggatgctgaaccgcagggtgtgtacaaat

SEQ ID NO: 616972 - DNA, 125 bp, Homo sapiens
  misc_feature (22)..(22): n is a, c, g, or t
  misc_feature (59)..(59): n is a, c, g, or t
  misc_feature (73)..(73): n is a, c, g, or t
cctttcatcatgggtgagggtngatagcggaagctttctatctcgggctttcacatagnaggcctcttgaaangcagcttctaatgacccaataggaaatacaggatggcaatcaccatatcttg

SEQ ID NO: 616973 - DNA, 620 bp, Homo sapiens
tggtctccaagatgaatgctcatctttggagggtgccaggtagaagctagggaggggagtgtcttctctctccatgattcaccttgcagtgagcccaagttagaagggtctggcgggggtagtgccttacacatgcttgattaccacactaccccctggcttgggatgtgagtggaataaattatctctcgttaaggctaaaacacactcattatggcccctttggcctcaacggcggaactgtgaggacgattccctttacaaagggataatccataacctcgcccactaactcctgacctttcacactacggtttcaactatcggataacataactcactgatgcgcttcctcttattaccaaccacatgcgccactctttgatacaccttgtgattgacggtgtgtatatagtctctaacccgtaatcactctttgcatcctcctttcttcaacaggactcctcacacgcgcaagcctcgtaacattccaccccaagtccgttttccacctaaccaaatcccactactagcatacaccagttaagccttaccaaaccccagcgctatacttttcccatcttttaattcacctcaaatccacctaaactcttgaccat

SEQ ID NO: 616974 - DNA, 358 bp, Homo sapiens
tagaaacatgtatcctttggaaaattttgaaagtcacagcatggtctcacattggtcattataaagctgaagcaggctgggccctgtggttcacgcctgtaatcccagcactttgggaggctgacgtgggtggatcacgaggtcagaagttcaagatgagcctggccaaaatggtgaaacccagtctctactgaaaatacaaaaattagccaggcgtggtggcgggtgcctgtaaggccagccactcaggagactgaagcagagaattacttgaacccagaaggtggaggttgcagtgagctgaaatcacaccactgcactctagcctgagcgacagagcaagactccatctcaaaaa

SEQ ID NO: 616975 - DNA, 566 bp, Homo sapiens
ggtgtctccatagatatcgcgttaggtcagacaccagtagaagccggcgtcccggctggtgagctggttgagtgatgacagtgaaggtgcctgttgttctggctcctccagcagggagaggcggccctcgtactgagccttaacccacccctcgctgcacaccagcaggtggcagcgtccattctgttgcccctatcccagagacaccagtacttgatgcttttgctattccttacggtatctaggggcagagcacggccacagagcctcctgccacccccttcaccacagatggggctgcggggaatcgtggactcctcattgacgaagagttgccaggcctggataggcgagcctatcctgcagctgaccatccgaatgggctccacacaggtagcgccctgcatcctcctacctcaggcctgtgatacaccacactgaatgagccatccttgtcctgggggttgagcaggatcctgccctcaaaggctagggccctcttccccagggtgaagagaatatagagcgaaagggtaaccgagctcgaaattacgtatcatggcata

SEQ ID NO: 616976 - DNA, 233 bp, Homo sapiens
ggaggtgaagcaggagaatcacttgagcctaggaggtggaggttgcagtgagccgaggtcgcaccattgtactgtagcctgggcaacaagactgaaactccttcaaaaaaagagaacaaaatgggatccaagtacatgaatagttgaaattaacctagggttggcgtgttactaaaacagaggacacgacacggacacttttataactacttttccccgacgacctgacttgt

SEQ ID NO: 616977 - DNA, 950 bp, Homo sapiens
  misc_feature (639)..(639): n is a, c, g, or t
gcacgatgaggctgttgtcattggtggtgtggctctacttgtgcgtgtctagcgtcgaagcatgaggataggagccaggcttttgggtttcgcaagatcgacttgcgtgaagcaggatatcgcgcggtggcagggatcgaggaccctgagccttggcagtagcaagcatctagcaagtggttggctcgaaggtgcgtgcagtgtacggacggtggtaacgtagtcgtgattgacttgccttccactctcagggaacgagcttttggggtcaattggatgtccttggagattgacatcatactggtcaaaggtgggatccaggacttgtcctcctgtgtacgcaaatagatctacaccaacaacgtaggtgagttcgcattgtctgctccctcttgcaagggccttggttctacctatatgcgaatcgtatcaatccctcgagacgaaatcaaagttgtaccatgtagcccatgagacgccaaggagcacgcggagtgcgggcgccccgattggtgaaccttggctttccataagccaaagtgactactcatgcgtaacacggggaagagataactccctgggccctccagctcgggaacgtgtggaacgatggagcgaatgtttctttccaccgttcantttgtgtccttggaaagcttggggtcacgacccgtttgtgggaggctacactgaagcgccctatacgccttctcaatacgtcggtattctcccgcctcgtgggcctaaataagggtcgagaatcatcgtcgccgaggacacacaggaggagatccagagtcatttggaacccaccgtacccccataggataccggcaaagtgaacagaaagcttggagaattatgggggcggcctcttcccgaagccaagtgcttcgcttgcccttgcgttctcgcgacaggaacaaaatccccaattgtcttccccctac

SEQ ID NO: 616978 - DNA, 330 bp, Homo sapiens
  misc_feature (138)..(138): n is a, c, g, or t
accacaatcaccctactgtgcaatagaacaccagagtttactcctcctttccatctgtagcttcagacccattgaccaatctctccccttcgcccccaccaccccccccccgctgtcaccactctcctcccccccccngcaagaggcttgaatcttgaaggagcacatcagatagaaagagggaaatcaactgggacatggtttgttggaagtggggtggaatctggtttgtttacagtttcagagtttgaggcatcaaaagtgtatgtcattgcccaaaagtatttaacagctttctatgttttaggaattcactagaaataaggcatg

SEQ ID NO: 616979 - DNA, 800 bp, Homo sapiens
  misc_feature (1)..(1): n is a, c, g, or t
ncggtgtattaatataaaacaaacatcttcttttttgttttgatctctctcactctctactgttcgtcccgcagaagagcagaccgcaccccctcctcttcgttgcttctccactcctcacaaaaaaacactcgcgtacggatggagtcatccaccccgcgcctccgcggatctatttatccacgtttgccggcggggcggagagagatatgaatctattttcctgctccgctcgcggtagaattttatttttccgtgtctgcggcgtgtctttttgttgtggcgcgcgcctactctgaatctgctgcttctttttttcgctcctataacactctcgcgtggcgcgtggttggtctccccgcgcggagtgtatgtctccgcgcgcgtgtttttttctgcgtgtggggttttgcgcgcccctctctctctcctccttcccccccgactgaatacaacccacccacgaagaaataaatatattaataatataacacaccacacacacacatctcaatcatcttctgcgtcccccccacctctctctctgtactatcatacacaccccccacctaactactccaccaccccctctctctttctctctccccccctctctctttttttttatcccccccccccacatactcccccccccccatctatctctccaaaaaaattttttcccaccacatcattttttgagatgagagaatgttttaaaaaacaaaaaataaaaataatctcctctctttttttttttttcttgtgcccccccctttcggtccttttttttcctccca

SEQ ID NO: 616980 - DNA, 316 bp, Homo sapiens
aggggttaaaaaaaaggccttttaaaaagggtttttcctggaccaaccttttttttttttaaaaaaaaaaaggcggccctgaaaaaaaagggaaacctaccttttggggggttggggcttttttcccccccctccgggggaaccctttttaaaccgggggaactaaatctagggggtcccgggggtttttggcttttttttttttccccgggaaagaaaaaattaagggttgtcgggaaaatccctgtattttgggaaataaaaatcggggggaaagggtggttctttgttccccaagtttttgggggccttttcc

SEQ ID NO: 616981 - DNA, 565 bp, Homo sapiens
  misc_feature (441)..(441): n is a, c, g, or t
  misc_feature (475)..(475): n is a, c, g, or t
  misc_feature (479)..(480): n is a, c, g, or t
  misc_feature (483)..(483): n is a, c, g, or t
  misc_feature (485)..(485): n is a, c, g, or t
  misc_feature (488)..(488): n is a, c, g, or t
  misc_feature (490)..(491): n is a, c, g, or t
  misc_feature (495)..(495): n is a, c, g, or t
  misc_feature (511)..(511): n is a, c, g, or t
  misc_feature (565)..(565): n is a, c, g, or t
tggtctataaatacacgtgttgggtgagtgaggggcaacaaaaggcaaaaagatggcgctgtacacagctggtataggcttggagggtggaacgccaaaaaagacagacacacagacagctccgcccagcagggcaggccgggcagcattcggggggcttgttaacactgggtggggtggggcagaagagccagacaggaggctccggcccggggcgtggaggggccagaggcaaccccgaaggcctccaaggtctccagaggctcctgtgggtgtggcatctcaggtgggtggccgccgtgggctctcagcttcacattcatttcaggggccttggcggggcaaacctcgggcagcacaaaggcgggcgcgggtgcaccgtcggagagttgtgtagatacttcagctggcattctggcgcccacctggctggctggtgtntcagcgggttggcacccgggctcctggagaagtncggnngcncnggngnncctnggctggacacagcatngaagccagatctgggccgctggggagaagggggggatggtgcagtaggcatagn

SEQ ID NO: 616982 - DNA, 451 bp, Homo sapiens
accgtgtactcttcaacttccgtacgatgtgccgcatgccagggatcatattgcgccagattgccattaaagacgttggcgaaaacgcgctgatacgctggaagcagccagcgttccagtgccccggagtcggtatgcgctccaagacctttggaggtcgttccgggcggacggcggcggatacggtcagggtagatgacgctcacatccgggttaaaccattgctttccatcactttcaaatgtccacagacgattgagaaacgactgccattcgccatttcttcactctggcgggcctgcatttgcgcctgcgaccagtagatggggtaaatctcgggacgtgaagcgctgagcgtcccgaagaaattatcgccggggcctttgtagacctcgtcaaagcggttgcggtccagatagtccagcatcgactgatcccagcctagcgcttg

SEQ ID NO: 616983 - DNA, 167 bp, Homo sapiens
tgaggatccccgaggtgccttagacagcagtggcatcaacttgtccaggctttgggggtgatcagcttgaaattcagctaaccgagcagctacggtccctcatctcctgcttgatgtgataaagttcactgagggcgaaccaaaagacctcaatgtgctctataggc

SEQ ID NO: 616984 - DNA, 230 bp, Homo sapiens
ttagccctgagagttcccgaatcgcgacaggacatgagcagggcatgtaaagcggaaaggaacacaagaacccgacgtagcccgacagggccgactcccgagaggacacagcagggaaataaagcagaaaggaacagaagagaagagaaaagatataaagtgcctcaactaaacaagcaagtgggacaatgagggcagagcagcacaggtccctgtcgggctattcgggg

SEQ ID NO: 616985 - DNA, 1412 bp, Homo sapiens
  misc_feature (1412)..(1412): n is a, c, g, or t
gataacactgccgattcttaatcaagactttttttcctgactggggaacgggacctttcactctttcttttacgacgacggggacaacgtgtgacgctcttaccctatattcctacactgtgctacttctttgacacgcaaacgacacggccactgcacaccacctttggacaccactgccaaccctgtgccacacgggaccaccttgacgttacacacgtgacacgtgtcgtcctacaaaccatgggacttaccgacacaccctgtggctctacctcactctaccaacgggcacctgggacccactccaacgacaccctaccatgacctccagtctactatactggcaagacctaccatgccacacccatggggctacttgacttgtctgccccctataaaccacataggctgttccttaaaccacaacactactcctgtcgccccttgtgactactgtccttgctgacgctttggcacctgggcccatcttctcccaacagacggccttgtacgacacacggcgcacgacagtggttcaacggacaggacccttcttgggctacactgaccgtgtcgccccgacccccgactgttgtactctgggggcactgaacggcacacgcaccctcgttacggagggaagccgtaccgtactgggacactggtacccatttgacaggcacaacttcacgaccttggacacacgttggtggcttcctccccaactacccacccggtatacctccttctttcacttactccccttcaatacggtgcccttgtatcccgctttggcccctagtttgacccccgtgccacttcggctctgtggcccgactgttaccacgcgtcgctcgttgcgttgttacgccttccagcttctcctgtgttaccccttttttcccctgtttcccacagggtttggcgtgacatatgtccgtcgctgttggtgtttttcggcgcgcatcctatcctttatgttcaccgtcttgtgtcgacccctgtgttgggtatcggactcacttaccctttcagccgggacacacctttaccacaatctgtggtcggcccgtcaatgccgttattagggcaccatccttgtcgccggccacccacaatatcccttgcaattaactatttttggcgcgccagttcacatatatatctagccgggacgaatagcactaacaaccatcactctcatattggggtcgcccctatgacatccgccgactctcgacactgccatagatttgtcgtgaacgaacacctcacgacagtctttcctcacctttgagccactttgggatcattccaaccggtaatcacaagtactactacacagtcttggacactcatctaatcgcatcggatgtcctagtccaacgccacactcgtgtccatccagn

SEQ ID NO: 616986 - DNA, 1131 bp, Homo sapiens
agcggggtgtaccgttagggctgggagccggctgggcgcgcggggtaatgacgggtgcctctcgccgtgcgactgacgcgggggcctcgtcctgctaggccgtgcgccggggcagtgagccggtccgtgcccagaccgctcgacgcgaggggcgcccggtggcagctgggctgagccctcgatgcctcccgatttgacggaggctcgcgggtaagtcgcacgtccatgctcgagccccgcatcactctcttggtctgcccagtggtcttgcgcgaccaagaccgcggagactagacaaggaagaggtggctgccacgagtccccgtaagttgcgcctcgcaatgaggcttccaattctagaggtcgaggaaacttttggggcccagactcaaggccctttgcttcagaactcgcgtgtggctgggaatatgacggcggggcaatctgggctggagggggagccgcggaaggtctgcttcagcgttggcccctttgcgtcggcccgggtggagagagacacttggtggcgagatcctttccgcggactgggggtgaattccttggattcttattctgggtaggccataagccattggggactttctgtgacgttgtccagttcgacacaccactggtggttggcggtggcgcttttttccctatgttggcgaccgggggtaacatgtggcaggccgtgaccactagattggccccctcgccctcattgttgttggcggccatcccgtagtcggtaaaacgcgaaacggaccggtttggaatgcggctagcgattgcgaacacacgcttagacctggtgtgggaatggggggatgcagatggggccggtcctaggcaggtaaatactaggtctaaagccacttgagattaactactattgtgctcgggggaatacattttgggtccccattcaaaactttttacgcatggaattcaacaatgttacggcacaattggaacggtcctcggtgagatggttttgtacggtttttccacacttggttgacaattcggtggccaatatccgggttcattgagctaattgactagcatctcggctatttatccttctggttgtgaagagagtgtgcgtctccacccttcctggcgccc

SEQ ID NO: 616987 - DNA, 901 bp, Homo sapiens
tggggccaccatgttctaaatttgttgcccccatccctactactggggcagaaccttgttcctcaattttttgggtggcttcttcctcaactgtgagcgtcgccccccctcagcagagatgtgttgtgaacatgtcttagcagtaatttgtcccccccttctttgttgttccgccccctcgcgacatccttcccccgccgctcgtgcttgttctggcacagaacggggggtcgtcaccaaacccccccccgtttggggtgctctccccttcccccctctccgcagtgatatagtctccgcttctcccccccctttgctggaacgccacttcttagagacgcccctgcgggggaatgattttttgtcccgttttttttctcctcttggaggcgttgaacaacgaatgttgttcgcccccggcgccttctttgggcgggccccccagccattttttatcccgcttggccaccacccccctgtgtaacaagccccccttctcccccacttccagtgctgccgggtggttgttgtttctctctgttctggccgcacaacacatttttcgagcatgtgctctcaccaaatgatggaggctgtccctgccctctgtgtattcctactctcctctctgccatatatatcccctctatctcccaagatggttattccacaaccaacccagagcagaaataattgtttccgcccactgaaacccccattcatctttttttgcttccttgcccccagaactactctcttttttataccttgattcggggggaaacccccagtccccttttccccctttggccaccaataccccccttttttttttcccccccttcttttttttttcccccctttttccttattgtaaccccaaaaacctaatgggccctta

SEQ ID NO: 616988 - DNA, 417 bp, Homo sapiens
aatttttgtatttttaatagagatggggtttcaccatgttgcccagggtggtctcaaattcctgaccttgtgatccacccgcctcagccttccaaagtgctgggattacaggtgtgagccactgcgcccggcctaatttttgtatttttagtagagatggggtctatgtagcccaggctggtctcatgctcctgacctcaagtgatccacctgccttggcctcccacagtgctgggattacaggcatgagccactgcacctggcccaatgcctctttcagcgatatgaagttaaaaccaggtactgtgattgctcccctggttttggttcttgtgacagtgcttttctctgtgcagattataatgtagtgttccagtggtgttggtgtgaggggacaaatggtgtaggtgtctattc

SEQ ID NO: 616989 - DNA, 236 bp, Homo sapiens
tgcatatggtaaagccatttaccaacgatagttgtaggtaaagaagggcagatttattagagaaattgtgaaaatatgttgcagtgggcagctccgacagagaaggggctacctgcaaagaggcaagggctggaggaaagttttatagaggtcctgctgtaagggtgctacgatgtggaactgaggtcattgatgccacgcgggattgtattgtagatatagctagtctcataaca

SEQ ID NO: 616990 - DNA, 241 bp, Homo sapiens
ccttggggggcccccttttcccctaaaaaggggggggggggggggcccccccccccttttccaaaaaaaaaagggaaccccccccctgtgggggttgaaagcccaaaatttttttttttttttgggggggccattttaaaacccccccccaggtttttgttttttgggggcgccccccttgttaaaaccccccccccccctttttttttcccccaccaaaaaaaaggggggggttttttta

SEQ ID NO: 616991 - DNA, 220 bp, Homo sapiens
cgggctgggaggagagagggcgaggagaccgggggaggagggagggggaaggagggggagagacaggaagagaagggagaagggatcagccacgaaccgacggggaagaggacgagaccgaagggagaaaggggcaagagggaacggaagaccagaggcgacggggagcaagagcgcgacaaaggaggcgagggaagaggcaaggaaaagccgagcgagc

SEQ ID NO: 616992 - DNA, 824 bp, Homo sapiens
cgccccgcccgttgttaccggtattgtaagaacaagccgtacccaaagtctcgcttctggcgaggtgtacctgatgccaagattcgcattttgtgacctggtggcggaaaaaggcagagaagagtggatgacgtctccgcttggtggccacatggtgtcgaagatgagatatgatcagctgtcctctgaagccctggaggctgcccgaattgtgtgccaataagtagccatggtagaaaatttgtggcgagaagcatggcttccatatccgggtgcggctccaccaccttccacgtcatccgcatcaacaagatgttgtacctgtgctggggctgagaggctccaaacaggcatgcgagagctgccttggaaaagccccaggcactgtggcagggttcacattggcccaagttatcatgtccatccgagccaagctgcagaacaaggagcatgtgatttgatggacctgcgcagggccaagttcaagtatcctgggcgcagaagatccagatctcaaaagaagtggggcttcaccaagttcaatgcatgatgaagtcgaagacatggtggttgaaaaagcggctcatccccaggatggctgtgcgggtccacgtacagtccccaatcgtggcctcttggaaccaagtgacgtgccctgcaatcatgacggctttccaatgttgctgacaccctcttagtatgcaccaataaattctatttcctgtccaaacaaacaacacaacgtgggacggccaaaaaaatccccacagggacaaatacagcgtaccagttcttgtacacagggaccaaaagagaacaacaag

SEQ ID NO: 616993 - DNA, 1044 bp, Homo sapiens
cctgtaatcctagcacttggaatatcaaggtaggaagatcgcttgagcccaggagagccaagatcacacaactgtactccagcctggatgacagagtgagacctgggtccccaaaaaaaaaaaaaaaaaaaaacaaaaaaaaacatcttggtccggccgcgccctgcggcccctcacaagaaagccctcttctaagaacccccttccgtgggggcgccgcgcgggcccacggtagaggaagagggaaaacgggcccagagagctggttcccagaggagaaattccgggccagagaacagagcggcctgggattctcacacccattaaaaaacgccccggggggaaacaggacggcttttggaacacaccacccaaaagaggggagagatctcgggaggcgggccatcaagggggggctaactacccaagcggcgaggctccacaaggcgagcggcctcggaatatctcaaaatattacaccgccccagggccggggagacacaccacagcagtgacgacagcaagaagtagaacaagaacaacaagcgactaacagcagggaagacaccacacacagcgcaacgcaacaccacacaaaacagtaggctcgacgcacacacaacaacgaagtagcaactgacaagaacacaagtgtccgcccgcaagccagcaacacagagagacaaagaacgaacgaaacaaggagagcaccaactacagcgcaacgagcaagccggcagacacgcaacgcccggaccgaggccaacacacaacagcacaagacagagagacacacgcgagacaagcgaagggacacacagcgaagacagcacgcagtgaacaatgagtacaaagacgaagcaccactgaggcacaagacagcgagagccacaacaacatcgagccccaccgcgcacgaagaaacaccaaacaccagcccgagcacgccacacaggaacacaacgaccgcgacgcgaagcaggaactggactctaacgcagccgcgaccgcacagagacgccaagccgtccaactgacgaccca

SEQ ID NO: 616994 - DNA, 173 bp, Homo sapiens
tagcagtatccgaggggctctggagaacctgttctcgacgttagtaagcactttcctgtgtaaattgttgtccctgaatcatcatactcaggacttgctgatccacatctgctggaaggtggagagagaggccaggatagagcccccgatccagactgagtacttccgctctg

SEQ ID NO: 616995 - DNA, 111 bp, Homo sapiens
aatcagctcgaccatataaagtcaggagagaatgcacagctgtacacccaatctgatgccccctcaatactttcatcatgtttccatcatctttcaggtcccatactctga

SEQ ID NO: 616996 - DNA, 273 bp, Homo sapiens
tgattctagaggatctccggccgtggtggcgcttggtgtggctcatggggtgtgctcagttgtgtggctcattggggggctgagtggtggggcctatcgcgtggatcttagggtggcacctggtcgtggctcgttgcgggactctagagggtggctctttgcgactcttggcggggctctttgtgtggctcttggggtggctctttgtgtggcgcattgggtggcccattgggtgggctccttgggtggcatctttgtgtgtcgcatttgcga

SEQ ID NO: 616997 - DNA, 290 bp, Homo sapiens
cggtccgaatatcccaacactaccatcacattttcatagaattagaaaaaaatttaaaagttatataaaaccaaaaaagaaatcgcagagccaagacaatcctaagcaaaaaaaaaacaaaaaaaacccaagggggggggcttcacactcccggcttccaccttttcctacaaagccacagtacccaaaacggttgggtcggggtccaaaaccgggcacatagacaaggggaacagaatttgtggaactcagaaatacccccacacattccatacccattgtgattcttc

SEQ ID NO: 616998 - DNA, 1313 bp, Homo sapiens
cgcgcagaaggggtctggtgacgagtcccgcgtactctccttgaatccactcgccagaccgaccgaccctctgccgcgcaccctgcacacccgcccctctacctgtgccaggaacttgctacgtaccagcaccatgcactaccaatatccagacacatgaccccggagacagaagaaggagcatgacatgacatcgcacaccgcatcgtggcacctggacaagggcatccatggctgcagatgagtccactgggagcatagccaagacggctgcagtccatatggcaccagaagaaacaccgaggagaaccaggcagacaaactaccgacaggcagctagcatgacagcatagacgaccagacgtgaaccccatagcatagggggtagtcaaccatactatccaatgaggacaactactacacaaaaggcggatagaatgggcggatcccatgtcccaccaagggttaatcaagagtccaagggacggaagatagaaggagacagtcaaggatagaacaaaggagacagatgggtcacccaacatagaaagggaaacaaaagtggacgagaacgtaaccaaccacaaaggggataggaaatgaggcgaggcacatgaaagcgccaagaagaccacaagaaacaaaagaacaaggcaacgaggaggccatggaacaatacggcacagaagaaagggcaagataaagagaaatgacatggaacagaacacaggcgcggaaagcaggaaccacacacatacaagagacacagaacgaacaaagagcaatgggacagaaacaggcccaaagaagagaacagagggcagcaccaggacgaaaagcacccagagaaaagcgtggggcagaaggacaaagaaaaacaggaagcaagatagggaagacaacaaaagacagaagaggaaagcgcaagacagaaagccaaccatccagaaaatggaggaggacagcagatggcacagaacgacgagaaccgggacgatcgaccagagaagatacggaggaccgccagaaagcacaagagggatagacacagggacacatggcacggagcccaaaacgaagagggacaaaaagaggaaagcgaccccaaacgaaagacatacgaacagcaagaagacggcgacaacccaatagcgcggagaaagggaaagaaaagagaagaggagacgaaaccgcaaagtggaccagaagcaaaagatagcaaccaacaacaaaaagagataaaaaccaaacaaaaaaaaaaggaagaaaaaggagaccaagaagacgagccagagagaagcaagaacacagga

SEQ ID NO: 616999 - DNA, 227 bp, Homo sapiens
  misc_feature (114)..(114): n is a, c, g, or t
acaatagatgtactattcaacgaggagtgtatataagataatcctggggaaggatcgctggtcaagggtgtcataatttacagaattttatagaacttcccaaggtgaatacanttcatttttgaataggtatcatgtgcacacggtacattaaaaaaatgtaaacagaagtcaaagtattggttcataatttactttatatgtctctcatagatcttcctgaggtg

SEQ ID NO: 617000 - DNA, 359 bp, Homo sapiens
ccagatgcgagacgtcgaccaagcatcaatcacgctccgtgagtgtagtctgtcgtcggatggagcacggggtccggcccttgtgagtgtcactcggcaagtttattctcgggtgttgtcaggactcctccgtgccagagtcatcctcatcgtccccgaagcagctagtcggcctcctcctccacctcgccgtcctcgtacgtactcgtcgtacaagaggtctgagccctcgtcgggcgccggcgccttggtcttcacgcagtactcggtcagcgtgttgagcacattcacgccgtcccgctccgcgttcaccttggtccccaggacctgcttccggattatgtctgtgtattccctaa

SEQ ID NO: 617001 - DNA, 668 bp, Homo sapiens
  misc_feature (248)..(248): n is a, c, g, or t
  misc_feature (260)..(260): n is a, c, g, or t
  misc_feature (270)..(270): n is a, c, g, or t
  misc_feature (668)..(668): n is a, c, g, or t
gaaatttactagaaactcagtattgggcggaaatccgccgtccaatccgcgtgggcttattatactatacatttgaagcacgcgatgatctcaacgaacggtccgcgggctggtgttggggcgatgaggctgtgcgtgcagtgcgctgctacgggaagacggatacggccgaaagctcttcagcaacgggcaggagatgctttccagcccaccatgagctgcctgtggtggatgctgtcagtctcgcnttgatcaggaantctacccacngtggagaaggtggaattcttgtccagtgatggggaacggggtaggaggtggggcgtcagccctgaccagtggcattgcctcttcccctgactatgaattcaacgtgtggacccgaccagactgtgctgaaacggaatttgagaatgggaacaggtcatggttctacttcagcgtccggggaggaatgccaggaaaactcatcaagatcaacattatgaacatgaacaagcagagcaagctgtattcccaggcattggccccctttgtgcgcacactgccacccggcacgctgggaacgcattcgaaccggccactttgaatgacagagacgcagtttgtgttatcctttgtcatcgttcgtggagggccgtggggcacacttcttcgcttctgtaccn

SEQ ID NO: 617002 - DNA, 688 bp, Homo sapiens
aacagtgtttaaacaagaacattagggggttatctacaccctctttgaaccaaaaggacaaaagggtcccacttttgggcccacctaaaaattcctgacaagagcaaatgtttgtggattgtggtgccccaaaaaaggggccaaaacccatttttaaaaatgttatgattcctgcatttgttcataagttcagagtttaattcccttaaaccaatgcctatcgtggtcagttttctcatggcctttttaaccgaacattaagcagccacttgtttacagcacacctagtacctattaattcttgctcttgcatggttcgaaccccttctctgtagccacccgtcctttgccttatataacacacattttgccagtaagttggtaaagccagtgctgctctctgtgtgtgacccagcgaaattgaccattccatgcagtcaggggctctctcaagtatttgtccagcctacggtaggcttttcgtgtctttaacatcaagtgtgtgctatgatagaaccctgatttatacatcttattaccagtgtctctctgtatcgagctgtgaattgtccatttaacgttggcatgtctgtgtaataatcagtcgtaagtagatgatctctagctctggaacattatttctatagcttagaactgtgattattaataaaatgaaagcgtttaaaat

SEQ ID NO: 617003 - DNA, 354 bp, Homo sapiens
agcggtattacacgagctcacgagaatgacgatcacacagggagagaggggaggcacctgagatatgagctctaggccttttagcatggaggagtgcccttggccacatatatagtccaatctatatagaaaggtgatattgtggacatttagggaaaggtgaccgttcaaacaggaatggcccttggcattgttggcaacatgcgagctgagggcaagagttttgtcccgagaattaacgcgcgtattgagcacattcagcgctctatgagcccagataggctcccgaaacgtgagaagggtaaggttcagcctaaggttgaagccaaagcgaaggtgcctgtgtttctgcgc

SEQ ID NO: 617004 - DNA, 522 bp, Homo sapiens
cccgctgactcgtgataagattatgctgctttaacaattaatggagagaaatgggataatgtctctggaggcagagattctatgcatctctttatacaaatgtagaatgtctctgggaaatggctgacaaatatgtcttgactcgcctcagtgatataagagatgcatttagttatggggttatagtgaaataaatatatgggttgacaaaactcaatgatgtaacaaaaagcccagaatttgaaaaacaggcataggaagaggaatgttttacaatgtccttcctgtgacatgggtaaaaacacctgccatcctcagccatcatcgagttttgttgaaatgaaagccaaaataaggggcaagagattatcatccttagtggaagagaagtagcccgttactcaacatcatatgtcttaataacttgagacgactctttcaaaatagtgtccactactggcatatcttacccaaacaagcaaagtcagctacagtcaacaccaagtggagtgtactctcaga

SEQ ID NO: 617005 - DNA, 424 bp, Homo sapiens
cgatcggaagcccccggtgactaccttttggaacaaagccaatcgacgttgacgctgattgtagtggtcaactaaccccggacacagttttgagtttttcctcaagctttggccggagccagcccatcgttgaactgatggggtcttatccagttgtaatgatccatcaggtactggctaatgtctcgctgagcttgctgtccggtcaggtagcccgtgaccggtatccactctgttttcaagctgcgaaacacccgctccatcggcgcattatcccagcagttgcctcggcggctcatgctctggcgcatgcggtagcgccacaatcgcgtggtctggtcggaaggcatgttcatcggaacgcagcactttcaacagcatgaccgttacctggaaaacctcatcgacgcgcgcagccgcccgt

SEQ ID NO: 617006 - DNA, 279 bp, Homo sapiens
gtggtcgaagggctgaggcgcctgtcggactaccccgaagtacatgtggtttctcgctgtactgcgaggggacgcgcttcacggagaccaagcaccgctgttaggcatggagggtgggcggtgcttgcgtttttaacaagggtggggggctttttctcccccttgttccccgtccaaagtggtttaaccagccctttggcttgcctgcgtgggaccaagagggtgcgttccaacccgaccccggccgaggtccgagagggttgccccttccccctgtgg

SEQ ID NO: 617007 - DNA, 87 bp, Homo sapiens
acatctgtgtacttctgtgccagcagccccgggaatctaccaaaaaacattcagtacgtcggcgccgggacccggctcacagtgctc

SEQ ID NO: 617008 - DNA, 430 bp, Homo sapiens
tcattcagtcaagaagtctgatctacttatttatattaccaggacatcaggacaggtgtcaattccatgtagttgtgtgatttgagtgaatttcttatcttgagtctaatggatgtgctgtggtctgagagactgttgttatgacttcagttcctttgcatttgctgaggagtgttttctgattatgtgatcaattttagaggactctaactcattctatgaggccagcatcatcctgataccaaaacctggaagagatacaacaaaaaaagaaaacttcaggccaatatccttgatgaacattgatgtgaatacccttaataaaatactggcaaaccaaatccagcagcacatcaaaaagcttatccaccatgatagagttggcttcatccctgggatgcaagtttggttcagcatatgccaatcaata

SEQ ID NO: 617009 - DNA, 432 bp, Homo sapiens
ccaatgtattatacctttaagtcacacataatgtcactgctatctggataaagttataagttcatatatttgaaataagatcctggaagacgatattctaaatggtgtcaaactgcagagacaagaggccttcagtatattcacatctcataggtaaatatgtacattcggatgatgatttctcttgataacattaacattaatctaatttaatcagacatactgtaatttaaaaattaatgtgagcgttagttttaacgttcacagaaaacttaataattcacattctcaggcattaaggactcaccataacattgtcagtcctaatgacattttgtcaaagatggcaagtttgttacctcacttgagtggggtactcctttacccccaattctaagacaatataatgtgtatactacaaccgtcaataaa

SEQ ID NO: 617010 - DNA, 807 bp, Homo sapiens
  misc_feature (37)..(37): n is a, c, g, or t
atcgtgctatccagcactgtagcccccagtatgaacntgaccgtcatgggccagagcgagcgtgctctcgagatcaaagcacgttgcctgactgcgaccatagcgcgtacaaagactctcgttccttcccctaatcctgcaaggtgttcattagccctggctgtgtgctcgccatgtgcgcatgcctaacattgagctcttgcggctagttgctcttgtgtggcctgtgatctggccccgatgctgtaacgggttggggttgggcaactgatggttcccaaggacactggaggcctagaacctgatcttgcacgggttcgagtgggcctgccctagctgtaccgtttgcatcactgaggcagctgctgtgctctgttccactatgtgcgcgacctcggctggcccagcctcccagcttgcgtggtggattcccgagatgctggctatttgcctgcaaccccttcagcagtggggatgctttgctggcctctgcccagagtcaagtctggtactgtattcactgtaccttctgcaactcgagccctggctgggtgtgtgtcatgtgcaaccggactagtagccccattccagcacaacatgccccccaggacctatgccagctctttggcacaagggaccacccaagcctgggcccacaatgaaagccttaagtgacccaactgaccagttcctgtggagatccttgagaacgaagcgaccaaaagaaagactcgggacagaaggtctccagactagtgacacatgactcagcgaaggggaaacagcaaatggctgtacaaagcagac

SEQ ID NO: 617011 - DNA, 147 bp, Homo sapiens
gacgatcccccggaacaacttacgctacttgaaaataatgtataatttgtatttagttagttgtagtcatatttgttatataacaatagggtcatctagatttaatgataattgtactagggtttttcagtatatttgagcagtcat

SEQ ID NO: 617012 - DNA, 142 bp, Homo sapiens
taaccatccgatgatttacaaagcattaaagcttcagagaagtacacaaggctacagtctcatctgtacaaaactacagatttttttttgttgttttttggagatggcgtctggctctgtaacccaggcggtgagatgtccg

SEQ ID NO: 617013 - DNA, 339 bp, Homo sapiens
accccaagcagtcagcaaccatcaacactgaggcaagaccctccaccacaaaaaattatgactcattgaaggctcagatgatcattaacattttttaataatacagtgttttttaattaagatgtattttttagacataatgctattgcatacttagactacagtatagtgtaaacattttattaatatatgcactgggaaacccaaaaaatttgtgtgacttgctttaactgcaatatttgcttaattgcaagtggtcagaacacaacccacaatatatccaaggtatacctgtagcatagtatatcctcttatatactatattattaaaaattcagc

SEQ ID NO: 617014 - DNA, 222 bp, Homo sapiens
gatgactatggctcttaaggttctgagaaatcggacggagagctcaaacttccaattcctgcgtcttccatgccacagcagatcggcattcctaccagatctttaactcaggttgttcattctgcgagaaggcggatcatagtgagtcctgtgccagagagccgattacgacaatcaaatgttttccgcagtgatataacagatgcagctgctgccaaatcc

SEQ ID NO: 617015 - DNA, 818 bp, Homo sapiens
cgagctggtgtggccgtgcctggtgcggcagtgcctggggcgttggcctggcaggaagattgcgaacgttgggctgcagttccaggcgagcgcgggggactctggacccacagagcctggcccctgctgctgctcgggcagctgcaccacctgcacctgtgtgccctggagccacgtcctgcgggaagctgcagccccgggtcaccgaggagctctggcaggctgccctgagcacggctcaaccccaaccccgacggacagctgtcccctctaccttgaactacgccaccgtggcctgccctagcccttgcaagtgggtgatggccgggcacaaacaggccacctctggccgcccacttcatcactgcggcttggttgcgtgaccgtgccttgccgccctggagcgcatcgctgcattgtgatggtctgcgagcagccagaggtcttatgcttccgcctgttgccctggcccggtgcgcttcccgcgtgttcacccaccggtcaggtgcctctcggcggcatatggaggaagaagacggtcaccagtggaggtagaacgcttggtgggacaagacaacggggccggtggagggtgtccacgtagcaggtgcgttaggcgaatgccacagacgtgcgtgcgggtagcagggccagcatcgttggacagcagccgttggagatgagagtgagagagcggaagaaacgtatctacgaggaaggattaaggaggagattgggaaaaggagcttggggggatcagtcgcaggggattcatcgcgggaatgagggaagtgaggaggagaaggaataaggaggta

SEQ ID NO: 617016 - DNA, 586 bp, Homo sapiens
  misc_feature (586)..(586): n is a, c, g, or t
atggtacacctgaatgttgttgcagtaccagcaattgatgaggaacgagtatgcagcacacaatgaatagctctgcagtactggacccgtgatggctcgtgtctagtgggagaccacctaattacagtaccgggaacctctgaggggcattgatgcaagtcgacagtgggcgacatgtccacgagcatgcacccggcaataccacgtctctattctgaaacaacacccttgagtacaggcacaactccccacacacacaggtaagacccatctctgcccacagcatacacacccatggccccctacctgtcatcacagtaggtgaacttcatgtccatgctgtggcggctcaggaaggtcttgctatccagggggatgtccatgtgggatgggtgctggattggttcacacatgatgatgagtgcaggacagcaggggctccttgtagccacacagactattgtgaggagggcagttgttgtagactttcacctggcccgtgcagtgcaagacctgagacaggcgtggaagggtcagacatggagccgagagtgctgggggtgggggtagggccttaggcatcccn

SEQ ID NO: 617017 - DNA, 126 bp, Homo sapiens
agttagttttataaccctgaatgcccccccccttcccctaagcacacaggggttaaaactgtgtgtccctcccagtggctgtggcagtgacagtgacacccccccccccagtaaaaaggaggctta

SEQ ID NO: 617018 - DNA, 444 bp, Homo sapiens
  misc_feature (8)..(8): n is a, c, g, or t
  misc_feature (20)..(20): n is a, c, g, or t
  misc_feature (58)..(58): n is a, c, g, or t
  misc_feature (231)..(231): n is a, c, g, or t
tgtattancatttttgggcnccctccaagtagttacctttaaaagctcctaaaataanatgtgtcctcaaccctgtcaacctttagctctcccactgtataaaaagtacacccattcaccctgtccctcctgcctttactttgctggtatgtaaccctcattatgtttataatatcagggtttgtgggcaggcttggtggcgtacacctataatcccaacactttgtgagnccaaggcaggagaatcgcttgagccccaggagtttgagaccagtcagggcaacgtaatgagaccccatctctacaaaatataaaattagttgactgtagtcccagctacttgggaggctaaggtgggaggatcacctgagcccaggaggtcaaggttgcagtaagccgtgatcatgccactgcactcaagcctgggtgatagagcaagaccct

SEQ ID NO: 617019 - DNA, 110 bp, Homo sapiens
cctggatatagtgaggagttagagcgcacaggtgtgtgtgtatgcgttgacgttttgagttagtgtcatatatactgcagcttatagtatgacatcggtccccaagtggt

SEQ ID NO: 617020 - DNA, 344 bp, Homo sapiens
  misc_feature (81)..(81): n is a, c, g, or t
ttgaacttctgacctcgtgatccacctgcctcggcctcccaaagtgctgggcagattcatgtgtttctcctgcctcagctnccttgtgtagccgggattacaggaatgcaccaccacacccagctaattttgtatttttaatagagacagggtctctccatgttggtcaggctggtcttgaactcctgaccttgggtgatctgcccacctcagcctcccaaagtgccgggtttacaggcgtgagccactgcacctgccccccttttttttttaatttactttttatttcaaaataattttatacttacaaaaaaatgtggcaaaaatagtatgcagagctctcc

SEQ ID NO: 617021 - DNA, 990 bp, Homo sapiens
gcgagttcccgcgtgatctgtgtctaggttcgtgagctctttggacagaacaaatgctgtgaccctctctcgaggcttcgatcgacctgcgcagctgctctccgaatgtgatccttcactggatactatcttctcggctcatctcctgcttttgataatccttggttatgcagctcatttcttgctcggctatagggctactccttgcatttgtcccaattcaagtctatggagctgctcccatgatacgacaagagatattaatttagcactcgaacgatgatctagcagacagtacagacagatcatgtgatcagagtgttgtacctgtatgtgaccttacactatcatggcgtagcgctcatctgcctttggacattcatagtttgcgactccgcagactgactgttagggctcttggaaaggtccgcttggacgcgcagcatatgcgttctctgcgaaatttggaccgagagagaaaggactgcggaagcgggctgacgacgccggtccttccttgaaagagacttgcaaaagacctcatggcacgttagcgtccgagactggcggcagagctcattccacagagtacaattccaaagacacggcgcaacgcctaggaacggaattggattactagagggggtaaaaataactcctcaggaccgactcaagataggaaaccgcttcggacccaggttagggccacttgtaaggaaaaacaaaaggcttgaacacccaggggacacccctatgttagagaaattgcgtgtggcactgtccctcccttgtgcgttttgcatagccacccggtgagcgaggaacacaccagacaaatcctttctagatggaacctctctcgtgggaaggaacacttgcaactgttccacttacgtaatgcaagtgtcaaagttgaaaagactttcgagtccaaagaacaaatcacttgagagcttggatggcaacgcctgggactcaagaccttccgaa

SEQ ID NO: 617022 - DNA, 522 bp, Homo sapiens
ggcgatccttgtctgaataatgtgctaggtgcttattcttctagaggttggcagtttcaattgtgtgttgcttagtctctctcctagaaccaaagaatcgcaggatgggccaattgtctagcacaagcttttccaatctgcagtccacacacagcccaggatggctttcaatgtggcccaacacaaatttgtaaacttaaacattgtgagattctgggccgggcgcagtggctcatgcctgtaatccctgcactctgggaggccgaggcgggcggatcacgaggtcaggagatcgagaccattctggccaacacagtgaaaccccgtctccactaaaaacacaaaaaatcagccaggcgtggtggtgggcgcctgcagtcccagccacttgggaggctgaggtgggaggatcccttgagcctgggagatcaaggttgcagctgagctatgatctcaccattgcactccagactgggcaacaaagtgagaccctgtctcaaaaaaaatagacaaagggaaaca

SEQ ID NO: 617023 - DNA, 435 bp, Homo sapiens
  misc_feature (433)..(433): n is a, c, g, or t
tactacccttctttaaaaaatctgttccctaaacatgtgaaaaatctacttcaaaacctttctgaaaatgaaagattttccgtgttttccctacagcctgtttggttaacagcccaaattcaaagctccttcataaagtaccgcaaggggcccaggtgcagtggctcacacctgtaataccaacactttgggaggccgaagcaggcaaactgcctgaggccaggagttcaagaccagcctggccaacatggagaaaccctatctcaactaaaaacacaaaaattagccaggtgtggtggtgcatacctgtaatccctgctacttgggaggctgaagcacgagaatcacttgaactcaggaggcagaggctgtaatgagccaagattgtgccactgtactccagcctgggcgacacagcaagactctgtctctntt

SEQ ID NO: 617024 - DNA, 191 bp, Homo sapiens
accccagggtctgcgccgaaagagcccgtcagccatgggcaggatcgcgggtaggtgggtcagccgggtctgggtcagagcgcagtgggcggagaacggcgtcacttctgtatttttagcgacccgggcggggtcggtgcctttattttagggggcctctgcagggtccgccggtcctctcagctgaggcg

SEQ ID NO: 617025 - DNA, 128 bp, Homo sapiens
ttctctatttaaattaatagattatgggttaattaacaggataacatggctatatatacctatatatttaaaggggattctttcttaactaatatatttggtttggtaggagattgtagagttagggg

SEQ ID NO: 617026 - DNA, 893 bp, Homo sapiens
aaactttttacatattagtggttatgatccaatgtgtcatgagtgaatttaactgtaaggtggtttaaatcaaatatgcaatgtttgggggggaattgtatttctattagcagattttgactatgtttacaggacggctttaaattcacaggattatcaggcactgtgacgcatctcttcagcttatctcttaaagctagatgctaatattaacgggcttagactttaggatctacatattctgggcacttgaactaggcagtaacttacaaactaagttttgcttacctttcgttctagggactagcactgctatcaactggaaagtatttcccaacctaactctggttcattacagaacagtcatactttttgcaatttcagccaaaacatacaagaccggctgtaactaactctgttagaaacagataatcacatgtcctgaaatccatatgtctcactatgatctaccactgtcattctccaactttaaaatctacaacatgtcactataagattcagacaaggcttcactactctatctaaatgaactttcacttccctactctcacttccggtcagccgtgcgttaaccgcaagccaggcccttgctacttggtctttcccccgcattgcccgaccggcctactccgggcactattctggtccatgacctgcccacttacgttcttattgacccccgccttttgcccctgaccctgcattgggccccctaatttttccaccgtggaggccttttactctcttgccctgctctatattttaccctaactcttggacgcgtcccggttataccgtaccgcggttgccgctctacccctatatccagcgctctcctctaagcgcccttctttgctctggcaccccccttg

SEQ ID NO: 617027 - DNA, 999 bp, Homo sapiens
ggcgcagccctcaacaccccgtgcatctgcgcctagggactcttgggtccagatgtgctgtggttttcacaccttcttgggggcaacatggttccaggagccacctgtgggtgccacctgagccacaggctcccagagaaagcagcacagctcttcctgccacccagagtcttgctgggtggcggatgggggaacaccagatggttgtgggaaggcctgaggccaagaattgggggactctggtactgtgggcagatgagggctcctcatgaatcccaggctttgaaggggaactcagctttattattcgacgagaggcacgcaaagttgggagtggccgccgcgtagtggctcacacctggtgatctcacgcactttgggtgaggccaaggaaggtggatcacttgaggccagtgatgttcgacgtaccagcctgggctaccatacgtcaaggtccccatctctacaaaaattattatttctttaaagacaacattagccagggtgtggtggtgcttgcctatatgtcccagctactcgggagcgctaatggtggcgaggatcgctggagtcccatgaatttgaggctgcagtgagctgtgattaactgcgttgcactccagcctgcgtcaccagatcaagaccctgttctcttaaaccataacacgtttgggcgacaagagcttggtcacctgaaagggagggattactagtacgagcggtgcatggacgattgcttcgctgtgttggtgcctcggaccatcggtattacgttgctgcaacaggtccttgatatctcttactgcttatacacagcttggaggcgagaatgttggttggttaacgagattatgcttcgggacagattggattaacacagttacaggccccctttgtgccgccttgccccggggcatattggccaaaagcgttgtgcaaaaaaaaaacaaccgctctttgcgcggagggtaaggacgctgtctcttctgaggaacgcca

SEQ ID NO: 617028 - DNA, 868 bp, Homo sapiens
  misc_feature (2)..(2): n is a, c, g, or t
cngccgacagcctgtggatctcgcactcacaaggtaatcgccggtcacacacccgtcacatagtgataaggcccggtgtaaaaccgtgcggcgcatcgcgcagaatcccgccggctaaacaagtggcgcccccaagaccaacggtattcggcacccgcttgccgaggatggaaagcaccccccttggggtgcacagaaaacccctaaagggcagctttccaaagtgttcccatacctacgtcccaatgcgccaaaagcccttaggggtttccggcccccataacgcacgtgggtggaactccgggaagcggtgtagtacagcatgtggcaccacccgaaaggttgggaaacttccggccctgagcttcaaacgacaacggggccccaacacgtacgactatggaagcccaactgttagagacactctcaggtgaccgaaatgaagtggaaactcgatgcttaactcccaaatcatgaacggctggataaatgagccagtacatccatgccctcccaagtagaatcaatttcatgtgaacgctcgtctcacccgagagagccgtcggtatgaaattggccgtgattcccttctaagtgatgttgtgtcttggtcacacagttggacatgatataggtcgtggattatggggaatctaagagaggctgccactcgcctgtgagttattgggaattttcaccgaaccacgctgtatgcgcccattcaatagggagcccaatttcacgaattccccgcaggttacctaggaggcggactcatataatttctctgaggcgatgaaaacacacacatataaatacacagggaaaaattagaccccacacaaagttaaaaagagtcacatgtagt

SEQ ID NO: 617029 - DNA, 386 bp, Homo sapiens
gcgaccagaggaccctattatggttgaccacggcctcaaatgtgtgagatgtgatttatagataagcagtctataattttaagacaagaggttctaaacacatctttagattctaagcagaaagaaattacaagcactatttagaatttacattaaacaagttacctctatcaaatttctcgattctcttatgctgtagctatatttgattttaccttaaaaagttctaaggtcctttcccccccttggttaatttgggtaaactaggcacattttacaaggaaatctgtgtcaaaacagataacagtgcataaatcaatccaaatttagaccctggcaaccagttccccatggctcatctacgggactctgtcaaacaataaata

SEQ ID NO: 617030 - DNA, 851 bp, Homo sapiens
gtctgctttctgtcactatagattagtttaccttttttagaattttcttttcttcttttccttttttcttctgggacggactctcattctgtcacccaggctggagtgcagtgacgccatctcggctcactgcaacttctgcctcccgggttcgggccgttctcctgcctcagcctcctgagtagtggggattacaggtgcgtgtcaccacgcccagctttttttttttttttttgggtgttttatagtgtgggagggcgggggttcacacccatggttaaccagggtggaaacggcccaccacacatacccaggctatatttttaaatctctttaaaagagaagacaggggtctctcacctatacagtttctcccagggatgtggctcttatacaactctccgtgggccatagacgcatttctcctctcactgtgacctttggggtatttccacacaagcgactaccggggagatattacccgtggataatacacccatatttaacttatgtttccctcctgtagggctcttatatttttcacatcttgtgagtaagagaacatactacccaccgcgcgcggtgtgtacacacaccccacctatagcagcccaggcctcatgtcgcgccctccagcacaagaacgtcgtgcggcgcccaccaccgccaccgagggaacacgcacagccggaatccacaacacaacgcgggccagcagcccccgctccctctccgcgagcggcagcagaaccacgagcgtcacccgttcccgcgccggggcgtcacccgccaacaggcggggacaacgcacgtcacacaaagacgcgggcttaccctcccaccgtgacccg

SEQ ID NO: 617031 - DNA, 122 bp, Homo sapiens
tcgcgaacgtgtatctgctgacaaagttgtgattgaggcctgcgacgagctgggaatcatcctcgctcatacgaaccttcggctctaccttgtctggagctaatggataacacgttcgcgag

SEQ ID NO: 617032 - DNA, 582 bp, Homo sapiens
  misc_feature (221)..(221): n is a, c, g, or t
  misc_feature (380)..(380): n is a, c, g, or t
  misc_feature (432)..(432): n is a, c, g, or t
  misc_feature (527)..(528): n is a, c, g, or t
  misc_feature (557)..(557): n is a, c, g, or t
  misc_feature (564)..(564): n is a, c, g, or t
  misc_feature (575)..(575): n is a, c, g, or t
agcgggtcttggttcgggccgggcataaaaggcttcgcggcccaggactcacttggcgctgagaacgcgggtccacgtcgtgtgcatcgtccgtgcgtctaggcctttgcccactgcgagctttcaggtcataggcctccgtgtaacgcgcgctatcgtgaaagccatacccctgagcttcaaggtccatcagccggtgagtggctggcgcgcttcaaagnaggtgcaagctgttcggaactacatacagggaaggtacgctgggtcctctctgtttctactccttcttgggacttgtcactattatgtgttgcgcccaacacgtaggatccatcagcgattctagcgatgaccggtgcgacgcaggcacgttacccgcncaatgcttgggtcgcgtgttagtaagtggcattggggccgtactacggcgtngtgagctgcctctatgtgtccatcgcgctagccctgtggcctttggtggattccacatctatcccctcctctcgtgcatacaggacgtgggacgnngctttgtgtgacccctccactggagaacnattcatnccacttgacgntctgcga

SEQ ID NO: 617033 - DNA, 733 bp, Homo sapiens
acctggcgggtttggcacggggaagacggccatcgccatgggcatggcgcaggccctgggccctgacacgccattcacagccatcgccggcagtgaaatcttctccctggatgatgagcaagacctgaggcgctgactgcaggccttccggctggtccatcggctgttcgcatcaagtgaggagacggagatcatcgaaggggaggtggtggagatccagattgatcgaccagcaacagggacgggctccaaggtgggcaaactgagcctcaagaccacagagatggagaccatctacgacctgggcaccaagatgattgagagacaaaaaagaagaaaaaggaaaaaagaaaaaaaaaaaacaaaaaaaaaaaaaagtgtcccctgaccaagtgacaaggtccagtgccgggagacgtgatcaccatcagacaaggcgacgggctaagatctccaagtttgggccgctccttcacacgcgcccgcgactacgacgctatgggctcccagaccaagttcgtgcagtgcccagatggggagctccagaaacgcaaggaggtggtgcacaccgtgtccctgcacgagatcgacgtcatcaactctcgcacccagggcttcctggcgctcttctcaggtgacacaggggagatcaagtcagaagtccgtgagcagatcaatgcaatgtggctgagtggcggaggagggcagggggagatatccctggagtgtgtca

SEQ ID NO: 617034 - DNA, 152 bp, Homo sapiens
attaatacctatgggtttttacaacaggtacaacaatcatagtgcacacaccacttcataacgacaacttctccacctactgtgtgcaggcccaggggcgacagcagctgcgtgtataagagagagtgctcatgaccgaggtctctatccca

SEQ ID NO: 617035 - DNA, 247 bp, Homo sapiens
gaggactcccgcggctctgaactataggcactaataatatgtactgagctttattcaagctaatggttcagcgtgaaatgaaaaggatcaagtgaaccccttccagtcagaagtggagctgccaggactcccaccccatccacgatggccaaccacaacaggctagacgttgttagcatactttccctatacctacctctggtactccccttggattgggacaagaagaacaagttaatctggtcta

SEQ ID NO: 617036 - DNA, 338 bp, Homo sapiens
  misc_feature (18)..(18): n is a, c, g, or t
tttttttttccccccccnccccccccccggggggccccccccggggggggttttttttttgtggggggggtttttttaaaaaaagggggccaaaccccccccccccccgggggggggggggggggttttttttacccaccccggggggttttggggggggggcccccccccccccccctttttttttttggttttttttccccggggggggggagggggggtcccccccccccccccccggggggggttttgggggggaccccccgggtttccccccggggttttttttttttttttgggggggggggccccccccttttttttttttttttttttta

SEQ ID NO: 617037 - DNA, 337 bp, Homo sapiens
  misc_feature (33)..(33): n is a, c, g, or t
  misc_feature (157)..(157): n is a, c, g, or t
  misc_feature (215)..(215): n is a, c, g, or t
  misc_feature (262)..(262): n is a, c, g, or t
ggcctcccaaagtgctaggattacaagcgtgancaccacgcccagccataaatggtgtttttaagcaattttatggtgctaattaagcaatagattaatgtgcttctcttgcactagactttaagctccatgaggggagggagaatatctgattttnctcatgttgaattcccagtagcgttcttgacatgtagtaagtgcttaataaatatttnttgaaggaatgaataaaaacccaaggtgcagtagctagtgctttgantttggggctctgttcctcaacctagaaggttaagggaaggcctgtccagaagcctggaaggcccaagggggaaaa

SEQ ID NO: 617038 - DNA, 299 bp, Homo sapiens
tggcctcgtacgggggaggagacccattctatatcaacactattctgatttttcggtcaccctgcacgttatattcttatcctaccaggcgttcggaataatctacccatataagtaagtatactactccggagaaaaagaagcccttgggtaccacatggttaggctcgagaccatgacattcattgggttcctagggtttatcggtgtgagcacaccatatatttaccggtaaggatagacgtagacacacgaagcatatttcacctccgctaccataatcatcgctagattccgta

SEQ ID NO: 617039 - DNA, 324 bp, Homo sapiens
cggcgcatcgaaatcgaagtcgcgcctcgggagcaccggtgcctttgcgatacagataaatggacagttggtgttctccaagctggcgaatgggggctttccctatgagaaagatctcattgaggccatccgaatagccagtaatgtggaagaccctagaggatatcgacaacagctgtgttccctgcgtcatagctgttcccgtgaggactctgggttcctgctctgttctggggtccaaaccttggtctccctttggtcctgctgggagctccccctgcctctttcccctacttagctccttagcaaagagaccctgccctc

SEQ ID NO: 617040 - DNA, 423 bp, Homo sapiens
gtttagctgctgagggggatacacttcttctttatttctttctaaaacaggatctcactctgtcacccaggctggagtgcagtggcacaatcttggctcactgtagtgtagacttcccaggctcaagggatttctcccaccccagactcccaagtagctggaactacgggtgtgcaccaccaccacacctggctaatgtctcttttttttggtagacacagagtctcactatttagcactgattggtctccaactcctggcctcaagcgatcctcccgcctaggcttcccaaattgctgggattacaggcatgagccacaatgcctggcctctgctagttccgtattctctagagttgtctttactttgtgctagtgtgtccctcattgtgctgatcctctgtaaaaattaatacctttttta

SEQ ID NO: 617041 - DNA, 938 bp, Homo sapiens
cgtgccgaccccgccgtgctcctcggcagcgttgctcggccggtttggtaggcccgggccgcgctggcctccgctgagcccgtcacccgccatggacaactacgcagatctttctggataccgagctgacaccttgctggcacggtacaaatccgcgcactgggcctgtattaggatcaactcgtaggctttacgagaagaagatcttcgaggtacgagacccagaggcggcggtctcgccccccagctcgtccgcgtctcctcttatagcttctctgacttgaattcgactagaggggatgcagatatgtatgatcttcccaagaaagaggacgttactctaccagagcaagggctacaatgacgactatatgacgagagctacttcaccaccaggacttatggggagaccgagtctgccggcccgtccagggcctgttccgcagtcaagtgacttcaattcccacgatgctgacgctttcatcaccaggtgcatgatgacgatctattgtcttcttctgaagaggagtgcaggatagggacacgcacatgttaaggcgggacagtgctaccagaagatcacgacagtagcgagctgtgacagcctccaaggagctccctgggacctgtcctattaatccgtagtttacttcttcaagattgatgtctacttaatattttctattaggctaccgacggagaatagggctgaaagcgtgtcctgggctggtggcaaggatgcaagccattgggaattgtgattcaggcatggaaagctctataaacagtagtgggtggaagacctaaagggcagtgttggttacaagtgagagcgggacacaagcgggtgtgagaaagaagtagacgagggagaaagaggacgaggggagagacagagagtaaagaggacgagtctcattggtctttcttttttgaga

SEQ ID NO: 617042 - DNA, 872 bp, Homo sapiens
  misc_feature (711)..(711): n is a, c, g, or t
acttgtcaagagagtaaaaaatttaccacccatagtaggcctaaaagcagccaccaagttaagaaagcgtcaaagctcactcacccactatctaaaaaatcgcaaacatataactgaacgtcctcgactagccaattggaccaagtctatcaccctataagaagaactaaggtcagtataagtaacatgaaaacattctcctccggtaagcctgcgtcagattaagaagactggaactgacaattagcagcccaatatctacaatcaaccaacaatgtcattattaccctcatgtcagcccaatacagagatgctcataaggaagggttacaaaaagtaaaaggaactcggcagactcttaccccgcctgtttagcaaaaacatcacctcttagcatcagcagtattagaggcaccgctcgtgccagtgacaccatgtttaacggccggggtaccctaaccgtgcaaaggtagcatagatcactctggccttaattagggacctgtatgactggctccacgaggggttcagctgtctcttacttttacccagtgaacttttgactgcccgtgagagggcgggcatgacacaagaggacgaagaaagacctatgagcttaaatttataatgcaaccgtactaaacaaaccacagttgctacaataccaaactgctaaaattcggtgggcgactcggaacaaaccaacttccngggttacctgctagaattcaccggtcaagcgaattatatatcatggtccatactgacaggacagtccctagggaaagcggcagccatttgagtcgctaccaaggtccacccggtgggcggaccacggggcggtagggtgcaaaagcctgtgggaacgaccg

SEQ ID NO: 617043 - DNA, 214 bp, Homo sapiens
ccttgtgtccattttcataaaatccaaaaccactcataagaactttgtcaggggccaagaaatgtatcgtggacattcaggtgaagatatcttactactcagacatcagtcagcatcccagatacaagagtctagagcctacaatacaaaagccatatgaatattatcagctctgtggtgttacacatctgtaacatggtataggaatgcaccc

SEQ ID NO: 617044 - DNA, 228 bp, Homo sapiens
tccccaaagtttattatctactaagaatgatggcagctccaagagttatcacgcttacagatgggggtggagagataccggtaattgtgtccgtcatgggaactccgggtccacaaaagttaagggaaagggataagggtggtaacattgggtttaaatccctaacaagtaagatggtaagggtcaattatattctcgaaacaatcacgtgaataatctccagaattt

SEQ ID NO: 617045 - DNA, 278 bp, Homo sapiens
gtatcatgcagatggactcttcatcacgcctccccagaaacattccctgcaatgagtccggaggagaggaggagagtctgtgtgaggagcgagagagagcaccaggctcagaggtgtccctatctaagtctcacggcagtccccagccatcttggctcatcccagagaaggtcttcatcggggaggcaaaagaaaacaattccatatggctgagaacttgtggacactgggcgatggcgtctgtggaaatggatgggtgaggagtcagggccgacaat

SEQ ID NO: 617046 - DNA, 224 bp, Homo sapiens
  misc_feature (210)..(210): n is a, c, g, or t
  misc_feature (220)..(220): n is a, c, g, or t
ataaacagtgggattttctggactattcatgatgtgaaataccattcagtgatgagaatgaaaaacctactgctatatccaataatatggatgaatctcacaaatattataatgagtaaaaaaagccaaatacgaaaaacaacaaaatgtagaattctatttgtacggagtttaaaaacagggaaagtgaatgttttattttaggagtcncggagagtcnctta

SEQ ID NO: 617047 - DNA, 102 bp, Homo sapiens
gcgtgcaactggatgtcttttggcataattgttacacgtatggcatggatatgcacacaggttggtgtcttcaaataacggccaacctagatatggcctcac

SEQ ID NO: 617048 - DNA, 169 bp, Homo sapiens
aagttgctcgggggagtaggtatgtgatcaggagtagggttaggactgagtgggacgaatgaaagagaggacgtcatagtttaagttatgccttttgggtgaggtgatgatggaggtggagatttggtgctgtgaaagttgttttatggtaatacgcttttcaaggtct

SEQ ID NO: 617049 - DNA, 666 bp, Homo sapiens
agcggagcggaggggcggtgttgagaccggcggagcggcgtgggcccctatgtggacggagtggacgctccgggaaagcgaggggcgctacgagctctggcccacgatgaacacacgactgacacacattcacacgacgatacccgggaaccgaaccgaacgagggagacttataagtactgacatcgaaatggaagggaagaattagataagcatgcagcagaaagaccatgcgtgtgtcatgataacgaataacagaaagtggaaagcatatctaggccataagaaggccatggaccattgaggaagagggggaaaccgataatagtgatagaactcaaggaagaactagaacagacggacatgcggcggatgatcaatcactagtagaaagcatggcaaaatacagagataagggaaaacttggaagagtgaacccgtagaaaagaggacagagtttacgccgggcctacataacaacgaggacacaagatatagggggagcagagtgcagtgtagatagggcataataagggcgagttgcacgatatagtgacgaaagaacgccagatcaagaacagtaaagtcaagcagaagtcgacgtgcaatgtaagaaacccgcaatatgaaacgatagtgaacgatacatgtgagacagaacacagg

SEQ ID NO: 617050 - DNA, 1041 bp, Homo sapiens
aacacatttcgtggtgaccctgttgggttctggtcttgttgcagtaccaatgcttatgaatgcggacatatatccttcgtaactactcaatgaaagtctccccaacgtggtctccgtatatatccttcttgctggattgttatcaatcgagagactaatcatacgctgggcatcatcctgttgtcatggcgatctctggacagcaccagtgaatggccgtgtgcgatacatacctagtctatccagatgcgatctggtagacaccccagtaattcgtgtgtagctatgtacaaacagaaccgatgtaaggtgagcagaagtcacacgaacatgggcttgcaatcatgaatccttgtggtggacatccgtacgacccctaatgctctttcttcatgctgcctggcataattctgcagtagacagcgattaggatgtcgcatcgtgggttagagctggtcgtagccaacctttctatccctgtcgcaattgcgggccctgaatagtagcaccgactctgtacgtggacgtaacggaaggcaggtacctccctgcaaagattgaccaaaactggagacgtttggttttgaagcgcggctgatacatttaccaaggcccaattcggcgaacggacacaggagtgcaagcagtaaaagtgggtggttaatgagactgcactgtacggcacgatgtatataggttaggacgcaaaggtgccctgtgcggaggacctgaaacggcaagtaaagcgcagaaccctgttcttttgtgactgcatggaatgggtcaatggggatttctgttcgggttggcgagattccaccgcattgtcttgatggactttcttagggaatcaactatttttatacccatgcaatctaccaggcacgtagcccattggaggatcctaacgaaagaacaggacatggattgcaagcaatgaaccaaggctttcctacaatcccgtgttgtggctccctggcagggtctgggtgtaaaaagcccaaactaatccttgtttctaaaagaagcctttactcttta

SEQ ID NO: 617051 - DNA, 174 bp, Homo sapiens
atcacgagatcccggaattgtgtggtgttatggtagtagggaagctggggcttagctgtccatctatttggagttggcaggaacaggatttttgtcttgtgcagcaaccttgcttgtcaagcatgctgattgagcaggaaaggcgttttcttttgggcataacaccacacaatt

SEQ ID NO: 617052 - DNA, 746 bp, Homo sapiens
  misc_feature (728)..(728): n is a, c, g, or t
cctgtagtcccacctcagcctcccaagggtgtgtgtgactacaagtacacactaccacgcccagctaatgtgttttttgggtacgacgatgggatttggccagtgtggcccaggtcgtggtctcgaattccctgcgattcacaagtgatcctcgccacctcagggccctcctaaatgtcctaggattataggggcatggagcccacctttgtttgcccctgggcccccttcaatctggattaagacacacaccttagagtttgtggctatggaggccatttttcctgaatgggccaaattttaaattaacttcgggtgggttggaaccttccctattccttttaagaagggtttaagcccaattccgtttgccccttttaaacagaagttttttcacctttccgtagatttattagtagtccaccaagtttcgttgtgggaaaaagtttatttactttccactttggtttgtgtgtcgcccaaaagaagttgcttcgtaaattaatttcgtaaaaaggtttttacgaagaggcggggggcatttttattaaagcgcgccccaaatgggggtggaatggggccttttctaaaagaatgttttcaacaaatttttcttacaacacttttgggggggccttttaaagcccaatatttaaacgggcccaacaagggtgggccaaattccgcggttccctttgtggggaaacaccccgggaggaacggacatntgtttccttccttaggaa

SEQ ID NO: 617053 - DNA, 581 bp, Homo sapiens
  misc_feature (233)..(233): n is a, c, g, or t
  misc_feature (238)..(238): n is a, c, g, or t
  misc_feature (249)..(250): n is a, c, g, or t
  misc_feature (274)..(276): n is a, c, g, or t
  misc_feature (283)..(283): n is a, c, g, or t
  misc_feature (306)..(306): n is a, c, g, or t
  misc_feature (312)..(312): n is a, c, g, or t
  misc_feature (323)..(323): n is a, c, g, or t
  misc_feature (325)..(325): n is a, c, g, or t
  misc_feature (334)..(334): n is a, c, g, or t
tgctgaatccctttctcagctcagagcagttttaagatttaattgggaatacagagaaacaggattgtttgagaaccaaaatcaagaggaacagaaatcttaacttgatttcatgtgttagaacatgtaccatgcctcttctgtatctgtggaagtttcctgtttgacacagggtatctaggaggggcggggaagacatggatagtataggaagacattaatcctagcattgncattnatatacataanngaaatcctgatgaggacctgcttnnngttggtnttcctttgaaacccagccctatngtattngtatttaaaantntgtacacantttgtataataatctgtaccttgaggtatttgggactattagaggaaaaactttggattcagacccttcttgcagttttaaaatcatcggttcatttctggtttttaaaaaaaatcttaatgggttggatccaaatcccaatacagttggaaaaaaaaataaaaatttggacttatttttataaaaaacacatttttaaaaattggtaaaaaaaaatattcgagggtttacctctagggggggggcc

SEQ ID NO: 617054 - DNA, 267 bp, Homo sapiens
cttctctatcgagagtggacgtatgctgtgcaacctcaggcctctggaatgcagtccctctctcatgatgcccgtctccctggttccttctcaatcagttccgcaaagagcttaccccagtgacccaacataatggggctcacccattcatactgtctcccatctacttgtaaggtgcttctcttttctttagtcgagacagagtcttgctctgtgacccagactgtagtacagtggtgtaaccatgggtcactgcagcctcgacct

SEQ ID NO: 617055 - DNA, 665 bp, Homo sapiens
gggagtccacaggagcggaatgtagtctagatcttgactgatgagccgtaaagctgcgggctggctctcgttattccggataacgactacatgctccgatctgtcatgtgccggccttcactcgtgtgaggggatctgccggacccctgctaattcagatttctttcccattccggggccttcctctatcgtcggcccccttcaccgttggatcatgttcaagatatttgatgaaaagagatgatgtgtccaactgcatccagttgattaacttcagtttattaacgggtattcaagaactcaattgtactagagctaatttccaggtatatgaaccatggctataatcaatatcatgcctacatgaaagatcctgtcatatatagtcacgatgccatgaacactatatgaacactccttagcagtacacaggtggagaatttactctttctttagacataagtagaaggtgaccttgtttatccaacccgtagagatttacttcatcaaatatccttgtgatcctgccatcaacagcaggttgataagatggagccatcaaatttgtactcatgtggtagcaaatatcatgtgtccaggcttaacttcgtcctggagtctaacgcttaatcctgctgcaggtagataccattgttgctatcatg

SEQ ID NO: 617056 - DNA, 322 bp, Homo sapiens
aaattccgctctctggggaattaaggatctctgggcacacaatcctcagtcagagaacctcatcaatcaggccatcccccgtgttgaacatatgggcaaatgactgcaccaagatctgattgttctatcgttacaaagaagaatcaccaccagatccaggaatgaggatactgcctcctggtcctgggctctcgagtgggtccagagccctgcccccgatacatcagccttcagaagggacttccaagcctgggaaagcctccccaggaggtatccttatagctaaacagcctagacagaagggtgcagagctgtgcctcag

SEQ ID NO: 617057 - DNA, 106 bp, Homo sapiens
gttcatttctacactgatatacattgccatccttgtccaagactcggaatgcctcacggatttcttcttcactatctgtatctttcatttttctagccatcatagt

SEQ ID NO: 617058 - DNA, 587 bp, Homo sapiens
  misc_feature (449)..(449): n is a, c, g, or t
cggttatagaggataccccggtccccgatgcacatgttatggtcccctgcacaagttatgaagagagtagtggttctcccagcacgcagttggagatctgagaacggacagactgcctacctcaagtgggtccctgacccctgagtaacctaaatgggaggcaccccccagtaggggcagactgacacctcacacggccgggtactcctctgagacaaaacttgcagaggaacgatcagacagcagcatttgcggttcatgaaaatccgctgttgtgcagccactgctgctggttatccaggtagacggtctggagtggacctctagcaaactccaacagacctgcagctgagggtcctgtctgttagaaggaaaactaacaaacacaaaggacatccacaccaaaaacccatctgtatgtcaccatcatcaaagaccaaaagtagatnaaaccacaaagatggggaaaaaacagagcagaaaaactggaaactctaaaaagcagagcacctctcctcctccaaagggacgcagttccttcaccagcaattgggaagacagctggctggggaatgactttgaggagt

SEQ ID NO: 617059 - DNA, 135 bp, Homo sapiens
  misc_feature (13)..(13): n is a, c, g, or t
ccccccccccccngggggggaaaaaaaacccccccttttcccccccccccgggggccgggggggaaaaaggggggggttttttaattttttttttggggggggtttttccccccctttaaaaaccttccccctta

SEQ ID NO: 617060 - DNA, 222 bp, Homo sapiens
taggaatttgagaccagccttagcaacgtggcaagactctgtctctaaaaaaaaaaaagaaaaattatctaggcttggtggcgcccacctgctgtctcagctacgggggaggttgaggtgggagatttgcctgaggctgggaggtgaaggctgcagttagctgtgattgcaccactgcactccagcctgtgtgacaaagggagactctgtctcaacaacaac

SEQ ID NO: 617061 - DNA, 156 bp, Homo sapiens
gtagtacactcgtcataattgaggtgagctgatgtctctcccctattgcaatagaattgacagcagttgcaacaattctgaatagtcttccttaacgttttagcaagcgccagaatgaatttttccttagcacacaccaactgaagtaggctggtc

SEQ ID NO: 617062 - DNA, 1160 bp, Homo sapiens
gacaagcttaaccaaagacatttacccaaataaagtataggcgatagaaattgaatagctgtgcgcaatagatataggtaccgcacacgggaacagactgacaagagattatagaccaagtcttaaatatacgcataggactaatccctatagccttcgtgcataatgaattaacgtagagaataagctttgacaaggagagccaaagactaagacacccgcgaacaagcagagcgaggcatacctagagcaacacgcgtaaccgaggagcagcagcccggtcatagtgataaggcacaaatagatgggggcaaagacttgtactacggatacgaggggcgaccaaagaagcattaccctgagaccatggtagtactaagcctgggtagatgcgcaaagtagtcaggaaatctttcagtgtgcaagctctgtacaagatttgggcccgaaacaagaaaatccacctgcgttagaaagtcacgcgcatttgggttagaaacttgtagaagcatagattaagtgccaaaaagacgtgaaaagcgaggacgtcttgtttggtggaccaacgttagaggacaataagaaaaacacgtaatgtgtaaggacgaatgcaaggtcaaacaaagaaatttgtaaaaggaagaacgcaaataggagtaagaggcaccgttaaaagaaaatgcaaaggagccaaaacccaaaggtgtaaagaggacacacaggccggattatccaagagggcatccagaggcaaacaccaacaaagagtataagcacgttaaaggagaagaaaagtttcacacacaaaaaaggaagttaattagacccttggagaagcgttccgcgttccaagcgaaggccccgaaaaatattggaggacaacacaaaagtccataagtcaagagccgacagtaattatgcacagggcaaaccttaacattggtattgacggtaatttaaaaggatacaagactgtgacacagaacaaatttgaccttcacattccccgggagatttaaagggccattggccgagtagaaggaattttaagaaaagcaacttggaaagcatgggacaatttgaaacaaaggaacaccaaaagtaatgctaacacaaaatccaagacacaaaagacaaaggtacacagtgtatataacccc

SEQ ID NO: 617063 - DNA, 959 bp, Homo sapiens
tcatatcattggtcgtggttgtagtccgtgcgagaataccaaaaaaaaaaaaaaaaaaaaaaaaaaaaaaattttggggcggctggggccttggaaaaactttttaagaacaatcgttgtgggcgcgcgcgggggcacccagagacgaggaaaggagaaacatgggcgacaaaagcggaggtccaaaggagaaaaccaggggacaatgagaaataggcggctggggagatcctacccaaaataaaacaaagcgcgccgggggggaacaccaagagagcgggcatgcgcgaaaaaaaactccccgagaagaggagcacacggggagagagcccaaaaaagaggggaacatccttataacacgagggagagtcaacaaagacgaagacggacgaataaatcaaaaattatacgccccgccaaaagtggggggcaaaaaaacaaaaaaggaaacaggaagagggagagagaggaggggagagagaagggaggaaaaaggggcaggagagggggacgagaagagggcaaaacagaggggaggggagaggagaagaagagggagggcgagacgagggggaaagagaaagcgacacagagggcgcgagagagaggagagagagagaaagggggaggagagggggaagggagagggggaggagaggggagagaggagaggagaaggagggcggagggagcgggcaggggggcagagacgagggaaggggaagggggaggaaaagggggagggggaggagaaggaggcagaagagcagaagagcaaagaacaaggcagcaagagcaggagggagaagaggaagaggagagaaaggaagaaagggacggaagaagcaaagcagaagaaggaagaagcgccggaaacaaagaccgaagagacgagagagagagaggaggagggtagtataagaacgagaaaacaaagaggagggaaacagaagaggcag

SEQ ID NO: 617064 - DNA, 651 bp, Homo sapiens
gcagctctgggttccaggacttaactgcttaacctaagagtttcactgaggctgctgtgtatttcgagcgggcagtttatcttttgctatacttattttcaattcaattacaccacgattcaaataattcccctcctaaaaccaaaaaggagggaaacgtcaactccattgcaattacttatcttcctattctatgccccggcgtataacagagatagaagaggaagataagtaattgcaatggagttgacgtttccctcttctatctctgttatacgccggggcatagaatgctcgtatacatctctttaacaaccacaaaccttaagccatgtagatgaagttagtgcatcaacgggatacagttccatattgccttaaacctccttgttttagacacactaacatttataccaaattgcagattattctgcagagagggaattgcatgtttgtgttgtatatttagtatgaacttttttcagaatataatatttcttagttatcaaaagtagttggaaaacatttgcaagactatgaacatagaattgctgcttttatattttaactgcagattgtgaatttcactgccttatattatttatttctgaaacaaaagaggcatttttcaataaaactactgaaaatttg

SEQ ID NO: 617065 - DNA, 220 bp, Homo sapiens
  misc_feature (29)..(29): n is a, c, g, or t
  misc_feature (41)..(41): n is a, c, g, or t
  misc_feature (52)..(52): n is a, c, g, or t
  misc_feature (100)..(100): n is a, c, g, or t
  misc_feature (137)..(137): n is a, c, g, or t
  misc_feature (140)..(140): n is a, c, g, or t
  misc_feature (158)..(158): n is a, c, g, or t
  misc_feature (163)..(163): n is a, c, g, or t
  misc_feature (177)..(177): n is a, c, g, or t
  misc_feature (191)..(191): n is a, c, g, or t
  misc_feature (204)..(204): n is a, c, g, or t
  misc_feature (210)..(210): n is a, c, g, or t
  misc_feature (220)..(220): n is a, c, g, or t
cgcgctataaaaactttataaaccccccngagcccgagcantgtgaagaagnggcgagaacgacccccggaccgaccaaagcccgcgcgccgctgtcatnccgcgtttcagcacctacgtcccgctgccgtcgccgncgncaccatgcccaagagaanggctnaaggggatgctaanggagataaagcaanggtgaaggacganccacanagaagatccn

SEQ ID NO: 617066 - DNA, 141 bp, Homo sapiens
tacatctatgcagcgcagacacgaaatacagaacgctcaggatatggtggtaccaggagacgactatgtagaaagttggagtcaaacactggatgcagaaatttgaggatttctcatacactttctctttataaaaaaaag

SEQ ID NO: 617067 - DNA, 1184 bp, Homo sapiens
gccggctcttctgctgctgttatgtctacttcctcctgcttccccgccgccgaccgccgacatcatgagtggaaatcgtgcacttgcagtgcctgggcagtgcggaaaccaactcggcgccaagttttgggaggtgatcagctgatgagcactggcatctgaccccacagggcacctaccacggggacagcgacctgcagctggaactgcatcaacgtgtactacaatgaggccacctggctggaagtacagtgccccgcgccgtgctcgtggatctggagcccgagcaccatggactcctgtgcgctcgggtgccttcgggcagatcttccggccggacaacattcgttttctggtcagacgtggttgctgggaacaactgggccaaggggcactacacagaaggcggcggagctggtggactcggatgctggatgtcgtcgagaaaggaggcctgacgagctgtgactgcctgacagaggtttccagcctgaccacactcccatggagtgcggcggagactgggtctggggatggttacacctcacgacgatcgagagaaaagagtcccgcggacgggaagataaccccagaacgcgggaagcagtgaaacaacggtaaaagagaggagagagaccgttcggcacgcaagaagcgataagaacaaaagagggaggggaaggaccatagaaaggccaacccgtatcagaaggcacgcaagggcatcgccaaaaaaacaagaagcagaaagaaaaccaacagggcgctcggcagtgaacagaaaagacatccctacaacagaaaaagacagagtacgagaaaaccaccaaaaaacgaatggacacaacgacaccaacacgatagggagtggacagagaaacaagacagagacgaagagaccaaaccagagacgaggaggatcaaccaagacagtgggcagggagagcggtgagaagggggacgaggcagacacagtggcgaaagacccatggaggaggacaagcgggggtgatgaaaaacaaaggggagccgaaaaacaccaggggacggcaaaaataacgtatacggacaccacgggaacatggagccgagagagaacaagagacgagaggcaacgaccgagaaagagaagagcggcggcaaggagagacgcgggcaacagcggcagaaacgcagaagagcca

SEQ ID NO: 617068 - DNA, 141 bp, Homo sapiens
cttggcacgaggtgggtataacccattgggctgcccaaggccatccagcctgagctctcctgcaaaacaaagcctgatgtggcacggagtggggttgcggggagtggagtaacataattatcatacaacataatactaatc

SEQ ID NO: 617069 - DNA, 141 bp, Homo sapiens
caaggttaaaagatactattttaaaaaaagaaaaaaattaatatatgagaacattatgttacaagtcacaagctaatctatgggaatgtttctactttacaattttaaataatgaaaaataaggtcgaatagtgctttgtt

SEQ ID NO: 617070 - DNA, 214 bp, Homo sapiens
tctgtgactctacctttaagttgtaccctcagaaggacgggtaagcaggaggcagggtgtccccagtgctgaggtggggagcttctacggcgcaagcttgcaccccacaatgaatccacctcgtgctccagtgcgcgcctctcccaggtctcagctctgggtggggagcagtgcgcgctagccgacagcgcatgttcccgcttaaactcggggc

SEQ ID NO: 617071 - DNA, 1673 bp, Homo sapiens
gctgttgtacatattatttcatcacccagaacccattagttatttttcctgatcctctccttcttcccactcttcaccctccagtaggcccctgtgtgtgtgtttctctgtatgtgtccatgtgttctcatcacttagcttccatttataagtgagaacatgtggtgttggttataagtgagaatatgtgatgttcggttttctgttcctgcgttagttgctaaggataatggccttcagctccatccatatccctgcaaaggacatgatctcattctttttaatggctgcatagtattccatgatgtatatgtaccacattttctttatgcagtctactatgtgatgagcatttaggtttgattccatgtctttgctatggtgaatagtgctgtaacatcatcatcttctgaaactggtagtggcaaatgacctggctcaagccaagagaagaaaacacttaacatgtatcctaggaaacaccttatttcctaagaaaaacacgaccagacttagttgtcaccaatcagtcatcccttttctggcttgtacattatggctcagcggtggggactcctacaggctggggaaaggcaagattcccacggtcgagtttggccacagcaggcctctacacacgctcggtgggcccagcaggcggggccgcaccccccatccttggtgggcacaaccactttgggggcataaaaaacctctcgctgacatgatccacccggcgccatcctcgtgtcgttcctctgcctttactgtatgacacaccactcctgccaccgaccagcacacagcacgacagacaacacaccacctccacgctagcagcccacgccacgtaccaacgcaccacacacacgaaggagaccaaggaggaaggagagccggccgagtaacagagagagagagagaagaagcaccgagagagaagcgcgacccagcaaggcacaggcgagggcgaaacaccgaaagagaaacgcaagaagcaggctgagggcggagaagaggacagagacaacacgacgagcagaggaggcgaggacgagggagcggggacgagaccgacggagagagagggacgtagagaaggcgaagaagaggccagaagcaggcaccaggcaggagaggagaacagaccgagaggcaccaagacggagaggggaacgaccggcagaggaaggcagccagaggacagagacgagagagaagcagaggacgcaaccggcacaggacgccgagcaggacacggaggagcggagaagggcagacagacgcaggaaggcgaggcgaggaagggcggtgaggaaggacgggacacagagccagagacggggcgagagaggacgaagggaaggagacgacgagaagcagcgacgacgaggacgagcaagagagagagagagggaggagacaggggggagaaggagagagagcaagaaagacgaggcggaaaatgaggcgagacgagcaggcgagagagggagagcggaacgaaccgcgcgccgacagaaggagacaacaagagacgagagaagaagcgacgaggaaaggacaacagcacacgcacaagacagaagcgacgagccaagagacaagaacacagcaaaaacagcgagacggcagcgagaagcaacgcacacccacagcacgaacacagccac

SEQ ID NO: 617072 - DNA, 883 bp, Homo sapiens
gggtattgctctctccaaatgcagaacttccatccactttatctggtgatctgatgaacagcatggggacgtggaggtgaaataagcatctttcagaataaggtttttttttttttctctctctccagaaaccaagggctttagaacatttggtagaacttctcgggaatcccttctcgtgaactggggtttttaccaataaaaaaccattcaccacattcaggggaagggagctctttcagtgaatatacattcacagtgttctggctctcacggaggaatgtggtgtggtccaaaagcaccaaataggggcacccgggaggttgactgtggtggtgttcctccataaagctcgttttaagtggcttccccggcgatggcttggatggctcaggtgggctttaaaggagaaagggcagaaggtggctagaagtcgaagtcatccaatatccaggggctaacgtggtacttggacccagggtaatctcagttcttaatcaggtccttcccaaagaccttacaagggagttggtgtatcctggtagattttggacgcctaataggtcacagaattggaaacttttagacgcagttggttcccccttagggtgagaagggttacttaattgaccacgtgtgaattcctactagtatccattataagatgtaacgtgggaaaaagtgaaacccagggagactgttgagttccctattggatttatgttattgggtgggcgggtcatcagaaagtttaccttgaaggtaatgaggaacgggttctggtggacttagcgccattccggggacattttgccaagggggaggccgggtggattcttggggccaacggggttgacggaggcaaagggtaaacggaaaattc

SEQ ID NO: 617073 - DNA, 115 bp, Homo sapiens
cctcacagactgcgcgtgactttttgatggatggccggggtttgggctttggtttcttagtgttcctccttaggctgcgaagaatattcctcctccgcgggcgcagtccgtgagg

SEQ ID NO: 617074 - DNA, 388 bp, Homo sapiens
tgcataatctccacagtaactccagttacagttcatcggctccagagagcaatggagtccaagcgtctgacagtatagtgataacgagtatgcctgtcaagtttcacacatagtgggagcattatgtgatccaggacagtcagtgcacagatgaatgcagtagcaaaagtgtgatgcatagtaatgatcactgtgcattatcggcattgcgcgaggcccaacgttgtaaggaatgactccaggtctatagcgcaaggtgctgtatggatactgacctttgcagctgaatagaatgatgagagtaaactcgtgcatatgaggccacatttgcatcactgagctattcctggatggctcccgagtggtgttagacaattcctcattagcc

SEQ ID NO: 617075 - DNA, 176 bp, Homo sapiens
cgacacgaggtgggtcccacttgaggggcagcaccagggacgcaatggtccaccaacctctcccactccagagcaggtaggggctggaacccccgggtcctgtgtgggcctcaggctctcctcccatctggtgaggagctgggagagagagctgctctccccgccaaaaaaaaaaa

SEQ ID NO: 617076 - DNA, 133 bp, Homo sapiens
atcaagatcttcgccgagagtcgtcggggtttcttgcttcaacagtgcttgcgacggaacccggtcgctcgttccccaccccggtcgggcgtccctatagccagccctctgtcacctcttcatcgcacactcg

SEQ ID NO: 617077 - DNA, 424 bp, Homo sapiens
catgcaaggcagctgtgatggattcacctctgtgcaagacagctatgacggagttgatagaaagtgtgagaacatgggccacccctccttggatgtgtaagtattatagacatcctagatgtaagtattacagacccctaccaggacagggaattccagaggaagaacaggatttgagggaaaaaggcggtaaattaattttgatgttcaataagcaagtcaaagtgctgcattccaggcagtgggctggacaccttaatccaaacccaacagttccgtacactcctataaccactcccactttacagatgaggaaactgaggtccggagacattcagtctcttcccaagatcacataactcatgagtggcagagcaaggatttgaacccatgtctgcctggccccaagcctgatgtgaaaagg

SEQ ID NO: 617078 - DNA, 442 bp, Homo sapiens
gactggtgtaggtgttgtgactgaagagagctgaacgaggagatttttcatgaccttcggaatagccatggcctcagtttgtacgacagttctgtagcatcagagctagagacgcctgaagactttacactcacggatgacatcaccaggaattgggcagctttcacatcccgagcagctatgctgcagaagagcgtattgaggggcgagtaagcagctctgcagacagccggccactgcctttccacccgccccaagaatgagttcgcagccaaggctacagaggatcaaatgcggctcctacggctgcagcggcgcctagaagacgagctgtggggccagttcctagacctgtctctacatgacacagttaccagcctcattcttggcggtcacaaaaagcgtgcagagcagcttggcacgtgacttccggcatcccttg

SEQ ID NO: 617079 - DNA, 306 bp, Homo sapiens
acccgtggcgagttcatgcatgtgtgaccaggtatatgagtggatgggtgaaagtggggtgtgtgcatgcggtgtgtacacgtgtgtgtgtgtgtgtgtgtgcgcgcccaggtgtatgaaagaatagatacacgtgtgaaatgtgtacacatgtgagaatgtgcgcccaggtatatgaatgtgtagatgggtgtatgtaaatgcacacatgaaatgtgcgcgtatgtgtgcgcatgagcgcccaggtgtatgactgtgtggataaatgtgtgggatgtgtctatgtggtgtatgcgcgcgtgagtg

SEQ ID NO: 617080 - DNA, 343 bp, Homo sapiens
  misc_feature (11)..(11): n is a, c, g, or t
  misc_feature (338)..(338): n is a, c, g, or t
  misc_feature (340)..(340): n is a, c, g, or t
tgttggccccnggctggtctcgaactccccgaccctcaagtaatccctactgccctcagcctccccaaagtgctgggattataggcaaaagccactgctcccggcctcagcaaaaatatttttaaaagacagaggtaaaaaataaatactttttcaaacaaaaaaactaaataaaattctcaacagcaaaccacactacaaaaaaatgttttaaaaatgtcctttaggcagaagcaaaggatgccaggtggaaatatggatctgcacaaaagaatgaagagcaatgggaaacttaactacatggaaaaagatgcatgacattttcttattatttaaantntat

SEQ ID NO: 617081 - DNA, 163 bp, Homo sapiens
tcactctctgccaagatccacagacacatgctccagagctagctagaggagcagcagcagctcagctcagctcagccctgcacagccctgcccagctctgagctccaaggacctgcctctgacccagagtgtaaggtagctcactgcgacagatgagagtcaa

SEQ ID NO: 617082 - DNA, 125 bp, Homo sapiens
  misc_feature (92)..(92): n is a, c, g, or t
acctgcaaactttttctgtaaagaccagatagtaagtattttatgctttgtgagccatacagtttttgttgcaactagtcaactctcaactnacgtggacagcatgtaaagaacgagagtgactg

SEQ ID NO: 617083 - DNA, 107 bp, Homo sapiens
  misc_feature (23)..(23): n is a, c, g, or t
  misc_feature (75)..(75): n is a, c, g, or t
cctggcaccatggactctttcangtcttgacccttcggccaaatcttcagaccaaacaacttcttgttcggccanagtggagccgggaataactgggccaagggcca

SEQ ID NO: 617084 - DNA, 292 bp, Homo sapiens
tagaggacccgtacatctatgctagaggaatcaaatcgattttacttacctctggcaaaaaagagagaacagaaaaaagtcatctattcagtatactgtttctatatagcaaaactgaatgtctaaagttaccttactgtccacacacagaagaatctgcatgtattggttggtggtcctgtcccctaaagatcaagctatacatcaattttacaatataaatacttgtactaccttaatgataaggactccttaaagttccatttgctaatgattaatacactgtatgggc

SEQ ID NO: 617085 - DNA, 120 bp, Homo sapiens
gacgccatgaatatctttgcccaagaagagctggcacgtccagaacaaggacaattgttcggcccgcttgccggccgtgacggagggccaagggccccggaagaagaaagagagagagct

SEQ ID NO: 617086 - DNA, 175 bp, Homo sapiens
ctgtgcttctgggacctccgtggtaatgaggtgctgggtcacctgttacaagtcaggagcctgtagggagacactacttttgtacaagtactgaatgctgcgacaagcagatacttgtaaaattaatattatttctaatgtcagtggcgactcggttcctggggctagcagccag

SEQ ID NO: 617087 - DNA, 359 bp, Homo sapiens
  misc_feature (68)..(68): n is a, c, g, or t
  misc_feature (186)..(186): n is a, c, g, or t
cttagctaggctgagtgagtggcaaatctcagctcatgcagctcgctctggttcacgcattctcccanctcagcttcccaagcatgtgggactacaggtaactggcaacaaggctggtaattttgtttgtattttagtagagacggggtttcaccgtgttagccaggaaggtctcaatctcctganctcgtgaatcgccccctcgggtctcccaaagtgctgggattacaggcgtgagccaccatgcccgggccaaatattttttattcaggatggtataacctaactgataataggtaataaggttaaatttttttattgacgtattttatttacaaatatcatgcactgctggtgtt

SEQ ID NO: 617088 - DNA, 276 bp, Homo sapiens
tcaaaaaaaaaaaaaaaacaaaaaaaacaggttttttggagtcagaatacctggcctagagtcccagctccatgatttttctttgttaaaagacagggtctctgccaggcgcgatggctcacacctgtaaatccagcactttgggaggctgaggcaggagagtcgcttgaacttgggatgtggaggttgcagtgagccaagatcgcgccattgcactccagtctgggcaacaagagagaaactctgtctccaataataataataataatagaagca

SEQ ID NO: 617089 - DNA, 364 bp, Homo sapiens
ctgaggatcccgacgcttcgacgtagactataagtgacttatgctctaagtcctgcctgccttacctatatcttgagtactaagttacagtgacactagtctcctttagtttccttgatattcccccagcgttttcccacccctggtcttttgaacattctgtaacctctctttcgcgagtgttattctgtgatctttagcgaagtatatttcagagtatttaaagatctagctgacagccagtactttggattctcaataatttgtattaagagatggaatctcgctctggacacccaggactgtgagtgcaatggaaacgatctggtctcattgtaacctctgtattacggtgacaagtggt

SEQ ID NO: 617090 - DNA, 327 bp, Homo sapiens
cgtactacccaacacaggaaacccgtttctattaaaaatacaaaaattggccaggcacagcagctcatgccctatatctcagcaccttggcaggccaaggagggcggatcacgaggtcaggagttcaagaccagcctggccaacatggtgaggccctgtctctactaaaaatacaaaaattagccgggtgtggtggtgggtgcctgtggtcccagctactcgggaggctgacgcaggagaatcccttgaacccgggaggtggaggttgcagtgagctgagatcggccactgtactccagcctgtgcgacagagcgagactctgtctc

SEQ ID NO: 617091 - DNA, 356 bp, Homo sapiens
gaatgagggaagaaaaaaatctttttcttctagaaggctgaccctgattatgtatccccctagtacagcattactgaaatacataggcttatatacaatgcttctttcctgtatatactcttgtctagagattcagtgcgtgtgcagtctggtgtggacgaagttgttgcgcaacaacttcgtccattaggattatctcggactcacggacgtaattgacatacggccgatgtgcatgctacaacgaccgatggcaccaaacagggagttaactcagatgtggacgaacttgttgctggacactcggcgttgttgacacaagctcgaatgaccacaccctgtcaccagtgctctcc

SEQ ID NO: 617092 - DNA, 1160 bp, Homo sapiens
ggagttgggaagagaaactgatgcttttgtatgccgccctaatgcagcactgtgccgggtgtactatgaggctgatacaacataagacgaaataaacgctctgtacagggaatggggtttcatcatttgtggggtgttagtatatagagtagctttatattgctcttaggtctggagttggccatgtacctatgtatcctaagcattcacggcagtagagctcctttactaacattcatgtaatggcaacgagttgtcctctacatttggaaagctaatcctaccttgtcagtttcaaccaactgagtcatcactcttacgaacaggtaacatccggtcagctagtttactatgttccttgactatacaacaggttataatactaccctgttcactttactaaatataagtacagtaatgatgcataattagaaactgaggtatctaaggtagaatgtactgtttgccttgacatgtagttaacaacgtcactgatgtacctcgctggcgtttaaacagaatactattatactatgaatcaggggcatttctcagaattaggtcacaaattcctatagcaactggcctcacattcgaatacctaagaacaccaagacaggttacagccggggtcaccgcacaccaacaatcatggttaacccaagaattgagggtgccacaaggcggcccttgggaacagccagatcgactcggcgcggacagcgtctgcgcccggacgacttacgccaaagcacggaaaacgcgggcgccatttggaaaacacgggggctcccccacaaggagttcatgcaaatgcaaaaacgccgacacttaaaacagaaacacctcgggccaaacaacgagcccccataggggcgagcactgtgccacacagagagagttaagcacacacagacgcctcgtgcgcagaacccatcacagacgcgcgatccgctaacgatgccagcagaccagatacgcagcgatcggtctcgcccgtaaacacagaggagtgtggccagccgaacagccgccgaacaaaccacgtctgaggccgtcgcaccccccctgcagcgtgcgtcgttctgcgacgttattttgcacagaaggaggagtaggaataccacagccggcgcagcacgacgcacagccgagcacgt

SEQ ID NO: 617093 - DNA, 249 bp, Homo sapiens
catactaaatactgacttcgcagcgtcttcaatttgtctgtactatgcacatgtagtctacaaacagccgctcgagggcgattggtattcgtcccactgcttgatttgcacttcaagtttggagttggactgctccagggtccgcatcttttctaggtagctccccagacgagcactcagggagtgctcgatctgcggcaatcataaatcggaggctatatggaaaatgactagttcccctaataatcg

SEQ ID NO: 617094 - DNA, 566 bp, Homo sapiens
  misc_feature (419)..(419): n is a, c, g, or t
tggcagattgcagaggtatactacatttttatgcactgtgcattcacattctatgatactgcaagctttgctggccaagctcaccaacgaacgttgaattgaccaaacatgtactaagtgcatgctgcagacataacggagactgaattttggagatctttgcttcccaaagaatcccctgaaaaaaaaaattttttttttacttctactaagtagcccagttttccaatcacatgaattttctggaatatttttggagagaagcagatttattgaggagctgctctttgttaccccatatatagacaaagttaaatatattctctgaattaaatcatcagagtatgaaggtaagatttagtcaagaagatacatttgttggactatggggccatctgtgtgcaacagagacctaaagntcaatggctaagcagtatcgaagttatctatcttcatgacatgtgagagtttgcattcaagactagtatggcgggcccatgagtcaaggactgcaggtatctgccattctattgctcattatctttacgcgaagggccttacctgcg

SEQ ID NO: 617095 - DNA, 279 bp, Homo sapiens
cgtcagaggttccggtgttaggcatacaaatcaaaatcacagtatcacctcacctctgttagaatggctattctaaaaaagtcaagttgattgttagcaaggatgtggagaaaaatgaacccttgcaccattgttggtgagaggttaattggtacagccattgtgaaaaacagtatggaggctcctcaaaaaactaaaaatagaactaccatgtgatgcaccaatctgacttcggggtatatatccacagaaattaaaatcagtatatcaaaaggaaat

SEQ ID NO: 617096 - DNA, 189 bp, Homo sapiens
attgtgaatccatgatgcccaacaaaggtcaggaagattggctgagctcgtgagataccatgaacaccaaccctgtgggtggactatatggagtactgccctgatcccatggacttatgctgctgaattcacagttggtctgagcagtccgtgacctcctacacgagcccaagttctgtttaccaatgc

SEQ ID NO: 617097 - DNA, 232 bp, Homo sapiens
ttcagggcttcctaccagagaatctgcgcgatagccatcagcaatctctgtctctgtagctgagaaacagaacagttcttatctggcattttgtacctgaaatgggtgcaaaatggatcagtgtctagatttcaggctcacctctgcactggtgcattgcccctatactcacttttgttcagggactgagttggtcatctcaagggagcacatgggatgtctacttatccat

SEQ ID NO: 617098 - DNA, 1183 bp, Homo sapiens
  misc_feature (327)..(327): n is a, c, g, or t
  misc_feature (357)..(357): n is a, c, g, or t
  misc_feature (363)..(363): n is a, c, g, or t
ctggtacccttcctctgacaccacccagcaaggatggaagtaccgtcagttctgttagtttttcagtctggtcaccggggaggtggttctggtaatctgtggtggtgccgggacaggcgccccgagttcccactgcccccgggcggcctgcacagagctgctgccctccagagactgtgaatcccaagcctgactcagtggactgcttcctgttcccctccctcctcttcctcaccttgttctgcaccctcaagcctttctccaatgcctcccaggaggatttggggactttctccctggggcgcccagatccagctcggaggcctnactgggacctggcaaggcctgacctcccgnccaaanttgcttctgtagctccccctcgaggaagtgaggtgtttaattttgcatgttttctggcatgaattaagacacttatacttgtatatatgagtgtacagtttgttctcacactgtcaccatagcgacaggtcctggctcccagtggttcatcctgcctgcccctctctcctcgccccgcccctgcacccaccccgcttcagggaggcccaagttccgtggccccacacgcttccaggctcagctcccacctccacccaacagatagatggggtttgctttttcatttcacatggggctcctccgctcctgccttctcggatgggccaacagtcgtaagaaagccctctctgcccgttctgttcacctctccacagcgcaccccgcccgccgctgctcctcattctttccaaacctcgaaaccaaccaaaacgtgagaagtatttttgtaccctgtgtaacaaaatatttatgcatcataaaggatttttcatgtgcgtaccattaattattaaagcgacctcgttcgccctgtcagataagtttaatgtttagtttgaggcatgaagaagaaaagggtttccattcttcagcagtacgcctttgtgtctggcatttgtttaagaaaatgaaatgaaggaaacactgtgcaatgttttttgttttgagcatatcagtgctttactgtcagccgcagctgtgaccgtctggccatttcagacttgggagatgaggcggctgttgtcattgctgatcctgtgagaatgtgaaactggataatatatgaaatgcaaaataaaacaaaaccaaaatgaaaaaaaaa

SEQ ID NO: 617099 - DNA, 113 bp, Homo sapiens
tgtctgtccatccagccctggccctcagcccatgatggttccggcagcaataaggggtatggggtaagggtgcacaaaatcaaatggttagtgtgtgtctggtcgaggctttg

SEQ ID NO: 617100 - DNA, 1155 bp, Homo sapiens
  misc_feature (327)..(327): n is a, c, g, or t
  misc_feature (357)..(357): n is a, c, g, or t
  misc_feature (363)..(363): n is a, c, g, or t
ctggtacccttcctctgacaccacccagcaaggatggaagtaccgtcagttctgttagtttttcagtctggtcaccggggaggtggttctggtaatctgtggtggtgccgggacaggcgccccgagttcccactgcccccgggcggcctgcacagagctgctgccctccagagactgtgaatcccaagcctgactcagtggactgcttcctgttcccctccctcctcttcctcaccttgttctgcaccctcaagcctttctccaatgcctcccaggaggatttggggactttctccctggggcgcccagatccagctcggaggcctnactgggacctggcaaggcctgacctcccgnccaaanttgcttctgtagctccccctcgaggaagtgaggtgtttaattttgcatgttttctggcatgaattaagacacttatacttgtatatatgagtgtacagtttgttctcacactgtcaccatagcgacaggtcctggctcccagtggttcatcctgcctgcccctctctcctcgccccgcccctgcacccaccccgcttcagggaggcccaagttccgtggccccacacgcttccaggctcagctcccacctccacccaacagatagatggggtttgctttttcatttcacatggggctcctccgctcctgccttctcggatgggccaacagtcgtaagaaagccctctctgcccgttctgttcacctctccacagcgcaccccgcccgccgctgctcctcattctttccaaacctcgaaaccaaccaaaacgtgagaagtatttttgtaccctgtgtaacaaaatatttatgcatcataaaggatttttcatgtgcgtaccattaattattaaagcgacctcgttcgccctgtcagataagtttaatgtttagtttgaggcatgaagaagaaaagggtttccattcttcagcagtacgcctttgtgtctggcatttgtttcaatgttttttgttttgagcatatcagtgctttactgtcagccgcagctgtgaccgtctggccatttcagacttgggagatgaggcggctgttgtcattgctgatcctgtgagaatgtgaaactggataatatatgaaatgcaaaataaaacaaaaccaaaatgaaaaaaaaa

SEQ ID NO: 617101 - DNA, 278 bp, Homo sapiens
tcctgtatagtgctcaacgggcagaagacggtgcgcgtcccgaagacggggaatcggagaagtttgctgctgccgggtcgcctcgcgacgctgagagaatcgcccagtcctccgaagaccgcccatttatgaatcgcagctgcggccccgcatcgggcggttagtcctctgaggtgacacgccgagccggtagtgcctttccgagctaggaatgtgccgtgaactccaaagtttggactacgtcacaccggaattcccagcccggcgccgggtaccga

SEQ ID NO: 617102 - DNA, 308 bp, Homo sapiens
tgggaacggactctcctttgtcactccagcctaggccacaaatcgaaactccatctcaaaaaagtaaataaattaaaaaataacacatttctctgcacacaccctttgcacactcgtggtttcctccgtgcattgagacccgtggttaaactcagccttctcctctctgccgtgcctgacacccaacacaggcttgagtgaggctaaaaaacaacacagcccccttgccaggttatttccaattctgtaaacttgaccctcaggcggaccccaatgctgccgtggaaccatatgactattctctgata

SEQ ID NO: 617103 - DNA, 189 bp, Homo sapiens
  misc_feature (12)..(12): n is a, c, g, or t
  misc_feature (184)..(184): n is a, c, g, or t
gatctggttgtntagaagcatgcagcacctcctgcttcactctctctgtctctcctgctccaccatggccagaaacgtgcctgcttccccttcgccttctgccgtgattgtaagtttcttgagggctccccagccatgcttcctgtacagcctgcaaaactgtgagtcaattaaacctcttttnttcat

SEQ ID NO: 617104 - DNA, 1150 bp, Homo sapiens
  misc_feature (3)..(3): n is a, c, g, or t
  misc_feature (9)..(10): n is a, c, g, or t
  misc_feature (17)..(17): n is a, c, g, or t
  misc_feature (21)..(21): n is a, c, g, or t
  misc_feature (40)..(41): n is a, c, g, or t
  misc_feature (44)..(44): n is a, c, g, or t
  misc_feature (895)..(895): n is a, c, g, or t
  misc_feature (1049)..(1049): n is a, c, g, or t
  misc_feature (1051)..(1051): n is a, c, g, or t
  misc_feature (1072)..(1072): n is a, c, g, or t
  misc_feature (1076)..(1076): n is a, c, g, or t
  misc_feature (1102)..(1102): n is a, c, g, or t
  misc_feature (1136)..(1136): n is a, c, g, or t
ttnaagggnnaaccttngganaggccgcggcccattttgnnatngatgttactccctgggtaatgtctgggcccatctatggagcactgtgagttcgacgttgatcgctctcagtgatacacgcaggcagcttggcggagatgtgtgtcaagggaggaaccggacgctgcagcgcataccggcccgcgatctcatcggtatgaagcgatgagcacacagatggctcaagatagcatgatctcacagtcatgcctttgtgatacggtgcagctcacgttgtgtccactgctgtttgagggcgtaatataaccctagttgttgatccaaccctagggcactttacagtagggtgtgcagcgatacccgatagatgccatagaacacaacatgagtttaaagttctcacttgtgtggatattaaaggcatataaggcaggccctcgacgacaacagaggagcgcaaaacgagaggtacaagtgatgaaataataaacatatatttaggtattggctaccaagtgtttcaattcaactatcaacccaagttcttgatgcagtagttttaattatattgatacattatcttgtgctgtcatcgtatctgctctcgtagttcttgtttctgtctccttcaccgtgctccgcatatctatgtaatacctacatcttactgcacagcgagaccacttgactctgcactctttctcgcgattctataactgtaattatatataagatctgtacagtcattgtcttgtaggcatactcagtgagtgtgatatgtgtaggactttcatcgagatcatacaataagtgctgtgcagaagaagattgcgtctgatttatacattgtcaacacgcgcgagactagcgtctcaaccagcagatccgatgncgacgtgagagacagagcgaacgcattatgtcacaccacgtgtaaacattatatcgtctgttaataagagataataatctccactcatgcacgcatattacatgtaagtattgcccataatgtgcgttattcacatactgtagtgctgattgtntnctatatctgtgatgtgtggtnattngctgatactctagcttgcaattcttnactactactgtgtctcgtacgcataatttctcantgtatcttatcgcg

SEQ ID NO: 617105 - DNA, 291 bp, Homo sapiens
attatcctaaaacccccccccccctttttaaaaagggggagaaaaagggtttcaaaacggtttgtttcaatgggccctttaagtttagaaataaaaaccgggttaataaaaacaatgcctggtaaaaccttcaaaaaaaaaagaaaaagttttggggccccccttggtttttttttttggggggggcaggtttaaggtattagtttttaaaaacaggcctttttaaggggaaaaattggcccaaaaatttgtccaaaaatttttgggccccttaaaaaagtttattgggga

SEQ ID NO: 617106 - DNA, 1122 bp, Homo sapiens
ccgcaaaccttcgtgcccggcccgtcctcgcccccgcctccgacaccgccatcgagcgcgcagagcttgccccctccgcacaccacgcagacatagtcccgacgtccaagagcggccccgccgtatgctatcagataacaatcagcacgatacatgcggcgccctacggaccgaccatggctacttcaggcgccctggagcgctgcactatggacacagccaagcagcgcgtacgggccatctgcgcgcccatgctctagtccatgctggccgtgagcagcatcatgcaagtcccatcatacccaaggtggtccatggactggccatccatcgcccatctacggacctgcgtgcgtggcagatccatccatcgaccacaatcccgtgaatgacgaccatcagccatctacacagagcttccatccagacatggcgcagccggacctgcaccgctggcgcacatggcagacggcgcctgcgaccacacacgcgcccttcggccgcatacgagccaatcgatagggggcacgcatggacgctgcagggcgccacccgccacaggcaagcccccccgaacctaatatcgcaggcagccagtgcaatcccgtgaatctcgtcactcgatctcggccccgaagggtgcaatcagagcccgtcctaaagagctacgtcacttcggctccgcccccgtaaactcccggtccgtcccgaccggccgcggctacgcacgccccgatgcgtccgcgggagcgccccccgagcccccggcacccagaaaggaagagtcgtacacccgcggatcgcgcgggaaccccggcgcccccgaaccgcggccacacacgagccgcacggacacgccggcacagcagcaggacaatatcgacccacgcacaataaaccccgcgcagaccacagggggacgatgaaacccaagcaccaagcacagcacaccacaagaaagaaacagaggagttagaggcgcaccccataacggacgaaccgacacgtaaggaccgcgcgatacgcgaagggtacgccacgataccggcgataggcgccgcacgacatgcgcgggccacgcaccggaacgaacagccgcacagggagaccacaccagcacgg

SEQ ID NO: 617107 - DNA, 135 bp, Homo sapiens
ccccctcgggtaaccaatcacttcaaaattacttttcatgtctgtaatccatctaacctccattttagtctttattctctcagtcctatatatatcatctttatgtttatatctatactagtatcgctacacatt

SEQ ID NO: 617108 - DNA, 194 bp, Homo sapiens
agcttgtctaataggctatacgaaccaaagagtgtatcaaatggaagtggtcatcaggcataattggttccctgtggacctcgtgcaccgactgtccatgctctgtggggacttacacattcaagtttgacagttgaaaaaccaactggagctgcttttccaagaatgttctgttgtccttcaaatagaattcc

SEQ ID NO: 617109 - DNA, 103 bp, Homo sapiens
cggaatgtggtgggtactgggctgaggagatcccaggcgaccgaactccgctcaaatccagtaccaccagagtaaccacccttctgcccctgatcccagctcg

SEQ ID NO: 617110 - DNA, 524 bp, Homo sapiens
atcccctgtctcaccacctcagagtcatcattcaggcggtgcagtgctccaactgtatctcagcactgtgggaggcgaggcggtggatcacttgagtcaggagttcgagacagcctggcacatgtgaacctgtctctactaaaaagtacaggtagcactgtagtcccagctacttgggaggctgagacaggagaattgcttgaacccgggaggcagagttgcagtgagccgagatcacgctactgcactccagcctgggcgacagatcaagactccgtctcaaaaaacaataaaagtcaccattcagcctgaccaaggagggggccaggaaagaagtcggaaccgtggccttcgctgcttcagaaggggaggcccgtgctctgacttcagcttgattcactttggcctcagtcctcagttcccagggggtaacggcgttctgaggttgtcacctggtgcaagaccagctgtccccagggacacatctggatctcttggtgccaacaacggcaactccagagggg

SEQ ID NO: 617111 - DNA, 663 bp, Homo sapiens
tagcgtgtgccgggcaccaagttaagagcccagtaaatgttggctgttaaaaaaaaaaaaaaaaaaaaaaaaaaaaaaaaaaaaaaaaaaaaaaaaaaaaaaaaaaaaaaaaaaaaaaaaaaaaaaaaaaaaaaaagaaaaaaaaaaaaaggggggacgccccggccgctactgcaataaaaaaagcaaccaacagtagggggggataaacagaggggcatgcccaccccccaccacgcggccgggcaacaaacacagacggccccgtggtcgcaccaacccacaacacaccagcttagcggcgaacactcatcgccgacccacccgccgcaacgtaagcgccggggcgctgcagcgcccagactcctgcaacgccgccgccccacaaagcacaatactatgcggggacggcgatcaagcgccgaaccgggaagccagtccaaacgccgccccaacaagacaaccgacacaccacgagacgacacagatcgcaaaacaccatagcagcacaggcagagaacacgacacaagagcaacaacaccagtcgacctaaccaggagagacaaaaccaaccgcgcggggtctaccacaaacaaaaaaccacacaacactacacgcacaacaaacacgagaacacactcacgccacacaaccacaccacc

SEQ ID NO: 617112 - DNA, 321 bp, Homo sapiens
ggaaaaataccagcattaagctattgatgatacaagaagtgtccaggtgccgttgtcacgcctataatcccagcactttgggaggccaaggcgggtggatcacctgaggccaggagttcgagactagcctggccaacatggcaaaaccccatctctactaaaaatacaaaaaattagctgggcatggtggcatgcacctgtaaccccagctactcgggtgactgaggcatacgaatcgcttaaacccgggaggcggagctgcagtgagccgagatcatgctgctgcactccagcctcagtggcagagcgagaccctgtctc

SEQ ID NO: 617113 - DNA, 934 bp, Homo sapiens
gcacactagacatggcgcttgccagcgtgttggatgagaccgctaccggtgaaccatgcgcgggtttttcggacttgggggttgtgcagatctgctggatctaggtccaggagtctcagtgatggtctgagcctggtcgcgccaggttggggtgtcccagaagagccaggaatcgaaatgcttcatggaacaaccaccctgtgaccttccaacgttccgccatggatgtcataagttgcatgctgactcctagggagtacaggcgggtgcttacatgtgcctcccagacggtgaagacagtgtgatagagatcaacccatacctgctaggctccatgtgctgggggctgcatgggattgctggcttcttggtgaacggctgttggttcggcaaatgtcagaatctatgagcttcgaaataaggaacgcatctctgtagcaggtgcctccaaactgacttgccagccatgttgtatcagtacaaaaggcatggggctgtccatgggcaccatgatctgtggctggataagagaggccctggctctattacgtggaacacgtgaaagcgaaccgcatttcatggccaccttctctgtagggttctggctctgtgtatgccatttggggtcatgcatcggggctattcctaatgaacttgaggttggagcagcctatgaatctggccggcgagcctcttaccaagcactacagagatgcctaaacagaggtgcatcacctttacagtgcggaagatgctgaaccgggcccgcgaaagttgtgtctaatgaagtatggcccccccgaaagggggcgcgtgtgtttgggagagacggaagacaagaccaccacatttggggggcggaacattcgcgatacatgccaaggaggattaagttcacaaaaaagtgctgcttcgttttctcttgctttctggt

SEQ ID NO: 617114 - DNA, 999 bp, Homo sapiens
  misc_feature (783)..(783): n is a, c, g, or t
gctcattaagcatcatagaaatcactacaggagagaaaacctatgagatgcacgcgattgatgcaaaggatgcttgtactttgagaaggtcacagactagacttataacacctcagaaggaattcataacatgagagcagagacgcatgactaaatgtaggtgaatgtggagaaatcgtatgtgcacaatgaaacgtcaacagccctctatggagagtccgatcacgaagcgcattcatacgaggacatgaaactactagtgggatgcacatgacgtgtgggaccacctttcaatgcagggaaaggtcagcacgcctcatatgagtagccattcatgacgaacaggtcctactagatagtagacacaagtcattgaccctttcgtgctgaactgccaggagacaagggggtgcgtactcgaagctgctcgaaataacctttttcttggagcagctctcttcgaccgccgtatgcaggtggtgcgtgatgcagtataaaccgcctcaatttggagaggtagcctgaacctggttggaagagagagcgtgtggacactctgcagagcagctctgaagcagatcacctcaaccccagtcaagtggctatcagagagcagcaaggtggttcctatagatcaagtctcagacgatgctggtgattccatgaggggtcctgcgtcctcggacatggcgactcggaaacgtccccgtatatatcattttgcttcgtgattggaagcttcgagtttagacagtgtgggacgttagaaatcttggttatctnagaaaggcgttggctgaatgagcgttacagcgaaccaaggggctggtgttcacagtttgcgaagagaaggtcccaggttggtaattcccagagattccgtcacactggcaactgactcccataccggcgggggaacccgtaaactatggacgaagccagccgggaacaacagcagaggccaacatgctgggggaatacttcggccccgaaaaaggg

SEQ ID NO: 617115 - DNA, 368 bp, Homo sapiens
  misc_feature (14)..(14): n is a, c, g, or t
  misc_feature (66)..(66): n is a, c, g, or t
  misc_feature (92)..(92): n is a, c, g, or t
  misc_feature (95)..(95): n is a, c, g, or t
  misc_feature (100)..(100): n is a, c, g, or t
  misc_feature (140)..(140): n is a, c, g, or t
  misc_feature (178)..(178): n is a, c, g, or t
  misc_feature (183)..(183): n is a, c, g, or t
  misc_feature (276)..(276): n is a, c, g, or t
atgggaaacttatncttccttccaagtctgccatattggtgcgatgagctaaaagtggaacgaaanacacaaggaagatgcttcccactccnagnacctncccccaagctccgaccccacattgtggatgcaaagaaaantaatttgcccaaaacccactgcccaggggccccttccnttttngggaaattcatttctctctggatacccaaaagctggagcaggggccaattactcttgtctggacaatacttttattttgtaggagtggaggtngcctctgggcagaaggcagggaagacacccccgggtctgcttcagttgcaggcaaggtatttagctggggaaaaagaaattctctccaggac

SEQ ID NO: 617116 - DNA, 524 bp, Homo sapiens
aagtgtgatgtcgaacctgaccatagcgagttaatgtgtccatctccccaacatgtcctaaaaagcacctggttttggcatggacctaacaaatacccaatgctagcagtgtcacacgacggcagtccatccagggtgggtgccagtgtcataaaggttaggaacagctatccgcaagttactcctggccccacccagcaggaagttggggtccccccacaggctatgagctctatgggcccttgcatgtgacatagctcataagccctctcatccatattgtaatagttgagtacacccaattggcacccgctggcagcaaggggcacaacctggtgatggtgccaataaaactgggcccctctccaactactcacttcccttctcacagccccagccttgttacaccattggagcaatctggttgtccggatcacgggatcaatcctgtccggctttgaacaaaggtggttagtttcctaaaaaacccattgtgtctcagtattcaaaaaacattacaaaca

SEQ ID NO: 617117 - DNA, 236 bp, Homo sapiens
taaaatgctaggtttgtaaaggcttacttacccttaatggaaaccctggaattctgcgggggagggaaaggggaactgttatctcccaaaattacccttcattttaaaaaatttattgtccttgtgatttttttttttcctctgtgttccactacatttgtggtgctgcccattgttactctcttgttggcactcttacaattaaacattgtgtttgtggacaaattaaacacagc

SEQ ID NO: 617118 - DNA, 337 bp, Homo sapiens
atcgaaatacacatgtcaacgtcatatacatgtacattaactctacagtttctaaactttagaatacataatataccatataactagtcacctctcaaaatcacattgtcccaccacaatcaaaccaatacctacatataccacaaatctcagtacaatgcaattacctcctagctaggcctaatagcttacactccctcatgcacatacatttctcaaagggctagcaggttagctgggctcccaacccacctctacattccccaaacaacaacctctcaccccctcacctcccatacaggacagctcctaatacacaaacccaaacacaaaatac

SEQ ID NO: 617119 - DNA, 208 bp, Homo sapiens
tttcactgtgtagccaggatgctctcgatttcctgacctcatgatctgcccgcctcggcctcccaaagtgctgggattacaggcgtgaaccaccgtgcccagccttttctttttgagatgtaatttcactgggtgatgcccaagcgtggagtgcagtggtgtgatctcgactcactgaaacctccgcctcccaggttcaagccatttt

SEQ ID NO: 617120 - DNA, 292 bp, Homo sapiens
  misc_feature (144)..(144): n is a, c, g, or t
  misc_feature (178)..(178): n is a, c, g, or t
  misc_feature (199)..(199): n is a, c, g, or t
gcacttcctctgtaatatttggggtcatctctatcatcatcatagtcttctaagaattcttttagtcgcttagcttcattggccatttctattcctctttcttcttctctttcagcttctttctcatattcctgggttgtcttncgttctctgatttcccaattcttaggcgctcttnataagcagcttctttctctcngagttttctttcaagttttcttcgttcgtatgcatcttcatcatcttcttcacggtcccgtttttttgtctttttctctttctcgctcccgtt

SEQ ID NO: 617121 - DNA, 190 bp, Homo sapiens
tcacagccagtgtctgattatcagatacaagcttcagacatttcttttcgaaggcttattccagtttcgtgaggctagcatgaggctgtgtgcattctgccaggggcgaatttctagttctcaattatacccatgcagctagatgcatacgtcatctgccgatgtccgctgtcattgggtaccgatgctc

SEQ ID NO: 617122 - DNA, 310 bp, Homo sapiens
ctcgctatgtcttgctaattcaactacaagtatacatttatgaatctgatcacattttccagcgtaagctcaaaaccttatagtatctatccagggtcaatcgcagcatagaagtaggagcaagtctggtaagtacgaacaatcttgcaggcaatatatgaatctagtcgttaatgtgttcattacaaatgagaactagaaactagaatttacttccaaaactaaggcaaagaaaacttccaaagctaaatgaaggtaagccactataaagcttatttctgtcatgcacattatgaagctactcactggg

SEQ ID NO: 617123 - DNA, 115 bp, Homo sapiens
gccgtagtccctctcacgttttcgataggtcacttcggggtttcttctttctccttccacctaaataggatctggctgcaggctggagtggcatccggtggtgtgaagaatcagg

SEQ ID NO: 617124 - DNA, 192 bp, Homo sapiens
gtaggctaatgtaaatgttctaagcacatttaaggtagactaggctaagctatgatgttcagtagggtaggtgtattgaatgcattttcaacttacaatatctacaacctacaatgagtttattgggacataacgccattgtatgtcaagacgcatctgtataattaaaaaatttggagataaaaaaaaaaa

SEQ ID NO: 617125 - DNA, 123 bp, Homo sapiens
cctcacaccgagctctgccacgctggcctgccacccctgaaagctggccctggtccccgccctcggtctccacgtgtgtatggatctgtggtcattgtccctctgcagaataaagattgctca

SEQ ID NO: 617126 - DNA, 405 bp, Homo sapiens
gggaggatcccatcggggcttggggaagatatacctttgtattattccccctgggcgtagtccgttgtcttccacctgcttgtaaatcaatctctctctctctctctctccccctctctctccctctctctctccccatttcttttagagacaggctcttgctcttgcttgttgcccaggctggaatgcagtggtacaatcatagctcactacaatcctgaaatcctgggctcaagcaatcctctcacatcagcctctcaagtaactaggactacaggcaagcgccaccaagcatgacctggaatctcttttaaataggatagaatccttcctgaactggcaataatcttaacatgaaaatgcctagggtggtgatattgacctaaatctacaataggtatagac

SEQ ID NO: 617127 - DNA, 424 bp, Homo sapiens
ctttccatgaagctgtccctgacctctctatttaaaaccgcacttcctgccagggcgatggctagtgtctataatcccagttactctaggctgaggcggatttgcttgaggccaggaattcgagaccagcctgagcaacacagggagatctcatctctaaaattaaaaaataatccattgtggtgaatcacacctgtagtgctagcttctccagagactaagctgggaggatcaattgcacccaggagtttgaggctatgacagtgccaatacactccagcctggacagcatagggagaccttgtctttaaaaactaaaagtttacttcctatccccttctctggccttttcccataggaattagcaccctctgaaactgtattttacttgttcatttactgttccccctgccatctgtttagt

SEQ ID NO: 617128 - DNA, 426 bp, Homo sapiens
gggagtctgtgcttgctgtcggcaggggcttcagttcctcaccaagtggacctctgcttagggatgcctgagtgtcctcacatagcattcacatagagtgagtgatctcaaagagaggcagaagctgtaatgtcttttatgacctagcttcaaagtcacatgctgtcatttctgcaatgtcctattggtcatacacaagggtctccttggtgaggatctgaaaaggtctgccctatttggtgtgggaggggactgaacaagagcctggaaaccaggaggcaagaacccctggtggctgtcttgggtgctggctacctctggactgtttaatacctggcactgggaaaactacctcaccctatggaagacaaaaatgagctaaatcccttcacaatcatatttacaaaagtgagttccatttagatt

SEQ ID NO: 617129 - DNA, 382 bp, Homo sapiens
gattcgtgcgacggcagagacaccactgatagctcaagatgatttctgatgattttgcgagggagaatattatatatttcacaatatatcacaaaagagttgtgtaacactgtgaaagagagaggtgtgcgccacacttggagcacacagcccggaaccttgcaaagacaccgtgcaaatacacgatatcactgggaaagaatgtgaagacattggcaatatagggagcttaacagagcgggctttactttattaaacctctggaaggttaccaggaattcttaggctactgtgaaatcgaggggtctggaaaaggatggaccgggtgttgagacttgatggcagtgtggatttcaagacacaattttggctgtgtgaggtt

SEQ ID NO: 617130 - DNA, 348 bp, Homo sapiens
acacagttgaccatgagagcacagcgcatgaatactgcctcatagctcgagctgctggagctagtaactgtagagactaggcaagctgcctatttcagacagcgatctctagaatcaactcacaccatggcattgctgcacgaagaacctgtgatagcactgccaatgccaggagttggcccatcccatgtgagtggaggagaatgctattcttcactgacagaggatccactcgtaagacctgactatgatagtatggtcgacgagatatgccggaaggtggctggatcattggacggggctctacctgatccgagatggccatctgaggcattagatagccctctc

SEQ ID NO: 617131 - DNA, 213 bp, Homo sapiens
  misc_feature (213)..(213): n is a, c, g, or t
gtggtcgcagctaatctagaggtggtggggccaggctatgggagtggcaggaataataagactcgacctggataggtatggaaatggaatatggacgttccagagactataatggcagataccaggtgtggttatgaccgatactcaggaggaaattacagagacaattatgacacctgaattgagacatgcacatatatagatacacaaggn

SEQ ID NO: 617132 - DNA, 517 bp, Homo sapiens
tgtgtagtgtctagaggatccctgccataactgtgtgccaggaggaagggaggcgaatgctggggctgctggatgcttacttgaagacgaggacttttctggtgggcgagcgagtgacattggctgagcatcacaggttgtctgcacctctgtggtggctctataagcaggttctagagccttctttccgccaggcctttcccaataccaaccgctggatcctcacctgcattaagcagccccagttccgggctgtcgtgggcgaagctgaaactgtggtgagaagatggtccaggtttgttgctgataaagttggcatgagacccaaccgtaaaaggacacgccacggaagagagaagggttacaaggtgaagatggaagcagaatgccccaggctgagcgggaaggaggagaacaaaggcgggctgccccggctccatgaggaggagatggatgaatgtgagcaggcgctgggtgctgagcccaaggccaaggacccctgcgctcacctgcccaa

SEQ ID NO: 617133 - DNA, 1112 bp, Homo sapiens
gaggccaacgtcacgcgcggcgctctcgaattcggcgcggctcatggtccggttcgggtcctcgcgcaggtctccgctctggcgtgtctagtgcgcacggttcttagatgctcttgttgagataaatgactaggcttcttattcctctcccacggttcactcactgaggcttcatatcatctcagcatgcattgtcaatcgcttgtgtgcagacggtatccacatctgacatggtgaataggttctgcctaatagccctgcattgaagcgtttacttgatattgctacttggaatggcacgtgcataggaggtacccattcgaacgaaacaggtgaacgatgatttctcatgtgatacgcgtcgcactggagctaatctgcctgcggcggtgggcaatttgcgactagagtgcagggatctccagggcgactgcaacgatccgagtccaaagctgaggctgtctacagccttaccatgggctaagatgtgcttggcatgctgtcagatccgtatgattgatggactcgttggccacccgggtggaaggcactatagtgtacggaactctgtgtacgctgtgcaagggccagtcactaagtagagagagcgaagcaagaggcgacgcttgctggagagaccgtctagccagcactgttggacccaagcaagagcatattcggtctcaggaacattggcgccagtgtgggaccttgcaactcaggattccatcagtagttgaagagactcgtgacacaaagcccaaacgatcgtggacgatccccggtgtcggcccattttcatgaacggttggaatccctctgcctttcgaccaggtatcccactctgtccacttctccacctccggggtctccccactggagcaaggcccacattcccgatagcatctaggcttacggggcaccgcaacatcgcaccttgctccacatctcgagacgatagcatacagcgggtccccacccaacttcgcaaccatgcggcgctcccggccgcccatcttgcgcactccttacacgcccgagtataccctctcgtacacacccactcgcgcaaaacagcactccccctcgagcaacacactcaccccgaattc

SEQ ID NO: 617134 - DNA, 122 bp, Homo sapiens
tctcttgtctcaaaacttccagcagtctacatctcacccagaggataaacaatgtcaatacaaaaactctaagtgcccttgaagacctggcccctttacctttctgatgggacgaagatgcg

SEQ ID NO: 617135 - DNA, 1450 bp, Homo sapiens
  misc_feature (1384)..(1384): n is a, c, g, or t
ggcttggccaagccctgctctgctggactgcgggctggcggcgctcacccagctcctcacccgtcccgcatcttcctgtttttcttccctttctggttgggcagcaagagttgagaggaggcagatggcttccatcccagaaatcgctctcctctttccatccctacagagagggacagagaggcaaagttccttgcatccccggggcgctgtccctgtgagctcccggtgtcctgcaaacgttggcccctgaatcaccgggccagtgtgtgtgggatggggctgcgtagccaggctggcctcctggggttcactttcggctttcctaccccaactcttcctgtgtggctttgctggccttccactggggaggcatgtgggtttggagggcagatgagggcccgctggagaactgtacccctcagtgagggccgccaccttgatggtttttaatggataatggggttgacctctttgttccttccacatgtttttatgtttgaccatttgctcagctgagcttgtcttaataattggattcatggttaatgagccccacatgggagagagggcggtcttcattctgaacccatttaggcagcatgggcagccctcctcgccgtgggcggcatcagagcccccctgcccagtcttggggttgctcctggatgctgtctgggaggcttgctcatggtggacatcctcatctccccgtgcacgttaccgcattcagagcttgggtcacctggacactgaactcaggtgaattttctctgagatcccgggagaaggaggacagttctttggaaggttttccagggccgatcacggaaaggatgagaagggagaggtcctggtcggggacacaattacggtggcagtgtaacgccgggaaactttattgcatgaagtccctctcactccctctacctccctcttttacgtggactctgccaaagaccaggataccagaatgcagtggagtgaccaagtgtagtgggaccttgggaacccgagtctggagccaggcggctggggtttgcatcctggttctgcccctccttagctggctgacatggcacaagccacttaccctctctgagccttactgtcttcagtggcaaatggatctgtcaacaggccccattgcctggggttgttactgctgagattaagggaagctcgtccatagaagcacttagcgttgtgcctggcacatagtgtatggtggataaatgggacttaggactaaaactcatgccttggtgtgtttttgcagtgatgttttgttctggggtgcatcacaagagacaaggttcttggctgggcatggtggctcaagccaataatcccagcactttgagaggccgaaaggggaggatcncttgagcccaggagtttaagaccagcctgggcaacatggtgaagcctcatatctaccaaaaaaaaa

SEQ ID NO: 617136 - DNA, 101 bp, Homo sapiens
tatagaggatcccgacatgacccaagcatgtatgcttgctcgtcgacgtgtatacaccactgcggtgattgcctccctgtacaagttccgtcgagacgtga

SEQ ID NO: 617137 - DNA, 351 bp, Homo sapiens
  misc_feature (337)..(338): n is a, c, g, or t
gctacatctgaaaaagtaccttttcagaatctacaaagttgtgtagcaattcctgctctgtacacatctcttccttttagctctgaatcctgttaatgcaaggaagtaaccaagttttccttggcactcgtggccaagaacataacctccatcccacagtcagggcaacaggtccgtattgcaggtttcctggccatagtcaaaatagacagctttgtctgtacgccaactcgtaaattcgcccagtggatctcgagacgacgcaactcgcctagtagataaaaaggcaaaaaaaagaggcgggagggaagttaagacatatttgtttaaaaaacannagcaaattcacac

SEQ ID NO: 617138 - DNA, 380 bp, Homo sapiens
ctttttccaaattttagtgaagggtgaatattttttgtccatggctttctcaaaaagaatgaaacttttgcccccttttcagagtttttatagagatgcccaattgatatatttacctgtaatgggaacctgaaaaagttttattaaaccattgttcatagctgtggaggcattttaattccgtttcccaagctctccaaaaatcgtattttttaagtacggagttattcggtttggggggtggcttacagttcccacgactccattgtcccgatactcagttctttttacagggatcaggttcgtgtttaaccctgtatgttaactatgactggaattttgtgatattttggtaataaattaagtggggtcctttcgga

SEQ ID NO: 617139 - DNA, 1255 bp, Homo sapiens
cgtgacgcgtgggcggacgcggtgggtcgaaccacgcgtccgtttcgtcttagcagcgtaggccgagtcggtcagcgcctgtaggacctcagcggccatgtcgaagtccctagtagatgaagccgggagtggcttcattcagatgcctagctaggctgcacgcgaggcatggttgagacatgtcctgtggcacctgtgccgcctggacattgattcaccaaccatcacagcccgtgcaacactggtgatcatcgtgtagccatcgggccagcttcccgtatcaggtggcagacgttgaaggagtatgatgacacgtctggaacatgcatgtggctcgtcgtggacttctctcatgtgaaagctcatgcagtaaccatggggagacgcatacaagaatgttgcgcacaggcacggaaagaggctacgctgtctgaaccccgatcctactaccggtcccgtaggtgtgtggactctagaagcactacacagggagcctgagactccagaatctggcgttcgtccagggtgcggcgggaccctggcagcacggtgggtagctgaccgacacgggagccaatctcgaacatgtcaccgctggactaacaccgcctagaattgggagcaagtagctgatcgcgcaaacaattccctagagaggtaggacctaacgaagcaaccgtactcgcaaccgcgataggatcggcaaactccacgcccgcctacgattcgaacaagctggcatatgctcgctggtataaacacatcaccaagagtcaaaccctacaacagaatcgacaacgtctcccctggattcgcctggggaggagtcgaacacactagacatggccaccctaaggatcctaggcaagaaatcgggggaaggacagcattcgcgagttccatcgtagctagcactcgcctaggagtacagagtggcacacaacatccccctcagcaccagggtgacgcggaacacacaagaaagtaaacaacaagagaagcagaaagaacctcgagaaagctacaggttccagagtccttaaccctcccacaccacagtcaccactccactctcctttcacacccaacatacaccccgatcccctaaactactataatcaatataacctcagcacaccctaccacttatcacatcaacccatcacttgaatcgatcttccacctaacccaacacaaccaaccaccccacatacatacatcaataaaacaacaatactacaaatatccacaccat

SEQ ID NO: 617140 - DNA, 479 bp, Homo sapiens
atcctgggaacaagcatccaagagtaacggaactttctgagctggcaaaggcttaaacatctgcctgggttccagcaggcaacctgcccgtctgtacaaaaaactcaaagggctgagatgaacgtctttcctctcctgcctcccatgagacagtctcctaggaattcttggggaagtttggctggaagcttgccaactgtaagttggagaaacacacacctgacactatccacagatatagtcaagtagatttggatagagaatactatttccaaagtagtgtttagctcatctagggggatgtgtttatatatacatttgcatatacccacgggggattatgagctaattttttttataggacacagaattctattcaatgctgttaaatatgcaaatagtttaatctttttttcttttgttgtttgatgggaaattgtgacattccaagttgacttttttttattatctgaattaaa

SEQ ID NO: 617141 - DNA, 411 bp, Homo sapiens
ttcatcccaatacacaggaaacatggataaggaagttggcagaagtccaactgtttcccaatcagtcaaaggcagcaagcagacagacgccaggtatttgaaaggtcttctacacagaggatatacaactgtaagttggagaaacacacacctgacactatccacagatatagtcaagtagatttggatagagaatactatttccaaagtagtgtttagctcatctagggggatgtgtttatatatacatttgcatatacccacgggggattatgagctaattttttttataggacacagaattctattcaatgctgttaaatatgcaaatagtttaatctttttttcttttgttgtttgatgggaaattgtgacattccaagttgacttttttttattatctgaattaaa

SEQ ID NO: 617142 - DNA, 226 bp, Homo sapiens
gctcggccggttaagcggtctcacaccctataacgcctgccatacccaaaaacaaagcagagtgtataaatacaataagcctaacttacactaaacaacatttaacaacacaaaccaccatatcttataaaacacttacttaaatacgtgctacgaaagcaggcacctacccccctagatttttacgccaatctaccataaataaataagacgagaagaccctatg

SEQ ID NO: 617143 - DNA, 357 bp, Homo sapiens
  misc_feature (329)..(329): n is a, c, g, or t
  misc_feature (337)..(337): n is a, c, g, or t
gattaatacttctactatgcatatgtaataaatatccttattcttgggaaatacatgctgaaggatttaagggaaaaggtcgtaatatatgcaactgaatctaaaatgatccagaaaaaaataatatgtaaataatcagagacagaataagacaaatagagcaaaatattttttaaaatcagtgaatctgtctgaaggataaactgaggttctttgtactatttttgtaacttccctgtaactttgaaattatttcaaaataaaatggtttctaaaatagatactggggccaggcatggtggctcatgcctgtaatcccagcactttgngaggacanggcgagtgaatcacctgagg

SEQ ID NO: 617144 - DNA, 775 bp, Homo sapiens
ggagaggtggtcggagaagtaggaacctcctgccgggctcgtggcggcttctgtccgctccgcggtggtgaaggcgccttccccacaggacatcaatgcaagcttgaatagaaaaacaaattcttcctcctaagtcatggcttatcagttatacagaaatactactttgggaaacagtcttcaggagagcctagatgagctcatacagtctcaacagatcaccccccaagcttgcccttcaagttctacttcagttagataaggctataaatgcagccactggctcagaggcgtcaggcaacagcagtcaatcttcaggggctctctaaatacgtacagattcttgcgataatgtgtggacttttgtactgaatgatgttgaacttcagagaggtgaccagaaacttattcaaacgtggataaacgtgacatagatggtagcctgctgatgggttcacaagatactggctccaatactcacagaatgagataggacaaacaatatgacttttttaccacccatcttctgttatacattgctctttgaagagaagcataagaaagagactctttctatttattctagaattgccgcaaatgactacctgtgctataccacgagaattcccgtcgaaagaaacttgtactctgtagcctcttacatcacctttattatacaggatggaaaaaccataacttctttttaggacaaagttgttgccgtcctaagaaccttcttattaagctcctttaacgtctgacacaaaaaaaaggg

SEQ ID NO: 617145 - DNA, 1463 bp, Homo sapiens
gctgagtgagacctcacccactcctcagagagaggccgccctgtgtgcccacccatcagggaggcatggtgcgggagctgagagtgcccccaagagccccacgaacaacacacaacacacatatgaccaagcccagaacaccctgcggggacccagtgatggcaggaggaggagaggaatagggccaaggacgagccgagagccaacggatccagggactaagcaaaaggcacctcatggcagcctgaggacatggagaccaaggaatcagagctgtgatggattaatataggcacagccgaaggcactactgtacagacatcagggcctagccagcctggggacacgctaaccagagccaccacctggcagacacaagaggacactagaccagcaatcggcgacgacagcccaccatggactaaattggggagcaaagtagcaagtaatacacccacacgtgaacaaacacacaaagccacacggccaccagcgcgagactcagatagaggcagccaccattggacgcccacccgacacaataactacagcacaggggcccactggccgcgccatacaacacatggcggacatacacaccaacacacagaccccccacaagcgcaaacgcaacccgtaggggaatcacgcaagataacacccacacaccacaagcggcagctgggaacccgcccacaaaccaaagagacaacgaacagcgacggcacaacaagcggcgacaaacaggggaccagaaccgcaccgcgccaagcaccgacgaccacgggacagcacgcagccccagacaaaacggcacaaaaagaaacgaaccagaaacaaaacgaacgaaaaaccgaaccaacaaacaagagagaacaacgacaaaacagaccccgacagaggcgaaccaccacgaccaaaaacacgacagcccaacaccggagagagacaaacacccaagcagcaacaacgccaccaagagaacagaacgaggaccaagacgagaccccggagaaaagcaagcagaaaagagggaaagagaaaaacacagcgcaacgcgccccaacgaggagccaaacataagcacacaccaaacacgaacgagggcagcgacacggaaggaggaccaacaagacaagaaacgagagaaaaaagacggaccccacgacgaaaagcaaaaagggccacaaaagagaagaagccgaaaaacgacacaagaagagaagcaagaaagcaagacaagcaaagcgagacgaagagaaagagcagacacaagatggagacggaacggagagacacaacagggggcactcaagagagacaagaaaacaagagagggcgaccacagagagagaaaaacaaaacatgcgaagagaggagagaagaaaaacaacagaaagagaacgagaggagcgaggaggaaaagacaaaagaaagaagagacaaaggaacagagaaagaaa

SEQ ID NO: 617146 - DNA, 224 bp, Homo sapiens
tgcatgatagaatcggctcggtcccatgatgttgcagagagcccaacacgttaggtgctcaaatgttgtcctgctgtctgaagcaccctctctctgtatgaccatgtccctgaaacctcagactcaggagctcacaagatagtgcaaatgtggacaacattgccctagtttatgtactttacctaaaatctcaaacttcttaaaataccacatgatcatttcca

SEQ ID NO: 617147 - DNA, 721 bp, Homo sapiens
tggacaccgctaatcggttcgcaggacctgccgagatggggttgctgtggaccccacagggcggtgcccctccgttagagaaaggtgaaggccactggaggtggacatagaggagaggcctaagagcttgtacggaagccctatgtgctgaatgacctggaggcagaagcccgcccttcccagaaaagaaaggaaatactctgtctcgggacctcattgactatgtacgctacatggtagagaaccccggggaggactataaggccctggccccgtgatgagaagaattactatccagatacccccaaaccagattctggagtaagatccaacagtcgtataaacgcgttttaccccagcagagtggccagacttcctcgattctttgcagaagaggaagatggaggtggagtgactggtttacaatcacagacgtgcccccaggctgaggcgtcccccggacccagtgaagactggagcccgggtgtaaggcaaggaggtgctgtgtggctcccgaggagctggcccaggtcccctggaaatccagaaggttacaccaccacaacagtgcacactccccgcttctggggaaggaactgttttcagaggctcccatttatattcatctgggggttcacggaaaagccagaacctgctgttttcagggtgggtgatgtaatatagtgtgtacataattaagccaatatatttttaaaaacca

SEQ ID NO: 617148 - DNA, 938 bp, Homo sapiens
ctccggccgatcaagatttattggaggtataattgacatacaacaaactgcacatacttaaagtgcacaatttgatagcgaggggggtaaacagcatgaaaagtgcctgataacttaaaaatgaaaaaaatttcaatttacacatattattttaaaatagtacattctaatttttatgagacatagatatgtatttataaaaaggtagatggaaagagaagaaattggggggggttctaagagccaaatttactcagaaggtttagaaacaccaaaattaacagccagttttcttgattttcttcttgaagaagagattggtgttgacttatggtgagatatactatggccttgagaggcagtttcaacttgaaaagaagatgcaggttgagcaatcggagaggacttcaaagaagctgatgagctctcccgtggacttactttgacaatgttggaagaatctggctggctagtctgaactggagtgggttgagaactctgggcttccttattctcaaaggtctttgtggttggcaccctttttttaataacctggcgcctatagggagtgggatactcgagcctggggctggctggttccgggagtgctggtgagctggggacattgacgtcgggtcgtgtatggggggagatggaaggtgggactaagacaggtttggagagggctttttgggcaaaaattcctgggaataccacgggggtgtatccaggggatgggaagaagattgtaggggtttaagcgagtgctaagggctaaagcagaacagtggggagaggctgaggtggtgtggttggggggggggtcggaggtggggaggaggggagggaggggaggagagggaggggaggtggggagacagaggggaggtggggcggaggtgggggacggagtgtaggggaggtccggggagggcggg

SEQ ID NO: 617149 - DNA, 319 bp, Homo sapiens
tactaagtgccacattttcttaagtccagctctatcgtattttgggcattcgtcgattggtctccaagatcttagcgatagtgaagtggtgccgcgaattaaacatacggtggtgcactgtgtcgtttatagcagcatgatttatagtccttagggtattacccagtaatgggatgggtggtgtcaaatggtatttcgtagttctagatccctgaggaatcgcacactgacttccacaatggttgaagtagtttagagtcccaacaacagtgtaaaagtgttcctatttctccacatcctctctagcacctgttgttta

SEQ ID NO: 617150 - DNA, 652 bp, Homo sapiens
ggtctaccatgagagacacagctaggtcgctgaggtagtgagcccaccacagagtgccacagtgcagggcccccactttcagcgcccaattgcctgtgggcggggggaacagtcactggtgtctcacatcctgagactgttgtgtgaggcttacctttctgctaggattggcttcccgcagagggcagggcccatcctaagcagcttccaagtcccacaaaggtggcttgtgggaggattcggaaggagctgcattgtgggcggggagtgtgtgggtgcgtcggacgcagcaagtaaactagggaaccttgatgtgcacagagaaaaggggggacgtgatggtgacacatggatggtatgggagtgcggtcaagggtgggtgacgtggtccaatacagtcgaggggggaagataaaaaaacaagggtgggggctgcagggtggggcgagtggacctcatggggacaactaagagttagagttgggaaagttggaactatggaacgtccagagaatgcgaaagcaaggagaggttgcaagtagagtcgtcgtcaagagaggggaagcggaaggtaagagtgcttgttgactctaggactggcctttgaaagacggctgagggcctatgcatcctgacaagtggagtgaacctt

SEQ ID NO: 617151 - DNA, 1234 bp, Homo sapiens
  misc_feature (1234)..(1234): n is a, c, g, or t
gcgttgtcctgtgcctgcagatgacttcctggatgcagcagcatggaccccatgcaatgccatcggcatcgccaacttcgctgagcagataggcgtcgtgtggatgttgcaccagcgtgcccggtgagtacatctacatgcatatatggaggacggtgtgccaaagcaagacggatgttcttacaaccctgtacccacttgcgcaagcttggctgacccctacatacagcacgtggaacgacctagaaccgttgcgctagcgcagtacctgatggatcttttccacatgcccttgccactcacactatggcgtccaatgtacggaccttgctgaatccagcgcaccagcgccttcgtacagatcccaggcctgcttgcctagccgtggccggtgctgcatgcacaagctctgatatggcactgaccagcacagctatctcatgccagcactgccaggcttgcacaggacagtagccgcagaatacgctggcgagctaccggacctacactctggctagacaacgggcactaacactagtgctccacaaggcactcctataccggacgccgcaagcctacaaacacacataggagacaccacaacggcccccagacgaaccacgtgctcgcactagccccccttggaccccagggagcctggcccaccaacgcgcctagccgcgccccagggccctatggaattacctaacaccaaccccggtccgccgcagcccgaggcccacaagcgattgaaccgcggaaggagaagggcacctcggcgtaccaagagcgataagccccctggtctcacgcggccctcgatagcacaaatcgcacgccaaggcttgacaccagtcggcacatcccctatgtggtgctccatcacgagaggactacagcggaccgctgcacactacatgcccccccggtgcgctttgcgcgaccgggctcacggcggcaaaagagccgagggagcacccacaatgtgagagcaccacccggggtggacaacaagggacccagcatcagcgccaacaggcgagaagacaagcgagacgacccaaacagggcaaactaggacaaaccccgcgccccaggcaaggggggacgcacctagtcagtaacctcaggccacacaaccgcacagagctagccagggcacccaccggaggaaaccaagacgcactcaccattagcagccaaggacagcaataccaccacagagaccaaggcn

SEQ ID NO: 617152 - DNA, 259 bp, Homo sapiens
gggcaatggcacatacgatcacaaaggaagttcgacacgctgaagctgcagaagaaggcgcgcaaagagctacttgggaaaggagagctgcagccccagctggacagtgccctgcgggacgtcaacgacatgtacctgctgctggaggagacggagaagcgggccgtgcgccgggcgctgatcgaggagcggggccgtttctgcagcttcatcaccttcctgcagcctgtgttggatggagagccgaccatgctaggag

SEQ ID NO: 617153 - DNA, 540 bp, Homo sapiens
cggccgccaatgtaggggtttgaccttgcctttgaggttttctaaaagccagaacattggttcagcataaaggtaaagtgaggcagcttgcattctcctcaaatacaggtgacaaacaataagtgccctagggccttcaaggtgttaacttttgtggaacatacgtcccgtgatttggtatttccaaagcaactgtagattgtgatcactagggcggcaatgtcaaagaggtctgacgtcagatattgttaaaagggccttgttaggtttttagacttcatcctgtacgcttgtgttttgtaaatgcctgacccggcaagtccattatgttatatgaaaagagacggtcattcgggtagatcatgttttcacacgcagtggtgttttgtcctgagtctttactgggaagtctctgggtacccaaggtccctctggcacctttcattggaggaccacctggcttaagcgattttatgtaggctagttcctaaccgtgacgtgtcgatgtgatgtgcaaaaatgtctgccctgaatgtatat

SEQ ID NO: 617154 - DNA, 340 bp, Homo sapiens
acgcagcggcgtggtgggagccgatgctgcccgccggtgtctggctgttcgccgccagcctcgttcttggggcggcccggttgttgctccgcttcggcggcaaacggtatcgcccggtgatcctggcgatgcgcaagtcggggaggctgtcgcgcgccggattcaattcgtggcgctattgggagggaagatggtgatgagcgaactcacgacgacgggccatgatttcctgatcatcctcgccaagcttgctgccgctttcctgttcggtggcctgatcggcttcgaacggcagatcagacagcgcaatgccggcctgcgcacgatggtgctggtggcc

SEQ ID NO: 617155 - DNA, 152 bp, Homo sapiens
gatatctttctcttcccagtctctcatctcctgccttccccacacactgtgtggttctgtcctcacccttggccaaagaaattaaaacaaacaaaactaccaacaaagaagagagaaaaattattgaaataacacaaacgggctttggacat

SEQ ID NO: 617156 - DNA, 971 bp, Homo sapiens
  misc_feature (42)..(42): n is a, c, g, or t
  misc_feature (45)..(45): n is a, c, g, or t
  misc_feature (107)..(107): n is a, c, g, or t
gctgtggtgagatagttaaaagggtgcagatgtgttctcttnttntagatattttctatctctcacttctcagggatgaaatctttttcaaagtttgaagttcctgnaacttagccatgatgtgagtggttatccctagataaaattaaaaggatttttaaaaagtaattactgcacataacaactgataaataggtaatttgaactacacttttaccttcttacagctccttggttacattatttggtctattgtctcagctatacaattcaaatttataccatactattgagctattacactattctactagattctcagggaagaattctagtcagatcacatgtatgattatgtatttatgtattaacatatcttataccatgacacttgtaaatatttcatctaactattgcctgcaatgatgacgaccagaccaagtgtcatacagactttatcattgtacagaaaaatctataagtctgcccattatttacacatgatgatctaaaaaaaacaacagcgtacacatattagcccacaagagcagtcctaagccaatcacaattacactgtactaccccaagaagactgtaaatcgtgaagcatatacctttcaaaaaatcataacatttcctatctcttggtgggagcagcacatcgtggacatgtgaatcttcactactatcatagagcttgtcaacaaggacatcgatgctgcataagtggtctataggataacatgtctcacaccatctggtgacgactggtaggcctatctcataattccggtttatgcagcacagctgacacattggcacagcgatcaagtgaaccactccgatcacccgtacacaggcgacacaggacattggccacgcagacactgacatcgacaagaaacaccaaaaaacaacgaccccaacacacccgaaaaccaaaaaccacccaacagaacgccacaatcgca

SEQ ID NO: 617157 - DNA, 683 bp, Homo sapiens
aatgttcgatattcatactgcccttcaccctcccatctgtgtacagaaggctgctttccgtaagctggtggcaaaccatgccttgctacattcccgggccctacacagagaaatcctggtgggcacgcagacaaggatttcaagggagaaggcagtaaccgaagtcgaactgtttctaagagtatgcaagtgcccggtgattgacgtgcacaacatcagcatcctgcaattgacatttcaacatcacaggatgatgcgtcaaaagaagaaaagtgagggcctgtgccctcgatttcttctgaaattgtgctgtttgtgaaattcactcgtccacaaagagtctgctaatcactaatgtgaggaactatggttgttggcctatgggcaggggaggtgataaggccttagaactgggaatctagattcgggatctgatcacttgactgagcaaacttgctctttccttttatttaaaacacaaaacaaaacttcctgaactaaagtcacagtacagaatagaatgggatggacagaaagactcaagagggcagctccgcaatggctattttcttgattcagtgctatttctggcatcatgtgctgcaatgtgaatttttgcttttctctcaggcctgggattcctcaggtcacacaaggtgccagcagctctactcaatcgttta

SEQ ID NO: 617158 - DNA, 213 bp, Homo sapiens
cttttggggtctttgctgcatatctatctccctgaggtttttataaagagggcattgatgaatacagagaatatcctcaacaatatttcagcaatcacaatgaaatgttttatgaggatatttttatactgaacttcaggacaagcctagagtaacggttgcgagagaaaagagaaaaaaaccatttcggtgcctgagagaaaaaaagaatgg

SEQ ID NO: 617159 - DNA, 161 bp, Homo sapiens
gcagtctataacctggaaactgctcatgatctgtgtaagttacggtaagcagttatacccttaacagctcctcccagagagcctacatttgtccaggggcttaagcggataagctgtgtctaactgcgtatatcagggcaagcagagagaagctgtagcga

SEQ ID NO: 617160 - DNA, 363 bp, Homo sapiens
  misc_feature (125)..(125): n is a, c, g, or t
  misc_feature (128)..(128): n is a, c, g, or t
  misc_feature (131)..(131): n is a, c, g, or t
  misc_feature (133)..(133): n is a, c, g, or t
gcgcttctgcaatccaagccgactgatgactggagaggatggctactatttcaccaatctggtgagtaagtgagttcttggcgttgtggagaaggactaggaaggtggtggttttggggatgtgntangtnanttatgcccatgacaggtgaatgcttatgtgtgagaaggcaatacggttgaagaagctcactttgtattagggtgaaatcactgtttgtcctgccggatgcttgcttgattttttggcttcttatttttaagtagatcgaaagcaataaaaattctttgaaatgaaagaacttggtcacaggtttttcggtacaacagtaacacatctttaatccgcctaattcttgttgg

SEQ ID NO: 617161 - DNA, 254 bp, Homo sapiens
  misc_feature (189)..(189): n is a, c, g, or t
  misc_feature (215)..(215): n is a, c, g, or t
  misc_feature (225)..(225): n is a, c, g, or t
cctagcctcaagcaatccacccacctcagccttccaagtagctgggactacaggtgtgcaccaccacagctggctaattctatttttttatagaggcgaagtctcactatgtcgccaggctggtctctaactcctgggctcagtgatcctcccgtttcgacttcccaaagtgctgggattacaggtgtnagccacttcaccaggcccattttctnctaaaacttnaagggcaaatcattaataatgtaaccagg

SEQ ID NO: 617162 - DNA, 151 bp, Homo sapiens
agctgatgctgtggtcgttctagagatccccattactaattatgacattcagactgtcccagtatttggccgtaaagccccttcaagctggaccctgtgtccttttgaaaagttcccatcattctttgagcactttcttgctctctttcac

SEQ ID NO: 617163 - DNA, 429 bp, Homo sapiens
acttttatatgcttggggagacaggatctcagtcggtcatccaggtaggagtgcagggtgccatcagggcttacggcagcctcaaccttctgggctcaggcaatcctcccacctcagcctcctgagtagctgggaataaaggcacatgccaccaaggccacctaatttttttttcttttttggtaatttggtagagatggggtttagccatgtggcccaggcgggtctcaaactcttaggctcaaacgatccacccacctgggcctcccaaagtgctgggatcacaggtgtgtgccgccgcacctggcccccagtggctttttatacacaagttttagtccctctctggctggctcagcacactcccttccacagaagcagcttcggaactccagtggccgtgcggctgcccaggacaagagacgggaa

SEQ ID NO: 617164 - DNA, 303 bp, Homo sapiens
tggttgctggtcaaagggaggggaggctttacaagcaggtgtgggttcccacgtgggcacaaagtggccccctgggcaaattcccctgggtatgcctttgtgccacaggagcgattatagtgaccccagttttctgcaaaggctgtgaaagtaaaggcgttgggaggtgggaaatgattgtatatgtgttggtttcgtccagggttcctagctcataactcacatgaccatggttacagtcttacgttgtcatgttggggtgcctcaggcctcaaaaaacagccttttgtttttttgaaaaaa

SEQ ID NO: 617165 - DNA, 691 bp, Homo sapiens
  misc_feature (613)..(613): n is a, c, g, or t
agcagaaggttgggttccagtcaagtgaagaggctttctcctgtgagatgtagcttattacttggactcatttaagaaagagacttatattacctaaactttgcaaatagattcttccagaaaattttgcctgggcagtccctcttgctgctctcacatatgctggtttttttttttggtggtggtggttggttggttggtttttttggggggtaataggaatcctttataggcctgaaaaaaatttagatctagtactaaaatatacatattcgggtggacacggttatatataggtgctagcctgatgtatctctggtgctcgggatcttaactatttcatataacttgggaaatggtccagctagaaactctggagaaaagaccattagacttgtagccagaaaggtgtcagctgacctttcatttcacggcttttaaaagctttaaagagagtgcgtaattttctccaaaagcattgtggagtgggccattgggacagtcacctgtcggctttacctgcatcctaggtgctaaaactttacaagtgtttctctgggacacaggcatggatctctaccaatgaataatcgcacgaggggaatgaccgatnctcactggcgttgaaagatacttgacgactgcgaagtgcacctcttcgcctttggcacacaacacaaacaacacctgc

SEQ ID NO: 617166 - DNA, 334 bp, Homo sapiens
cgtgcttcagaccggtttggggtgcggcgcccccctgggcccgtgcagggctcagctcggcaccagctttgagggcagctcaatgaaaaagtgaatgcccccccccttgttggggtggcctggcatggcctggtgctatcggcacccgctctcccctccccgactgatactcaattacgtgaagccaagaaagatgttttttagaccctttgcctatattaggttggacttatggccatattttccagtgtttcccaggagaaaggggccttacctgcccctttttctctccccccgttgtaaataaacatgtgtttaatccaagttaaagcta

SEQ ID NO: 617167 - DNA, 121 bp, Homo sapiens
acagcagcaacaagcaaccaggagcccaaagacacctactacatacctgctcctccaggcctacatacaccaccataagcacaagggtcagcataggcagggtacacccagcagacaccga

SEQ ID NO: 617168 - DNA, 911 bp, Homo sapiens
cgtggtggctcaagcctgtaatcccagcactttgggaggccgaggtgagcggatcacaaggtcaggggtttgagaccggcctgaccaacatggtgaaaccccgtctctactaaaaataaaaaattagccaggcttggtggtgcacacctgtaatcccagctactcaggaggctgaggcaggagaatcacttgaacccgggaggcggaggttgcagtgagccgagatcatgccgctgcactccagcatgggtgacagagctagactcagtaccccacacaaacacacacacaaaaaagtcacctaccaatagccacagtccctggaatgatttcttctactgtacacactgactaagagaaatacaacttaggacatcttactgattcttaagaggttaaggtgtcatccggccttcgtcactctgacctgggctttacacgtatacagatctatccttattagctatactgacttcgggcaaagtactcgaccaactcgaaactgcggcctctccttttggtcacaagtgccggcaactaaaaactacaccagggtggctgttgcacgcatgaaactgaggcctttcatgtaacgtgaattagaagacatgtcttgacgcaagaacagccagaaaatcgtactactacggaaacagctgggagagaggggcagtaccgagatagaagcagctccaggccaccaacgtcatggagagacagcaaatacagaacaacaagaaaaatggaaccacaaacaccagataggctaaagggggcaagttggccaaagacatggcccgaaagaaacctgaaacaacacaaaaggagataagaaataaaaagtaacaacacgggaaaacgcaaccgaatgtacaaagggcaagccaggaagagggcaagcgacacacaag

SEQ ID NO: 617169 - DNA, 1256 bp, Homo sapiens
  misc_feature (1256)..(1256): n is a, c, g, or t
gggtagaggcataaagttcagcacagctcacaggccacatccgttggttatgggccgtcagaagccatcatccatctgccagacctggtaccacaaagctcctaatggtaacacatcattgtcctcattcaacattggctgtagtgctattggagggctggaaagtcacatctcctggtttatccgtgtgctctgttaggtgtcaggcgacatccgccgccccatatgcaagattgactcgagccatggtaggtggccagactgtactaacgacagactggatatgtgtcaagtcatcctggtgagcctgcagcttcaggcaagtgatacactcccgtacaggtacgatagcatggcagagtcgatgcattaaacttgccattacaacacgacgcaaggccgtgtcgtggagaaggtcgcattgtccgtcaagcatggtcatcagcaaacacccctcgtggcaacagtggagtcgactaaagaactcatcttcttctagacacgagggccacggccaacgcatttcctatttggataaacacgcgatggccacgaagtaatgagatcaggcttcaatcggcagtccacacgtggcgttatgagggccctaggtcaatctagaagatcgtccgggcacttaaagggtcctccagggttctccatggcccctggttgcgttgcgttgaagcctccggcagcgcgaagttggcctcagtatgtccctgaagacctcatagtcttctcctgggtggtgggccaagggcccctgcattgcgacaggcacccttgctgcccgggcgaggccccaccgtgggggttgctccaccctatggccgccaggccagaaacgttcctcgcagggcccggcgccggcaaacaagggcaacagttttcccgccaaggggcagcgggcaaaaccgggccaccgtgagccccgggccgccccaccgcagctcccaccgagacgggcctccacgggcgccgcgaaccgcgcgccacaagctcgggacgcaccactggccaaaccgccgcagacccccacgcactacgggggggggcccccacccccagagaggcgagctctccccccaaggagcgccgccccctgctgcagcggcgcgaacacgcgctgtaagggccacccccaacgaggcagacgacgacggcccaggcggcacaacgaaccggaccagtcaaaagcggcggtacaaacagtgacgagacacccttcgaaccctggttatggctggctgccn

SEQ ID NO: 617170 - DNA, 803 bp, Homo sapiens
tggacgcgtaggtcagcggaaaacgcgattgagaaatggaaaagaaaatgaaataaatcagcagttatgaggcagagcctaagagaactatggcaccatcaggtgactgtcccagaagtgaatcgcagggagaagagcctgctgacgtgcagatgaggcgggatctcctgcaggagggagtacagccagaggagtgtgtggccatcgcgggctacgcttgccatcagattgagacccgagctcagttttgtgaagaggagaaaaaattcttatcctgcatgactagaaccatctgcagatctgcgtcggctgggaggtgatgcgtgcgggctgctgtgggtacattccggcaaaccatgtgtgggaagcacgtggcatgcagttacagaccccggaggtacatcgtggccacgggggatgacacgagtacttcagcgcagctatggaattcttgaaactccacttgggggatcgttcggcaagaccaagcgcgacgaacaattaatataccaacagtgtctatcctgcagaataaagaatccctgaccggataacaagtcagtcctggacgtggcgctagtgcggactgggatcatcgagtctcttctgtgctcatctaatgcgcggcctagagcgggtgtacggcgttggacggccaagtgagatggcaccagccacacggggctggctggtcctgcggagcggttttgctgactttttcacgtgtcccgccgcagggtgggcgtgtggtgttgcccggatggggacgtggcgggctggtggatggggccggccggcggttg

SEQ ID NO: 617171 - DNA, 415 bp, Homo sapiens
gagatcctttggtgcttctgatctagcagcaagaaaatgaggctaggaggtatccacgtggtctcatgtgttgatttgagaaaagaagaagtctttcgtttgacagctgagaagtcgtgttaggagggcaccgtcaacaaaataaacatgcgctaatggaagccgattgaaagcaggtgacagagcacactttggaagcactgctggagtggggcagaggggtacttgcatgaaaatgcctggggacctctgacgacactgttgggatggtgaggcacttgttcccttttggtcccaccggtggcctaaagtgtggtctcagagtgcttgtcttctgcttgctcactgggtggggcttgtgagcatctgttctctcttcctaggatcacagaagaactggaggttcctggggaga

SEQ ID NO: 617172 - DNA, 138 bp, Homo sapiens
gtacccacgcttgtgtctcaggtactggctctgtgccatgcctgctgtggtagagcacctcctgcagagggtgggaggagagatgagtccgtatgccggcccctcacggaaggctgcatgctgggctgtggaggggcc

SEQ ID NO: 617173 - DNA, 497 bp, Homo sapiens
gcgccgggatataatgttctaggccaatgtatttcaggatgcaagaactaatcctaatttaaaacagactacaaacctagagttaaggaaaggaagcactcatggtcatgtccaatgttttcattgcccttctgttataacactgcctgggagaacacagaagttattagtgacaatgagctattaaggcaaaaagttattttaaaaaacagtaagaatacaagaaaggactggaaaagataatgtatggttttgcttaaatgaataaggattagaaagaaaaagaaacagggactagacaatcaaacaaaatggtgtaagagggccgagagcagtggctgacgcctggaatcccaggattttgggaggccgaagtgagaggatcatttgaagctaggagttccagaccagcctgggcaacatggtgacacctcatctctactaaaaatacaaaaattagccaggcgtggtggcgcacacctgtattctcagctact

SEQ ID NO: 617174 - DNA, 187 bp, Homo sapiens
  misc_feature (6)..(6): n is a, c, g, or t
  misc_feature (67)..(67): n is a, c, g, or t
  misc_feature (129)..(129): n is a, c, g, or t
  misc_feature (131)..(131): n is a, c, g, or t
  misc_feature (176)..(176): n is a, c, g, or t
ggtggntagctggactaaaagcggctcatgtggagaagcgggtggatccagaggcagatctgtgtcnggcctctcccaaggctgcagaagctgctcccaaaccctcccagaagtcaagatatttttttntnttacatgaatagggggccaagctgagccacaccgcaggtgggctngtgactacctc

SEQ ID NO: 617175 - DNA, 481 bp, Homo sapiens
aaaggaagtctgcagggaagccagttccaccagtagttccactgctttggcataattccgctttagtttagccagctgctcccccacctctggctaaaccggtcagttcatagctgtcagttccttcgtggtaatgttcaaacactggcaaggtaacacctgctacattgtctttctttgctctgatcttcacttgggctttatttacattttggataactgtggtgctgaagtcccctgctgtgaatttgcctcagccaatgagaaggcagcttctctcatcacttcacccatcagcattttagtctctattatcttcttcaggatctgtcgaaatcgaagagttaaggcatcagactttttcttcagaaggtttcgaccagtctgtgctccttttaatcgagccttcatgatggtctgtgccattcgcgaagggaagatttcaatccggtctttgcccgacatctgacggtgactcggc

SEQ ID NO: 617176 - DNA, 80 bp, Homo sapiens
caggagagaggaagggaggaagggaaggaaggaaggcaaggaaggaaggaaaggaaggaaggaaaactttcaattttctt

SEQ ID NO: 617177 - DNA, 547 bp, Homo sapiens
  misc_feature (42)..(42): n is a, c, g, or t
  misc_feature (142)..(142): n is a, c, g, or t
  misc_feature (156)..(156): n is a, c, g, or t
  misc_feature (179)..(179): n is a, c, g, or t
  misc_feature (194)..(194): n is a, c, g, or t
ctgaaggtggcctcaccttccaggtgcttgacaatgccccgnaggctgttcccgtgggctgcaatgagcactcgcttgccggccttgatctggggaacaatctcctcgttccagaagggcagggcccgggcaatggtgtccntgaggctctcgcangtggggagttccccgggcttcangcctgcgtaccgacnctcctgggggacacatgcacgctgctttccctgccaagccagtgggcccgcacccgactccccactctgcagcttaccagaggccttcccagcaaaggcagcccaccttgctaatggagttgcaatatgggtgcttttcgtccatctggggcagcgggatgtcgaaggagcgcctccagatcttcacctggttctacccgtgcttggcggccgtttctgccttgttgaggcctgtgaggcccccgtaatgccgctcattgaggcgccaagtgctcaccacatgcagtcacatctggtccgtgccggacaggatggcccaacaggtgctgatggcccggttcaccactgacgtt

SEQ ID NO: 617178 - DNA, 152 bp, Homo sapiens
  misc_feature (11)..(11): n is a, c, g, or t
tggcgagtgantggttcaggttattcgtgagtgacgtggcggcaggcctgaggtcggcccagtggtgcggctgcaatgcgctcatggatctggaggtggtgttcccactgatgaagagcaggcgactggtgtttggcagacgggagatcaat

SEQ ID NO: 617179 - DNA, 1016 bp, Homo sapiens
gagctttacatacagcatcccgttgggacgctgccgccaaatccgtccatgaccatgtccgtagcagatgactcccccatcatgcctgtctcactcccaagctactcgtgtttagcacttctttcacctctaactgatcatcatagcgtctccgcgtcgaggcagaaatgcaagacagattgcgctgcagaaagagacagtcacaggactaggaagggtgtcctgaaaggtcgattttgatctcgtcattcctagtgcacaacgagcgaaggtccccatccggacgcgtcgcactgatcaaaactatagggcactctcgcccccggtgacgcttgtccaagacgcttggccggccttgagccaaagggctgcacgccgggaagccccaagtatcagtccgggaggccgctgcgctggaaggagggcgacgcttgtccctaacgtgcgggcgcgggtaatgccccaggcaggcccgggggccctggatgacacgcctgccgatttttcggacccaacgtagaggcgggcctcgggcccctgctggagggttggagctggcatttgcaggctccgtttttggcccggctctcccgtagcgcctccccacagtgtcccctcacccgggggctccagcgcgcgccgctggggctagcagaactcttgtacaggtggcctatgatttaccacaattacccaccttatggaagaaaggctgtttgttgaaacaacggaccattccaaagaataagcgcctccctatctggggtgttatgcgaaccgagtggctccaacgggtcaggggcttgggcttgcaaaaacactttattggatgtaacgaagctggggtgtccttaagattaaccggattataggaggaaaatgtggggtgttgtaacctggtttaatttttgggccaaagaaacaggtttgaaaggtccaaacaaagggtgaatccgaatttgcaccaggctcattttgacagaacgggatttttttattccagaaacattagaaga

SEQ ID NO: 617180 - DNA, 407 bp, Homo sapiens
ctcacactcctgggctcgagcggtcctcccgcatcacgcctctcgagtggctgggactgcaggcctgtgccgccacactcggctaattttgtaccattctttgtagagacgggatctccctgtgtcatcagactggtcccaagtgatcctcctgtcttggcctctcagagtgctgggatttcaggcgtgggccattgtgtccagcctcaaaaatgttttgtgcatttggtagccagaataatggcccccctaagatggccaggtcctaatcccctggacctgtgaatatgtcaccttacatggcaaaagggactttgcagatgtgattaaattaatgacctagagatgaggggattatcctggattatctgggtgggccagtgtaatcagaagggtcattagaagtg

SEQ ID NO: 617181 - DNA, 219 bp, Homo sapiens
  misc_feature (42)..(42): n is a, c, g, or t
  misc_feature (170)..(170): n is a, c, g, or t
  misc_feature (173)..(173): n is a, c, g, or t
ctgaaggtggcctcaccttccaggtgcttgacaatgccccgnaggctgttcccgtgggctgcaatgagcactcgcttgccggccttgatctggggaacctccaggagagaagggtcctcgggcttggccagggcctgtcaggagagcgagggggctgtagacggtcaccncgntgcctgccaacgcacgtcaagctaaacccccccccccccccccccc

SEQ ID NO: 617182 - DNA, 709 bp, Homo sapiens
  misc_feature (1)..(1): n is a, c, g, or t
  misc_feature (95)..(95): n is a, c, g, or t
naggcaggtcgggttgtcatagattctctcgcatcccagattggtctaattgaccacctttgagaaacgcgtttccaacttatttccaggactcnaattagttctattagatctttgcctgacttcacatttaatcacttactgatttttcttttagcctttttgtttcattttcttggctcttttcatttatatcttcaaaatcccttattttacatttggttgtatctcttcttccttagatactttataattgccttcacatctgatatgtgtttgtctttttctccgaatttttttcctgattttagccagtcattcacatctgcattttgtttgtccagttctgagtttttaagttgctatttcagattttttaaatatctaataatttaattcatattagcatattgtgttaaagtttactctcctttttctcattttcaatttctctttagagtgactttattttttttccctagggatgtaattttatgttgagttaccagcaatactaggtcatcaaatgggaagaaagggtctgggttagttcaagaatattttctgcttagttgtttgttttttgtgagatcaggtatcattcaataataaagctttttatggaggtcttacctcctgattccttattagaactttaaaaaatatttttactttcaaaaaatcatagattcacaaattgaaaaaaaaa

SEQ ID NO: 617183 - DNA, 197 bp, Homo sapiens
tgacacaaacctagctacagcaatactcatcatgctcggtaagtccatgcgcaatagtgtataacggactaggtgggcaagggaaagcgacaggcaacgcgctagcatctgcagtgatgcgaggtagctgagatacaacatgaaggatggcgcactctgcaatcccacccaccatcgggtatcatcgcgatactccg

SEQ ID NO: 617184 - DNA, 909 bp, Homo sapiens
tgggggataaatggtcttaatggggggaaaacaggaagtcttcaatctcttttatcattttgataaaacatctgtgatttgtttacttgatggtcaaggcaaaaaatcattggctaaataaacccatgaacaatttggcagtgtgccgcaaaccctaattgtgggtttaacaccttcttgcagagctttataacagtgcaagttggaaataaatccaacagttccccctctctttgggacaacacatttgttcttccactgcggaaaattgtgacccaatttgcaacccgtggtacatagtaagagtgcggggacaatcccgtggtttaggagtgtgcgaaactcttctggggaagcattcgcccacctgtgtggggggggacgctagaaacagaaggggcaagaataacctcttattgttgtcgggtcgacaaaaacgcccattggacgacgattggtcccacattgtttcactctctgggaccaagaggggtaacccttcaagaaggtcacttctccaccccttgaactcgtgccgacctacacaaactaaacctggtcgctccttgaaaacactttggggcgccccccattcctttccggacaggcaaaaggactcgtgccttgcctgtggcgaatgtgtccggcgtcgaatttcgtgcccccccaatttcgggaaacagcaaatttcatgttccccctcgtgtatatggggccccaagttggcgcccggacaagggcaagctgtgtgcgccggttgttcacggggtctttcgacgagcacaaaactattcccgaccgtgagtgttcttggctcctttattaaggtcccatcactgacagccggtggttgtccacacccgtgtccccaggggccccttgttgcccctaaagtatgcaggggtctat

SEQ ID NO: 617185 - DNA, 1519 bp, Homo sapiens
  misc_feature (175)..(175): n is a, c, g, or t
  misc_feature (213)..(213): n is a, c, g, or t
  misc_feature (784)..(784): n is a, c, g, or t
  misc_feature (946)..(947): n is a, c, g, or t
  misc_feature (949)..(949): n is a, c, g, or t
  misc_feature (1132)..(1132): n is a, c, g, or t
  misc_feature (1229)..(1229): n is a, c, g, or t
  misc_feature (1256)..(1256): n is a, c, g, or t
  misc_feature (1397)..(1397): n is a, c, g, or t
gtgcctttttactgttgggggccacgtccttttgcgtggcatggagggaagtgttgtgttctcgccaggtggcccacaacgcagcgtttggtagtttgtgcacctctacctcctgtgattttgcgccttttctctgtcgtgtgttcaatgacacctgcgtttcggttcgccgcgntgttccggctgatgttggcacaccgcgtgtgacatctntccacgggggggttggcttgcgtctgtttttcttgtgagacgtcaccctttgacgagtccttggggtggatacgggaagaacagattgtgggtgaagttcacccacgtggaaattgttttttttgggcgtggggccaccttcttatttttcgtggccaccatgtttctctggtacctccccacaagttgtgcgtcccccccctctgagtgttccctccgtgtggggcccacctgtttggcgccgggtgtttttgtgacgccgccggtttgcacccctgtggatagcccctctgcccgtggtgctgttgtaaaggagaacccttggtgtgtcctcacaccccgagggaagggccgctggccggggccgggggacccctgtggggcgacactgggccccccctcttggcgccattttgagaggttcttcttttgttggttttttggaagtagtgggtttcttttgtggtgggaaaatgttgtagcgtcttgggtctcacgagagccccaaagtgatttgttatcccgccccctttgtggttttccaccgcgaaaattttttctgtcttaaggncgttcccccacctttctggggctgtgtgggagaatttctccgggagaacccctctccccgctttgtccctaatggtgtatttccccccccctcgtatgagtggtgaccccccttggtgggcaccccaagtggcacttctggagccccctatatagggggccnncncctctgggtggagccccccacgccaccactttgcaccacgcccccgcgttgtttttaaatgtgggccctccgcctctttttgggagagatttgcctctgggctcgggcctctttcacaggggccttctcccccggagaagacgcaccctcgcgcctctttccctctctttcacagagttgtcntctgaaagcgggaggttgtctcttttgagaggccagcggtggatattgcctcgggaagtttgggcgcggcctcccctctctgggccccgcgggcccntctctcgtggagccctctgggctcccnctctccgctggagacctcggggctcttcgctggtgaggcacctcgcacgccctctccctcgggcacttccctcccacgcgccacgcacccacctgccaccactatagacctcgaggtgctatttgtaattttgggcttggntgtgtaatgcttctttacattgtgtataaaattgctgtttcttttgaccacacatttaaagtgagttttttttgttttctgttaagtttgtaaaattaaaattaagaacaaaattcccatga

SEQ ID NO: 617186 - DNA, 307 bp, Homo sapiens
ctacttcgctcccatctgcggcacttgttgcctccgctagcgtccccacttcgtcgtccaagccccgtcgcgatttccttgcccttcttttacacatgtagaaggagatgaaggcccaggagcagaggctggcactccgaatctccttctcccatgaagaggatcctttggggaacagctgtgcccctggtcctggcctgtgacctactctctgagactgctgaccctttcttcgtccttcacattcacgtgatctgcgatttcccctttccgagccatggtgcagttccaccggcaccatggccag

SEQ ID NO: 617187 - DNA, 980 bp, Homo sapiens
catggcagcttgcacctgtaatcccaggactattgtggaggctgaggtgagcagatcacctgaatgcaggatgttcaatgagcaagtcttgtggcaacactggtaataaccaccatctacccaagtagaaacgtcactcgaaatccaagacggggagtaggttggtcgcacagcacgcgaggtccaacggcacgtcaaggaaggcttgacggtatcgcagagatcagcttgaatctcggcgggcatagtggagtggtcggacgctggaggcactgagcattagcgccaatctgattgcatcccaagttctaggggtgaccaaggatgccaaggaatctcctaattcttcgcaggagagaatcatctcatcgaaccaatctaaaagaagagacgggcggaaaaccctaagcaaatgactgtcctttgaaatgggccaccgcggagtaaaaaaactctgcttgggcaaagcacaacggcaccagaagtacgccaggcgacacagaaggccccgagcaaggggagagcaccacaaataggaggaatcccccacgcaggaaacgcgaacacccaggaacacagtcggtgagaacgccgcacagccgcataagagtgatagccgtggcgagtccacccgaggagaacaccaatagccggccgggcgagacagagagcacagaaacagcgttggcatgagacacgagacaaaccccaacagcaagacggtgagtcagaaaaggaccgagacacccagggggaggaggtacgacacagcagcgacgacaacaagacgcatgccagacataccataaggaactagtgccccccccaccagcaaggaggcccatatgcacaggatgtcgaaacaccaagcgagaggaagacagtaccaacaaaaagggagcagagcattcgtaggaccaacacacagcaaagggcatagaacagcagttaaagaaacgcacgcggcacagtgaacaatg

SEQ ID NO: 617188 - DNA, 109 bp, Homo sapiens
ttccttgcagaacaaaattttccttgagcagccaggtgagcacagagtccctgtaggggataaaatccgactttcgcttctttgattgcatatctgcaaggaacccacg

SEQ ID NO: 617189 - DNA, 200 bp, Homo sapiens
ggttgttagggggaagagtgctaagtgaaaatacgatataaactgtatactttttgcaagcagttgccatttttctgcccagcctgctgccactggccgtgcagttatcctgtccagcccaccaccattggactgtatgtaaggtgcttctcctgcctagcttgccaccactggctgtctcccctttatgtagccccaca

SEQ ID NO: 617190 - DNA, 151 bp, Homo sapiens
aagtctgaaggagagccaaagacaataaaaacagacagcatgaagtaagttaatgattgcaaaaatccttgggttttttttttttggagacgggggctccctcttgttgcccaggctgaagtgcaggggaagtttttgggccaactgaaac

SEQ ID NO: 617191 - DNA, 861 bp, Homo sapiens
ggcgcaagaaagatggcagtggtcctgatcgcgtggcctcgttggcggcgtcactgacgcttcgtctccggtcctcgagatcccgagcgcggggaggcagaccggatgactgacggtgcccgggacggacagctgtagagtctgctggggtcaatgtgtagcgccggtcggaactggactgagggcgaggtctggatggccgtcgccgactcccgacttgaggctgcggagcattcgtccgtccgactctggccttgagccttgtgcgaggactcctgccgaactagcgggggctcccgggggacaagagggactaggccgatcgaccgcatgggacgtcccctggttcgctcgtggactgttcctggtctctcactatcatggcctcgaaagaaactatcggaagtgcgcgacgcgggggatagagcggagtgccctaagaggcgtcttggattggactcagcagttctatcaggcagacggcggaccttggactaaggctgccccgcttcccttgcgccttgctgcttcctggttctgaaaccgtcgtggaccactcatccccgtactgatgaagctgcttgtccccagtcctgcggccagtcctgtgggacacagtagccctccgttggatgcctcgggggattgggattggacgcctaggatcctcacgttccttaccttctggttccccgtggtccactgtgcccctatcacagacacactgagcccaagaggccatgcaagcaccggacaccaattggtcgtgtgccccttgaagttgagcagaattgcgaggtccaaggatgggagtcccacttcagtttagcggcttggtctccaggtgccttgccatcatgg

SEQ ID NO: 617192 - DNA, 89 bp, Homo sapiens
cccccccaaaaaaaaaccttttttttttagggggggggtttttttaaaagggggcccccctttttaaaaaaaaaggggttgtggttgga

SEQ ID NO: 617193 - DNA, 860 bp, Homo sapiens
  misc_feature (753)..(754): n is a, c, g, or t
cgatacctcagataccttattcctcctatattaaatttgaatctatgacagaaatatttttagtgttttccaaaatatttttaaagtgaaaatgtaagttctcatttgcttgtactgtcttttttccgctcctccttgaatttgccccttgctctggagagcctacaaaagttaaaacttttgtgaatgagcattgtcagaatgctatctcaaaaatggtatttttttttccagtggaaaataacttttaagaccacacctggctaccctttcagttttaagccactgcacccagcccacagacagtcattagtaagtattctcttgtaagttttcctaacaattaacatctgtgtacattggttttcttgctaaacttaactctaatttttgccagtactaatatgtagtatccactcatagttttaggacttcaaaatctgagtgtattgggtatatggtatcagcgtcagcattcatatgaagcctgagagtcctttctgtgtgtcaagtcaggaggtgtaggtgtaggaaatgctgatccaggtaggactgtttggcacctagcaggtactcaagaaatgtttactggaaaatgttaacttgaatcaagggagattatactgttatgcactggccattaagtcttcactgttgacttttgctctctttggtttttatgccagagattgctaacccctggtttagaattgttactacaagcataaaatcatttatgggccgggcgaggtnncacgcctatagtcccagcactttgggaggcagaggcaagtggatcgcttgaacccaggagttaagaaagcctgggcaacatggcgacacgcagtttctaatacaga

SEQ ID NO: 617194 - DNA, 774 bp, Homo sapiens
ctgcgagctgccatgccccatgcgccgacgcctctccgcacgatgttcccctcgcggaggaaatgcggtgcagctgccctgtggaggactggcatgtgtcctgggttgctctcctgtgcggcactccctctgtgaatgtgttcctgtcttccaccttgttctgttggccgtgcctcatcgctgtgtgcttcttcgtccgctatctctgtgcttgcatgctcatgcgtgctctgtgtgtgactgtggccgctgattgggcaagatcacttagtggggaccaacaagtgtgcgacgagaagaccctctgtagtgccaccatcgccaactagactgacacatagcacagcacagccgaagaatagccaggcacaacgcagctatggaaaagacaacatagtgtagaaagagaatacagtacactgccaaattctcggttgagctgagatcgcacccaccacaaccgccgagtgcccggttgcgcacgaacgagatgggcattggatctgagttttggctcgcatcccgataaatcccccgggggccataggaacataacagcgagcacatattcccaggagagtcgtcggcaatcgacgcttcccacatcttagcggggattacagtctataacgagggctattgggcaccagccccgcaatccgcaagatttggccttaggccaccatggcgcatgtactacccacccgttcgggaaaatggcaaaagtcggtggggaacacagggaagaacagcagcatttaccgcgcctggtag

SEQ ID NO: 617195 - DNA, 365 bp, Homo sapiens
  misc_feature (4)..(4): n is a, c, g, or t
  misc_feature (44)..(44): n is a, c, g, or t
  misc_feature (61)..(62): n is a, c, g, or t
  misc_feature (66)..(66): n is a, c, g, or t
  misc_feature (198)..(199): n is a, c, g, or t
  misc_feature (201)..(202): n is a, c, g, or t
  misc_feature (222)..(222): n is a, c, g, or t
  misc_feature (225)..(225): n is a, c, g, or t
  misc_feature (234)..(235): n is a, c, g, or t
  misc_feature (305)..(305): n is a, c, g, or t
ctgntttactctaggaggacccccattgtataagcggatgaggnacaagcatttatcttgnnaagngccccaatcctccggtgcaggagaattttgacgtgaataagtatctcggaagatggtacgaaattgagaagatcccaacaaccttgtgagaatggacgctgcatccaggccaactactcactaatggaaagnntnngacaaagtgttaaaccaggngtntgagagctnnatggaactgtgaatcaaatcgaaggtgaagccaccccagttaacctcacagagcctgccaagctggaagntaagttttcctggtttatgccatcgcaccgtactgatccggccaccgactatgagatcat

SEQ ID NO: 617196 - DNA, 181 bp, Homo sapiens
ccggctgctcactgtatctacggaacttgtacaggtgaggctggcagctggagtgataaagacacgtcgagcaggatccaggtgaacgatatttggaggtcagcacgggctcacgtgtgacggaacttgtccagggaggcatgcaccgcagtggtgaatacacgtcgagctggaggcatgc

SEQ ID NO: 617197 - DNA, 160 bp, Homo sapiens
agacgccggataatatagatagtcgaagatgtgattaaggcagctcgcgtaatgatcaagggtgtcgcctgataataggggaaatcagtgaatgaagcctcctatgatggcaaatacagctcctatagataagacataatgaaagtgagctacaacgtaa

SEQ ID NO: 617198 - DNA, 115 bp, Homo sapiens
gcctgtaatcccagctttcgtgaggctgaggcatggagaatcacttaaaccccggtgatgggagagtgtcgcatgctgacgccatagtatcgctaatcactgctcctccagaccg

SEQ ID NO: 617199 - DNA, 104 bp, Homo sapiens
accgagatacccgcaggatgagtcgccaactaccagaaccacgttcgccgacggccgccaggtaacgagcacctccatcggacatcaagggactccagccacca

SEQ ID NO: 617200 - DNA, 121 bp, Homo sapiens
ggggccccccccccgattcctttccccagaaggggtgggatgggcccccatgaactgcagcagcatgttgaggtgtccatgttgtttgcctttgtataaagaaacagcctttgccctgcca

SEQ ID NO: 617201 - DNA, 437 bp, Homo sapiens
tctcacggaactttgacacattgaaagaatttccaggtattccacgtatcagccagttcgtgtgtgagataagacgcagatactgcaagtgcattaaaacgctgtgaaatactcatcagggcatgttgctagatctgtattggttgtctaacgtagtagagttagaagtagagacagggaagaccaagtaggcagtctggtctatcatgattgagagctcaagctcagaggtattcgatgtgatttacagacctttagagaagcagctgaaacatgcatcctctttcagccgagttgtgctggaggatggatgaaggtcaggtttaccaatccttcaaaagagcccagctttgtgatcttgttatgagtaagctgcagatcctccagagatttgggaagtgggcccacagactctgtcaggttgttgtggtttatat

SEQ ID NO: 617202 - DNA, 412 bp, Homo sapiens
gaggttcaggttttggtgttttttaggttggtttttttttttggaggcgtaatctcactcggtcacctaggcgggagtgcaggggctgggtctcggctaactggcaccctccaccttccaggttcaaatgattctcacacctcatcttccggagtagcggggataacaggcaccggccaccacgcttagccaattttggtattttaagtagagatgggggtccaccatgctgggccaggctgggtctcgaactcccgagttcaagtgatcctcccacttgggcctcccaaagtgctggggatcacaggcactcgccaccaggcccagctaatttttctatctttagtagagatgggggttcgccaggtgggccaggcggttctcgaactccggacctcaggtgatccaccgg

SEQ ID NO: 617203 - DNA, 415 bp, Homo sapiens
  misc_feature (327)..(327): n is a, c, g, or t
  misc_feature (330)..(330): n is a, c, g, or t
tgcagataaataaaagtttattaaaaaaaaaaaaggagtgttgcaaaactacaagtatttcatgaaattaatctgtcagggttatatttcacgtcggtcatagaaacatttttcccaaatcaaatgcagtgatttgtcctagaatgtatgtggtttttataaaatataatggtcagattgccctttcaaacgtctcataaaaaaggcatttacgtttaatctaccttaaaaagaccctacctcaaaacaaaagcctttagaaaggcacagtgcacctccaaaagaaggggcttcagaaggcaggtcagctcgtgccgaattcggagnggnagccagccaagatgaaccgattcctttggtgggtggctctttgactgcccttaccagtcattgaaacacaggctggtgatgtgtc

SEQ ID NO: 617204 - DNA, 295 bp, Homo sapiens
  misc_feature (263)..(263): n is a, c, g, or t
cacagtgcctggggctttccaaaggcactcgcatgcctattggagcctgtcagccccagcacaggacaacgtctgtgatgcggatgacgtggaaggagtggagccacacccggatatggaagccatctttgccacagcttttgaccgatgtaccttcattggcacaagattcgaggcagccgtccacgggcttcagacggacagcgtgcgtcaaactttcatctgactaccatgtggcccataagagcggtaaactcatccancttttacccttcttccgccccaggtcaaaaat

SEQ ID NO: 617205 - DNA, 494 bp, Homo sapiens
  misc_feature (4)..(4): n is a, c, g, or t
  misc_feature (7)..(7): n is a, c, g, or t
  misc_feature (74)..(74): n is a, c, g, or t
  misc_feature (104)..(104): n is a, c, g, or t
  misc_feature (112)..(112): n is a, c, g, or t
  misc_feature (138)..(138): n is a, c, g, or t
  misc_feature (152)..(152): n is a, c, g, or t
  misc_feature (168)..(168): n is a, c, g, or t
  misc_feature (219)..(219): n is a, c, g, or t
  misc_feature (234)..(234): n is a, c, g, or t
  misc_feature (239)..(239): n is a, c, g, or t
  misc_feature (248)..(248): n is a, c, g, or t
  misc_feature (252)..(252): n is a, c, g, or t
  misc_feature (267)..(267): n is a, c, g, or t
  misc_feature (285)..(285): n is a, c, g, or t
  misc_feature (317)..(317): n is a, c, g, or t
  misc_feature (319)..(319): n is a, c, g, or t
  misc_feature (347)..(347): n is a, c, g, or t
  misc_feature (350)..(350): n is a, c, g, or t
  misc_feature (372)..(372): n is a, c, g, or t
  misc_feature (381)..(381): n is a, c, g, or t
  misc_feature (384)..(384): n is a, c, g, or t
  misc_feature (425)..(425): n is a, c, g, or t
  misc_feature (444)..(444): n is a, c, g, or t
tcanatncactctattttttgcagttatggccacgggggatggagttaggctcttacattgttttcactttttnacattcttacttgttaaatgaagggttggngactctgngggttccctggctttctgcaaacccncaaacctgagttcngctggtcacgcatgtncacagcaaagagccagagttcaccgccctttctcccaccttcttctccagnttgtttcaatgccantcagnttgcttggntggngatggaagggggggnaggggctcggataaattnaaaactaaaaccccgcgattttcatataatanangcgaaaagccaaagcagagcaggaaggngcngccagagaccaggcagcagggnggccaaggnggngggggcacgggggaaaggggacacggggcccaaccccggcntcccccccacggcgggggnggcgcagggaaaggccagacgggggaggccgcggcccccgggcggcaggg

SEQ ID NO: 617206 - DNA, 644 bp, Homo sapiens
ctacactgcacgcgccttcctgagagtgactattttctatatcacggggtaaatgttacgacgtaaggtgatcagccgtcagactgtatgtccagcagacatggttctgttcactagatcctctgtaactagagccagtttggtcctgtcacagcggtcctttcctggtggcatatgcgccgtatcgctgagtgcgttacatgaacgactgtgaaggatcctggactgtcagatatgtcaacggttaatcacagccgtcttcgataggtccgccatttgctgcaacttagcgctttgttctgtacttcactcagacgtatgatgcactactacgtcataatgcgtgctctcagagccatgctcatggcatactaaacggcgctgacagactgaccatttgagactgcgctcacttcagtgctgaggactcggactgctccctgcattgccggagcattatgcaagctgcactagtatgaacagcatatcctaacaggttcgtccctctaggcttatatgaccgatcagaattgcagtcctataaatgtggctcatgctgctacgagcaaggctcctgatgcgtcttgtagtctacactatgactctcttgatcttccgagccacacataggtgtatatcactcg

SEQ ID NO: 617207 - DNA, 215 bp, Homo sapiens
accagcctacttagcaaggatcgggaccctgtactgttcggtcattacttacctccttttttttttgagacggaatctcgctctgtcacccaggctgcattacaatggcacggtcccggctcactcaacctccatcttacccaggttcaagcgattctacctgcctacaggctcccaagttagctaggactaacaggcgttatccaccgcgccca

SEQ ID NO: 617208 - DNA, 427 bp, Homo sapiens
  misc_feature (1)..(1): n is a, c, g, or t
nacatgagtcatgtgtagatctctgtggtgatatgtgaattctcatataacatgtttctggaatgatatgcagcagcttgtgtgcatataagctcttcatgattctccagcattctaagtgacctggagtgccattaccattaggtcgacatctgacgtgctgtcttcagtttgatgtggtatgtcttccttgtctgtacatctatgtcacgttcggtctatatagtaaccatgttcatatgctaatgccaccgtaggttagacaatacaccttgtatcgctcggctaatatgcagcagtcgtctgtggtttcagtatttgatacccagtctctagagagagatacgccagaatacaaggataggtttataggccaggagcgcccgagtgtgctcatcatatgtgagcgtccgaagctcagatcaag

SEQ ID NO: 617209 - DNA, 225 bp, Homo sapiens
  misc_feature (66)..(66): n is a, c, g, or t
  misc_feature (143)..(143): n is a, c, g, or t
  misc_feature (198)..(198): n is a, c, g, or t
  misc_feature (206)..(206): n is a, c, g, or t
gatctcccaaaattctcccattgttggccacctcatccaccatcaaagcctctgagagggatgggncagacaaggcatgctcctcagagccaccatcccttcaacaaggacaaaaagtgaagaatcacttgcactcccatagnctccttgggcctagccactggaaggactgatgaggccagggcccctgggcccggngcttcccngcccccactgccatcactg

SEQ ID NO: 617210 - DNA, 125 bp, Homo sapiens
ccgtctagtcctggatagaggggctaggatagtcagcgagctggactggggttagaaagaaaacagatgtctagggcctagccctgttagtcagaaccaccagggaacagcaaagaacagagtga

SEQ ID NO: 617211 - DNA, 654 bp, Homo sapiens
  misc_feature (32)..(32): n is a, c, g, or t
  misc_feature (77)..(77): n is a, c, g, or t
  misc_feature (79)..(79): n is a, c, g, or t
  misc_feature (81)..(81): n is a, c, g, or t
  misc_feature (99)..(99): n is a, c, g, or t
  misc_feature (103)..(104): n is a, c, g, or t
  misc_feature (122)..(122): n is a, c, g, or t
  misc_feature (125)..(125): n is a, c, g, or t
  misc_feature (127)..(128): n is a, c, g, or t
  misc_feature (157)..(158): n is a, c, g, or t
  misc_feature (173)..(173): n is a, c, g, or t
  misc_feature (178)..(179): n is a, c, g, or t
  misc_feature (205)..(205): n is a, c, g, or t
  misc_feature (208)..(208): n is a, c, g, or t
  misc_feature (220)..(220): n is a, c, g, or t
  misc_feature (229)..(229): n is a, c, g, or t
  misc_feature (233)..(233): n is a, c, g, or t
  misc_feature (238)..(238): n is a, c, g, or t
  misc_feature (250)..(250): n is a, c, g, or t
  misc_feature (259)..(259): n is a, c, g, or t
  misc_feature (262)..(263): n is a, c, g, or t
  misc_feature (312)..(312): n is a, c, g, or t
  misc_feature (333)..(333): n is a, c, g, or t
  misc_feature (362)..(362): n is a, c, g, or t
  misc_feature (365)..(365): n is a, c, g, or t
  misc_feature (368)..(368): n is a, c, g, or t
  misc_feature (402)..(402): n is a, c, g, or t
  misc_feature (477)..(477): n is a, c, g, or t
  misc_feature (546)..(548): n is a, c, g, or t
  misc_feature (555)..(555): n is a, c, g, or t
  misc_feature (557)..(559): n is a, c, g, or t
  misc_feature (561)..(561): n is a, c, g, or t
  misc_feature (564)..(564): n is a, c, g, or t
  misc_feature (571)..(571): n is a, c, g, or t
  misc_feature (591)..(591): n is a, c, g, or t
  misc_feature (596)..(596): n is a, c, g, or t
  misc_feature (598)..(598): n is a, c, g, or t
tctagcgccgccccgcagaggcacctgccctnctgtaaccgctatctgacccacacgcagcgcccgcgctccgcgcncncnccatatgcccaggtgacnccgnnaatggaggagacgccgcngcncnncatgccctggattgaggtgcagtccctgnngaaggcagttgatgncctcnnccagtgtcgtgccacactcatgtacnctnatgtcttcgctntctccctcnaaangaatncccagcccattntctttgagnatnnccacgcagacctagagaatgccacagaggtgctctcgggctcccttgancgagatatttcccaagattcnctgcaggatataaagcagaaagtacaagncangtncagatactgtgagagtcgacgaagggttttgttncagcatgtgcatgaaggctatgaaaaagatctgtgggagtacattgaggactgagaatggccctgcataaaatgnactctgaaaactttaccatctagagtgctcatgcaattaaaacaaaacaaacacaaacaaggaggcacnnngcctatncnnncnccnctggtcngtagtaccagaattttttgntaatnanagtttaagtaaattatattgtaataaaaaggtagataaaccattaaaaaaaaaaaa

SEQ ID NO: 617212 - DNA, 258 bp, Homo sapiens
gcggagggtgactgggatcaattattaacctctctgagcctgagttcctcaaatggtacagtaaagggataatgatattgcctctgcgttagaggactaaatagcaaatcacttttttagtcatggtgataatttcctggtcctcaagtaataactgtctcataactgtaactatcttatgaagtccttgagagcaagggaaatggaagtggtggaaattcttcacagtgcccaccaagtgcctgccagctggctcag

SEQ ID NO: 617213 - DNA, 175 bp, Homo sapiens
aggctccagctataacgatatttggaggtcagcacggtgctcactgtgtcgacggaacttgtaccagggaggcatgcaccgagagtggtgaatacacgtacgaccagtgctccagtctaacacgatatattggaggtcagcacggatgctcactgtgtcgactggaactatgtcc

SEQ ID NO: 617214 - DNA, 507 bp, Homo sapiens
  misc_feature (167)..(167): n is a, c, g, or t
gacctagtgctgctagtaagtcgtatggcttgggtacatatctttgggtggatagtgcatcactacttgcttacttatatattaataatgaacaggcgatactctttaattttattcagattttggcttggctgtcccacaggcaagcagggagaattgtagctcangcctcagttgaagtgggcataatattagcaattccctttataatcatccattaaatttgatgaccagagggacgtcctcatagcttataacagaaaatagtgtctctaggagtcaaggggagctttcccaaatgttatctattgagcaagattaaagagacagatcacccaggaggctgatggtaggtggtgttaatccattagtccacacgcagataactcgttaggtttcctgagcatcccccttaatcttggctgcagagatagaaaaggagattgtagaaacttgccctgcagcaaagattattgatatgttttcctcttacatgactcaaaacca

SEQ ID NO: 617215 - DNA, 258 bp, Homo sapiens
gttattgagtgcccccacccacttcagacaccagttgcaagtccaggcttctgaatcttctgaccgacagacttcaagtgagggttcccatgccgccctccttgaatttgattaatttgccggagcggttcacagaattctgggaaggttcttacctacatttagcagtttattatataggatattacaaaggattcagatgcagagatgcatgggaagagatgtagggtagtgggcacagggattctctaggacctc

SEQ ID NO: 617216 - DNA, 335 bp, Homo sapiens
agtggtacagtgcatggtaaaaccagtatcacttgcaatacatagaagacaatctcaaaaataaatacataaattaaaatgaaacatgatcctttgcatcccaactttggaaaaccctgaaatgatatatgtatctttctttggtagaatagagtagataattcacaagttcatttctcttcccctctactttccacatatagtagccattttccaatagggtaaaataattcataaatgtacttgttttctggattcatctacaccaaatggctttagccaccatctttatctgtttgtgccattaactgtgctgctgagttaaaaaaaaaaag

SEQ ID NO: 617217 - DNA, 130 bp, Homo sapiens
ctaaatcaaccacctttgagacagtactcacgcacccgtcatagtcaccagctcctgactgcagcaggcaggctgtggtggcaccaggaccgctgctctcagaggttgtcaatccccccggttgatttgg

SEQ ID NO: 617218 - DNA, 246 bp, Homo sapiens
ttacgctcggccccagttattgtgcgtaacagtgaatcaagcgttagctaatgagacgactgggctttggtctgcgctttgtcggtgggagtgaagtgggtattcgggctactcattactcgaatgccgggatcagcagcaataacgatggtgtcgagagctattcgttgcactacacgatgccactgtaattcttcagaacaccgcaaaaccattgtgggagcgggcttgctcgcgaaagcggcg

SEQ ID NO: 617219 - DNA, 485 bp, Homo sapiens
caatgtagtccagtttttaagatcatgttccaagctaattgaatcccccttcaatacacactcatgaactcctgagggaccaataacaggcccaaccctgtggtataatgtgcccccttgctagactcaaaaaaaatactactttcataaaggggtgggagtattttggtgccaccctactttgcttggctgagtaaaggaataatattcaaatattcatttatcccagggccatttagttagtgctttttaaaacccaggcatgatgttgagtgccactcttgggtatatttccaaatttttgtccagtccctgcccatatttgaaatcatatattaagactttccaaaaatggggtcccgggtttttcagggcaacttgatcagtaaggatttcccctctgttggtaactaaacccatttactatatgttagacatgccattttttttttcccctccctgaaaaataaagtggggaagagcca

SEQ ID NO: 617220 - DNA, 119 bp, Homo sapiens
aacagctaaaggagcacaccgcgtctatgtagcaaattagggggaaaattaataggtagaggcagacaaacctacggagccgggtagatagctgggtggtccaaaataagaatctaagt

SEQ ID NO: 617221 - DNA, 192 bp, Homo sapiens
gtaggaggatggtgatcattggaggctgttgtcatacttcgtcatgggttacacccgtgatgaagcatgggggcgtcagcagagggggcagagatgatgacccttatggctcccccctgcaaatgagccccagccttctccatggtggtgaagacgccagtggactccacgacgacgaattccggcaccacg

SEQ ID NO: 617222 - DNA, 804 bp, Homo sapiens
  misc_feature (196)..(196): n is a, c, g, or t
gagagaagaagaggagaacagagttgtagacggaatcagcacgtgcagcgtagcaaagcatacgtgaggtaagagaggagatggggaggaacgaatgcgatgagtgcaatagcattcctagcgtgagatcggagtgaagaagtagaagagagtagatgagtgagataagtgtatcatagcgcaagtcgactagtanggaatgggaaaatatgataaaggggggagggaggaaggcacgccaccaccacggctccctccctcaacatacaatttttttttattttaaaaaaaataagagacggggtttcgccatgtttcccaggctagtctggaacttctggcctcaagcaatcctatttctgtctcccaaagtggtgggattacaagcatgagcccctgcatccatccaacacaaaatttttaaaatcggaatattttaaagccaatcacacaaattatttcccttataatacttcagtaaggcctttaaaaaatccccagtgatattattactcctaacaaaaacaataattacttaggatcatctaatatgtgggtcaaatttaaatttggtgttttgagatgggtcctacaattgggttaatcaaatgcattttttttaactcgtgtcccaagtgttttaaaaatctactggacttataatgacttaaaaaatgtatttctccttttaccttttttccaaaaaaggaaataatggccaaccatataatattggacattccctgtcaaaaaacaaacccctgttttgataacttgttgattgataaaagttttcccaattta

SEQ ID NO: 617223 - DNA, 133 bp, Homo sapiens
atctctgcttcaagctccaggctctagtgagtatggacaagctctctcccttcagctgactaactgcaactgactctctgacagctgtgctgtggcgcctggcagaatagggtacccgagctcgaacttcgct

SEQ ID NO: 617224 - DNA, 404 bp, Homo sapiens
ggcgaggcgggggcggtaatattgttgaagtgtgataggacgttgcgattacacgaggaccagtgactgtgtccctcaacgaacataatcgagcgatcgccagaagtgggaaccggagcaatagcaaatgtcgtaccatcgcatggcatttggcctggactgtttaccaacactccaggaataaactcatgcaagactgtatcagaccaaaacacaattactgctgcgaacgacatagggaagcatacacagacatccatcgatgtctacaagaccactggagcacagcaaaaacaggccaattgatcaccacaaccagacagatgccaggcatagtgcattgagatgcgcaacataagaacagatatggaaatggaaagtaaaagagaaatcacaaggaatgc

SEQ ID NO: 617225 - DNA, 128 bp, Homo sapiens
tctacaggatctgaatagagcatacccctcaagggtaaggttggcatatgtgctttaaattaggagtaggtttttaaattcgggggacatgccagtctagaactttctttagttgaataaatttgacc

SEQ ID NO: 617226 - DNA, 134 bp, Homo sapiens
gggtcgttcttcggtgggtcgttcttcggtgggtcgttcttcggtgggtcgttcttcggtgggtcgttctcggtgggtcgttcttcggtgggtcgttctctcgtgtgaatgagggttttatgttgttaatgtgg

SEQ ID NO: 617227 - DNA, 743 bp, Homo sapiens
gctgctgtatgacggttgctccgagcgtcggttgcccgacatgtgacgtgccatgccttgtgcgtgcattttctgccactgcagccctcaggcctgctgctatgtggaaggacacgagacttgacaaatttattgtgtctctgagttgccgaagtcaatgcatacaatttattctatgcgaccagtttcctcatgccatgcaacctgctgtcacccagtcatgcatccctattttaacgggtacagcctgttgtcaatggagagttcaagtgacctaacgccttgtatgactttgaccggggaaactatttgctgcttgacttctatcctttggatttcaccttctgtgtagtcctacagaaattgttgctctttacgtgaccaaagctaaacgagattttcacgatgtgacactgtgaatcttgtcgcagtctcacgtgtgattcccatctttaggccatcttgcctggataaagtacaccaatgacacgaatcgtggtttgagccagcattgaaagatctgcactcttgttctgacttatctagagctgattttcccccgaagacttacggtgtggcccgtttagaagcgttcctggtctttgcccctatgaaggtctcctcctgatttggcccccactggcgtcctccagctttgagcgtcacgatctccagtggcctcagccgttggaaaacctccgcttggggaggcgtcccttcttccaccttgggcccctgtcccg

SEQ ID NO: 617228 - DNA, 201 bp, Homo sapiens
  misc_feature (96)..(96): n is a, c, g, or t
  misc_feature (110)..(110): n is a, c, g, or t
gcagcggtctctatttcagtttttcctcctctactaaattttttcgaagtatgcaaacatggagttcccatcacggctcagtggttaatgaccccngactagtacccatngaggacacaggtttgatccctggcctcgctctgtgggttaaggataccatgttgctcggatctggcattgctgcagcagaccgcccttacc

SEQ ID NO: 617229 - DNA, 228 bp, Homo sapiens
aagtcgactgctgtgatttaagacggatcagtctaaccatgcgggtgttaggtagtcatcgattttgcgactcagagagatatttattcttgtattaatagcctccctggtcaataatctccatagtacccatacgcctacatcttcgatcctgactcctgttcctgtaattcacagcgagttccgtacgttcgtccgtatctcttcatctccatggtctctatagcc

SEQ ID NO: 617230 - DNA, 278 bp, Homo sapiens
cgaggtcgtctagaggatcccggaaaattagccgaggagacatgaggttgcgggtcaatccccggctcactcagagggttaagaatctggtgttgctgtgagctgtggtgtaggtcacagacatggctcagatctggtgttgctgtggctctggcgtaggctggtggctaaagctcctattagacccctagtctgggaacctccatatgccatagtatggccctaaaaggacaagagaccaaaaaaagaaaaaaaagactagcatattaataaacttg

SEQ ID NO: 617231 - DNA, 219 bp, Homo sapiens
tgttgtttgctatcagactgctaaggagagaagtttgtcatgcaggaggagttctcgcgtggatgggaaggctctggagaggttcctgcaggattactttgatcggcaaacggttctgaagagatacctgaagtctgaacctatccccagaagagcaatgatgggcctgtgtgcaaagcgtagtggtagcagagaatcctcttgatgaaatagtgaata

SEQ ID NO: 617232 - DNA, 126 bp, Homo sapiens
tcaagctttatacttcctcagctttatacttctctcatggctttttactgtcgtattgtattgcgttgtggaagtataatagggttgaggaagtctaaagcgttgagggggaactgaggtgttgag

SEQ ID NO: 617233 - DNA, 112 bp, Homo sapiens
ctgatgggggtctgagtcctttgtgctggatactggtctactaagaaaatatactttggtgatttttttctctctcctttcttatgtttcttttttcgtgtgcactctaatg

SEQ ID NO: 617234 - DNA, 258 bp, Homo sapiens
ttaagagagaggcaattttattcttccaaaaaaatgccccaaaagagggtgagcccaggagcccccctggccccatcccccatcctaagcagggtttgaaatgaggccaggcctgacgtgggcttgggaaaaactgacggagctccctgtggccttggggagggaaccaggcttccttttttgcttttggggcctgatgtggtcctcgatgatgagttcgatgccagcctcagaacgcagcccctccttcaaaattca

SEQ ID NO: 617235 - DNA, 105 bp, Homo sapiens
cggttgcattgacagctcccgagtcaggcatcggcaacgaggtcacagtttctggtcttcactcatcctcttccccgagccgaggggtccggcagctcgcaattc

SEQ ID NO: 617236 - DNA, 486 bp, Homo sapiens
  misc_feature (250)..(250): n is a, c, g, or t
ttttaaggtagaggggaattgtggatgggaagggggatgcgggggaaatgtggtcagtaatgagaaatcctgcgaataggctcccggctgccaggcgtttaagggggttaagaagggtggggtaatttccgtaaatgtaagtaaggttagggaagcgaggttgactggtaaggttgagaagaataatccgagtgctataggcgcttgtcaggaaggtagcgatgagagtattagatggggcacaggcgtnggtgtatgatatgtgggcggttccgataatgtgttcttgggaatagaacccggtgaggaagggcatccctgctatttatgtcgcattgccctatgttgatgggctccccaaaaggtatcggtctttccagcatcttacggtttaattactgagattcacactgtccacctatgattttaaaatctctaaagccaactgcaaagctttaaagatctcagatgacccaacctaattcc

SEQ ID NO: 617237 - DNA, 302 bp, Homo sapiens
cagcgggcgtcacatgtggtacccgttcggtatgcggtacagcctacaaccgctgtttcagagcagccacaagatggctgtgaggactaacaagtcgcagctcaactagaacaaatgcactacctggtctgctttctagaagtagttcaagccttgggactggtggatggccactgtgtctttgaccaaccagcgcacggctaggctctgccgcaactccacgcagctgtaccgcataccgacgggatccgtgcacgttaacgattactaggactatgcagaaaccagtccgacgaaaatca

SEQ ID NO: 617238 - DNA, 212 bp, Homo sapiens
  misc_feature (156)..(156): n is a, c, g, or t
  misc_feature (193)..(193): n is a, c, g, or t
ggtttatgtggtatggatgtaagtcctgcagcctgtgggcttacgtggtacgtatgtaagtcctgcaggctataggtttatgtggtatggatgtaagtcctgcaggctgtagggttatgtggtatggatgtaagtcctgcaggctataggtttatntggtatggatgtaagtcccgcaggctgtgggtttatncggtacagatgtaagtgcc

SEQ ID NO: 617239 - DNA, 117 bp, Homo sapiens
taccaaacttaatggacaggagcgcataatcgccgatcttcacgcgtgcagctcggcgctatcggcctgctcagtatggttcttcggcgtgtgcagtgtgggcactcggcgtgtgca

SEQ ID NO: 617240 - DNA, 878 bp, Homo sapiens
cttttgtgttgtgaaaatcggcgtggagtctctttggggtcctctttgttccgtgtgttccccttgttttgggggcccccccctgtggtgtggtacgtgtagcccgttttttctctgctggtgcccgttagtactttcctcacgagtgggtttactctgtccccttgtgtccccccttcacgtttgtgggggcgtcgaccctctgttgttgctccacactgggtgacctctgtcactgcggctctataaagggggtccctcatgtcctttcacgctgaattcccctagtgctcgtgctctgccccccttttggtgttccccacggacggcggttatagttctgtagccaccctctttttcctggttacgctgtccccccgctgtgtccccagcaagtttcctctcggcatcactccaggctatatcacgcgtgttgtacacttttccccaagccacttgtttccgacaccccttctctaagggccatttgtgtctccaaaggaggccttttgtgtgactcccacgactcttggggttttacaaagaggacttgtgggtatggaaagggcaaatgtccacccatagacggtggatatagcccccgcccccccggccgctggtcctagctatgttgcttggcccagtagtgtcagcctcttggaccctggccactttgagggggtcttttacctcccccttcacaggactgcagggggacccccatgcccaaccattgctgttccccctagggccctgccttcaaatggggcttttcgatttctgtgccctatgtaatccccttcctttccctgccctagggaagaggagacatcttaaaaagcgtacaaattaaaaaaaaattatgataaatttttgga

SEQ ID NO: 617241 - DNA, 934 bp, Homo sapiens
  misc_feature (19)..(19): n is a, c, g, or t
  misc_feature (569)..(569): n is a, c, g, or t
tcccgcggcaccattgtgnagccccctcggctgttcccggaggttccggtagcccccctgcccaggcgttctcccgccaccgtcgccgcgcttccgcagggcgtattccaccgaggaaaaggaatcgtatcgtatgtacgctatccagaaccgtccactctttcgaccctgtgctgatgcaagtaagggtgatgaccgtgtcttcctgctggcactgaggattatatccatataggaatgtcagcagagaaacggcaggaagaccgcttactagtgtctcaagggatcgctgatgattacggataacacaacagaagctagtgaaggcgtttaagagagagtttggctgcaatggtactgtaattgagctatcctggaatatggagaagtaattctaggctctgaggggtgagcaaggcgagaacatatgcacagttcctcgctagagatgggacgggttaaggaggatcagctgaaggttcatgggtccgcaagtgcttgtggctccctgaagcttacgtgaggactttcctctgcaaggagtagaagttccctttcgtctccctggntcaacaggtttatcaaacctcaccaagcttgtatgatgtaatcctgtttcgggggtccgccttttaaccttgggcacgtagatgtagctcgttacagtgcgaatagagctgaacaagagccatgctgtctagtctggctaagtccctccattttaaaccagaggtcaagcaaataggcgcctggcagggtccaagccggaaagcaaggcaataccgtcgtgtctcagcaaagcccagagccctagatacaaacactatggcggaacctcctcaggttcttccgctggagagttcctaccctagagatggacccccgaacgcccggatctaacgacagtcggggagggacaccagggcacaaaggg

SEQ ID NO: 617242 - DNA, 988 bp, Homo sapiens
cggtagtctggttgtctcgcccgccagtagaatggtgtctcccaagtgtgatatttccggggccagttttagtgtgttgcaggaccacccttcttgttgtgttcacagggtgcacccacaaggagagacagtttgaacacacagggtgatttgcggaggagaacccacaagcgtgtgtcaagagacacgacgcgggccaatttcttagagagagagcacgtcgggtgtcgaataaatacagaaccccatttgcggcaatggtgggcatccatttatgcagtaaatccccccttgtggcggatggtcccacacagcgtctcgaccgtgggtttccccggggggaagactctcaatattgtctggctggcaccacatctcttagcgcgcgtttcttattatggacgttttagcgtcctccggagccacgcgagttcccgccccgcatttgcggctgtggccgccccaccgctggggaggtgcaccgctgcgccgcccgcgccccgcttttgtttgggtcccgcggtttcccccaggagctttctaggaacctctttcttggccgggggtgcggcgctccctcgccagtggttcttatgacggtccctctctaatgcgtgcggcagtgattccgccccgggggagattgcttattggggtcgctccctgctacttctggtgagaaatggagggaggccccgccccacccgctccgcggagcgggcgcacataacaggacgcgcaccatcctcgcggagcccgagtgcgggggaggcgcggacgccacaggggggaacgacacaccgcccccgctgttgataattagacgacgagcaagtcccccggggggaaacaaccggggaggggaaggccaggtgaaagtcagcaggaaacaaagcaagacaatacaaaatagcaagtcgtccgcaaaacacacaaggggaacaacccaccacttttttcaaaaaaaaaacccttttcaaaccaaaac

SEQ ID NO: 617243 - DNA, 182 bp, Homo sapiens
aactcggcaccgttcgggggagagggtatttgtgaagtaagccatgatatcgtactatcacctatcgtacagggagcaatgtgaagtagatagaaaccgacctggattactccgagtctgaagctcatgatcacgtagagacgtattaactgcgttgaactaaacgaagccttgaatatgcg

SEQ ID NO: 617244 - DNA, 411 bp, Homo sapiens
cacgccgaccggtatcaaaacggatttggattcctatcttaaaactcgagcaccagtcactttcctgtctagatctgcgcagcaccatacagttatccaatgaacctgggaatcagaacaatctcaagctcatcaatgcatgtggtgctctatgtcgggactcaggccattgcgcatattccaaaacaagggcagcacactcttcaagtgagcaccactcactctctcagcacacagtggatctcttccagaactgtggctgtggacttggactctgaggctcgctaatctcttctggaatgcaattgaaactcagctccggtccccaaatagccactctcaatacttcagttgcaccagtgctgtaccttattgcagaggacaatacggaagcatccaagaacagatcac

SEQ ID NO: 617245 - DNA, 118 bp, Homo sapiens
aagaactctgtgagtcgtagcgtctagtgaatcgcgtcgactggtatggggaagatatcgccatctagtagctgtccctcgaagttcctcagatagtgggctctcaaaccagcggtta

SEQ ID NO: 617246 - DNA, 337 bp, Homo sapiens
  misc_feature (52)..(52): n is a, c, g, or t
  misc_feature (101)..(101): n is a, c, g, or t
acctagaggacccctctaaatggctgtataatttgtttctaaactgtatatntcaaagaatttcctgaggttcagaatatattaaataaatgaatgccttnaccttgctatcactaaacctcaatatgtatctaaaattcagaaaaaacaaaaccaaaacccgggccttctcacatgggtcagccctgcataacttgggagctgctctggaaagaccttctcttgccacttcaccccttgtcaggtgcactcctgcctgggacaggtgggtgcagagcctggggtgagggaaacaacccctggtctgacctctctactcaggacagccatttaggta

SEQ ID NO: 617247 - DNA, 419 bp, Homo sapiens
cttttaccacaaggagaacggacgagcctaatgtgaacaggtttacgattgtctagtttggatatctttcaatgtgctctggctcatctgggtctgttcccctatttgtctggttcgtggacctgatgtgattaaggagggggattgtggccctgagtgtgagaactctatagagaaggtggtgctgggagaaacctttggattggttggtttgcacatgaaaggggcgcccctaggagagttgtttactttctgggaggtggctaaccctagaagtctctccaaggtcagcaagacctcagatgtcaaagcatcagaaaaaacacatggtaaatacaatccccaaggtccagaacaggtcctggtacttaggaagggctcagtaaatatttgtttagtgagggagagaagaaaggatg

SEQ ID NO: 617248 - DNA, 942 bp, Homo sapiens
ataaaaaaaataggctatgtacgaggcctggtgtaacgcagctccgcggctgcgtcgagctccctatgcagtaccctccatgtacccgtgcgccactactacccctatcctaaggcctgccgcttaccccggggtacctatggaagtaatggaagtgacccctcaacctggctcatcaacagagcagacgagcagacctgtttattactgcaggcaacactacgaacgagtgctactttcttgtcacacaaacggctgcagcatactctttctcgaacacgccactgcacgcctgaccaccacgctcacgacccaggctcatctctcacctgtgcccttgcaacacgggaatagccacctactgcacacaccacgctcctcctcatccaacgacgacgactggacacaacgggcccacgcccgccttgaccccacacaccgactcgacaaccgccccacgccacgacaccaccacgaccacacggaccgacccgcctgcccacctcctccccacccactcctcaccacacacccacctcctgccccaccggactgcccgacgggcaacgacgtccccatcccacacgacacgctacacgcccaccttccaacacgacgacacactgcccctggcctagacgacatatcaggggcgactctctccgaccccgcggactccccgaccacccccctaccatccacctctacccttcagccaacaacacgaccgtgaacgcccagaccaacgccactgcatactacggcacgccaccacgcccccaccaccgactgacctcacacccaccaccacacgcgacgccgcgcccacccacgcccttgccaccccgcccaccgcctgccgcgccctccccgcgcgccgccaccgccagacaacccggcccaccctaaccacaacggcgacccggccccctctcacggacg

SEQ ID NO: 617249 - DNA, 155 bp, Homo sapiens
gggtgaggcacagaaatcatgaacatctcaataaggtagtgaacgtaaccctgatctgaagactgatggttaatgcattgacacatgtcgcagcatggtggccgtgatggatagcgacaacacagacgatcaattccaggaacgacggggacgaa

SEQ ID NO: 617250 - DNA, 371 bp, Homo sapiens
  misc_feature (92)..(92): n is a, c, g, or t
  misc_feature (347)..(347): n is a, c, g, or t
tcctctctaaggagtatggatttgtgcttctcactggtgctgccagctttgtgatggtgctccacctagccatcaacgtgggcaaagcgcanagaagtacaaggtagagtaccctgtcatgtacagcacagatcctgagaacgggcatatgttcaactgcattcagcgcgcccaccagaacacgttggaggtgtaccctcccttcctgtttttcctaacggtgggaggtgtttaccacccgcgcatagcttctggcctgggcctggcctggattattgggcgagtcctttacgcatatggctacttacacaggagaccctagcaagcggtatcgaggaaccgtgggntctctttgccctcttttgccctga

SEQ ID NO: 617251 - DNA, 295 bp, Homo sapiens
tgtagcaacaaggcggcagcgacatgctggtccagctcgacaacggttcgagcatcaccatcaagcaaggtgagaccatgggcacggtgaccgtcccggcgcctaccgatgacgtgttcatcgacaagagcacccagaccgtcaagatcaccggcaccaccggcggcaatttcgagggtgtgaccatcacacctgcgggcgccacgaccaccatcaacgacaccatcgacgacgtgaccgtggtactcaaggccaccggttcggtcagcgaaggcgggcagatcgtctacaccgc

SEQ ID NO: 617252 - DNA, 414 bp, Homo sapiens
tggtcacatacctaaggaagaggtggacttccccagctttgcatgagaactccccagagagttgccaatactccgtgactccacttatcttcctactatcctcgtgttgaaaatatattatgtatttaacttagataagcaataggtgcatgtgggttgaaattccgaaagacacccagaagtatacagaggaaagcctcactctcaatccttctcaaggtttgctaattcctcttgcatagccaatccgttcttccagctttgtgtttatctttccagagaagtttcctgtgtattaagcaaatatgtatatctttattcttgctcaggattttcgcaaacagcacctgtctaagttcactgttctgaactttattttttaaattaaaaagatatggctatgtaaaaaaaaaa

SEQ ID NO: 617253 - DNA, 186 bp, Homo sapiens
atctaccgatcgcttattgaggtccgggtggcggacagttgagtactacctggagggcacgtgcgtggagtggctccgcagatacctggagaacgggaaggagacgctgcagcagagggaccccccacaagacgcatatgactcaccacgcgtgtctctgacccatgaggccaccctgagggtgct

SEQ ID NO: 617254 - DNA, 191 bp, Homo sapiens
  misc_feature (10)..(10): n is a, c, g, or t
  misc_feature (25)..(25): n is a, c, g, or t
  misc_feature (57)..(57): n is a, c, g, or t
  misc_feature (102)..(102): n is a, c, g, or t
tgtgttattnaggttgtgttttatntttgttggtgttttttgtgggattgggttttntgggtgagagattgaatttttttttttatttttggtatttggttnttgtggagagggttgaggttggggggttgttttgtttttttattttttgttgtgttttgtattttaataaagagaatttgtttttttta

SEQ ID NO: 617255 - DNA, 249 bp, Homo sapiens
  misc_feature (91)..(91): n is a, c, g, or t
  misc_feature (198)..(198): n is a, c, g, or t
  misc_feature (213)..(213): n is a, c, g, or t
aaaaactgtaaaaaagcaaaatgacacagaaaaacaatcttattccgagcattccagtaactttttgtgtatgtacttagctgtactatanatagtggttgtatgagatggttaaaaaggccaaagataaaaggttctttttccttttgtctatgaagtgctgttattttggcctgtttgatgtatgtgtgaaacaantgtttgtccaacaantaaacaggaacttttattttgctgagttgttctaac

SEQ ID NO: 617256 - DNA, 362 bp, Homo sapiens
gagctgctaccttcaagagaagagacgagatgggaggatcacttgagcccaaggattcgaagctgcagtgagctactattataccactgcactccagcctgggccacagagcaagactgtgtctcaaaaaaaaaaaatcccggttttttttccttttttcttttggtcctattttggggaaccattaccctctattaatctattaaaccctctcggtggattttttaattccggtgattataatattaatttcctaggagagctttttctggtcctcacagtatctgtttttaatagcatccttcctttttggcttggtggttgcaatatgtttacccctctgggggtcctaattaatgtat

SEQ ID NO: 617257 - DNA, 167 bp, Homo sapiens
ctctgagcacgctggcaggcaaactgagggtctattagggaggacagtatggactgatttccctatgctcatttcgtcctctttccccagacacccccaaagtgtcgctgatgccagcaatccttgcacgggccgccccaggggaggcaccccctggaattgctcag

SEQ ID NO: 617258 - DNA, 432 bp, Homo sapiens
ttttgtattttcagtagagacggggttttcaccatgttggccaggctcttagttctttttgagcatagtccttgttacttcttgaactcaggccttggagtccttggtacctttttttttaaatttttttgagacagagtctcactctgtcacccaggttggagtgcagtggtgcaatcttggctcactgcaacctctacctcccaggctcaagcgatcctcctgcctcagcctcctgagtagctgggattacaggtgcacactaccacacccagctaattcttgtatttttcctgtagagacggggtttcaccatgttgccacaagctggtctcaaactcctgagctcaaacaatctgcccgcctcagcctcccaaagtgctgggattactggtgtgagtcaccacgcttggcctcctgtctcttaaaaag

SEQ ID NO: 617259 - DNA, 799 bp, Homo sapiens
ggaatcttacagatctgggtggcatacgggggtggggattctgagtgtctgggacgactccgggatgcttttgttccgctagggtttactgggcgtgcctaaccgttactcccggagtacctcgatctccattgtaggacgcctatgcggccctcctaccgtggcgtgcccttctggaccaccaaaggacgggaagggctgtacagagcaggttacgtcgcacatgctgtgctcggagagcccacacgaagacctcgagcgacgttgaacttggaagtacgcgatgttcgatgttgcaatcgggtgctagtccgttcagagacattatagctggcatgcattgatacgcaggctccacattcgtgccttatgcatacgtacggaaatagcccattggagaccaagggtcacttgactggcactaggagaatggggttggagtaggctgtgttttcatggactggagtatctgccgaagatgaccgggcatggacatagatggcgtggacgagtcgggtgaatgcatactagtgtgactgagtaggaaactcgtcacaactgcgagggtatattgaaccatgggatggtggatttgggctgtggagattgatcctggtagcccagaggagaggagaatggttgggccaatggaggtcaaggcaaggaaagatcggtagagagtattcaagtactaataatcattgagatgattacgtgtataaatctaagagtgatgcctaaatggccccgtagaaggtgctgctgggtggaatgtcggggttgggaatatggaaggagt

SEQ ID NO: 617260 - DNA, 913 bp, Homo sapiens
agagcggtggtcgtgggatagaccagcatgaggtcgataatcttcgccaattacattgctcgcgatacccggcgcctgggggccaccattgacgtggaacactcccacgtccgattcctagtggaacctggtgctgaacctgtgggactgtgggcggtcaggacaccttcatgggaagattacttcaccagtcagcgagacaatatcttccgtatcgtgtatagtcctgatttacgtgtttgacgtggagcatgccgctgaactggaacaaaggacatgcattatctaccaagtgccgtgtctgagtacgtgccatctctccattgaagcattctcctgatcgccataaaatcttctgcggctggtgcacgaaaactgtgatgctggtctcaggaggactcatgcgtgagctgattttttaaagagcgagaggaacgacctgaggtcgtctgtctcgcccgcgtggacgctgtgctgggtctgttctgaacgtccgatctgggatgagacgctctacgaaagccgtggtccagcatcgtctaccagctgattcccaagcgttcagcaagctggagatgaagcctcgaggaattttggcccaagatcatcgagggcgatgaagttcgtgcttgttcgaaagagctacattcttagggttatgtgcacactaccagttgtaaaggagctgcggcgatgtccaccgggttgatgaagatgaggaatgattcattaacagtcgaagtgagcttgagtaaatggcgctgcgttcagagcatgaaagttggattccattcgtggtttcatcgagttctactcaatagttctgatgttggctgtagatcggatccttgggctttgttaattgagcggaaattggaatgggaatgtgccacattcttgtgatgaagtttga

SEQ ID NO: 617261 - DNA, 267 bp, Homo sapiens
taaacatcaacgcttcatgggatggctggctgcagaagcaactggcggtgcgcgactcagaacctccttgtgctagaggcgctaccatcaccttcacgccgtcccaacatgggtcacgaaacaacagcagcacagggttctactgctgtgagggtaaactaactcagtggaatagggctaggttacttcgggctgtcccactcataagtttggctgcattttgaaaatagctgatctaaataaaggcatgacaggcctggacatgaa

SEQ ID NO: 617262 - DNA, 391 bp, Homo sapiens
ctacgtggcttcattgtgtgtcggtcaacatgtactttctcctactgcttgctttggtaagaatgatgggttatcgggaggctgaggcacaacaatcgcattaacctgggaggtggaggttgcagtgagccgagatcgcaccacttgagcaacagagcaagactgtcttgaaaaaaaaaaaaagacaagaaccaacaatgggttagtgagaaacaaaacacaaattaacagtccccaccacaaacctagtgatgcacaggatgaacacttagaagacgcttccttggaatattacagacattcttaaatctgcttataaatgggtcccttctttaaaagctcaggaatggtggccctaggtaggcacacctgagtgggtattacctgcaat

SEQ ID NO: 617263 - DNA, 381 bp, Homo sapiens
ttgacatgatacgactcgagttcggtaccgtctcatcttctgactccattcctttgagtccattccattcgattccattccatttgagtcccttccattctagcccattacattcgagtccattctgttacagtctactccatacaagtccattccattccattatttccattccattccattccattccattccattccataccattcaaagccattcctttcgattctattccaatcgagtcccttccatttgactccattccccttgtgtccattgcattccattccactccaatccactccactccattccattcctctccactccattccattccattctattacactccacttcactacccttcacagcattcca

SEQ ID NO: 617264 - DNA, 117 bp, Homo sapiens
tgactctacaggagttatgcggagtgcatggtgcgggagacttatcatggcaggaggtgaaaggcttttttttttggagacagagtcttgctcctgtagcacaggggggaatgcagt

SEQ ID NO: 617265 - DNA, 134 bp, Homo sapiens
aagtcctcatggcaccatgctgacagcactaaatcactgtaaattccttggagagggctacagaattgcagaagttcagaaaaattactttggtcttttacatgtcaatattcagcgaaagaggttctattctc

SEQ ID NO: 617266 - DNA, 129 bp, Homo sapiens
tgagtcaacatgcgcctccctatctgaatttgaatcgagttcccccagataatgagacagaggcggaatgacctctactgatgcttcctctttacttcagtaaaatccccgttacaccctgaacaatga

SEQ ID NO: 617267 - DNA, 153 bp, Homo sapiens
ttatgtctgacccaccagtaatgacaaaactgtcttaacctcatttttttttttggagacaagagttcactctggtggcccaaacgagagcaagggcaccatctcgactcacggcaacctcggccggggcaacagagcaagattccatctctc

SEQ ID NO: 617268 - DNA, 779 bp, Homo sapiens
tctggggagcgcagacaggcatgtgcgaagccgtctcctggctcgaacaagctggcgccaatgatgcccatcctggggttgggtacctggaagatcccctccagggcaggtgactgaggcctgtgaaggtggccattgacgtcgtggtacctgccacatctgacttgtgccccatgtcgtcacccagcaatgcagaatgcagtgtggcgggttggcccattcagggcagcaagctcagggcagccagtgtggttgcacagcgtgcaggcagctctctccactctgtcgacgcaagcctgtgcgtgcacgatacccactgagaccaggtgcctgtgtgcacaaggacgacctgagcagaaaggacactcagaccgaacctgacaagcttggaacctaccctgtgaccctcatcacgctctacttccagctgtggcctggacctcggcacttcatagagcccctggagacacgtggacaccttttctcccccattatgcgccatgcaggttcgcgcgcaacactaggtctgggctcacacacacgatgcacaaccccaatgcatccctcgcgcaccacgatgggcgccgggccccatgggaacagcagccatggacggcgacttgcaactcgcgcctggctgcgacaccgcctacttgggccgctcgtcccacaccttcacacaccgaatctccccgtgctgcgcagcctgccccgatacaaaaaacacgtgggcctcgcaccgtatcacgacctgccatttcacccagaattgaggtgcc

SEQ ID NO: 617269 - DNA, 180 bp, Homo sapiens
cggtaagatgggtgcaaggtgctcctggaaagctcacccagcacagctgccctgagctcggggcttggttctgtccctggggatatttatatttaatacaatttttatataaagtacacatgagaaatagacgaatatacaaatctggaggcggtatggggaacgaaactgtgagtggac

SEQ ID NO: 617270 - DNA, 1740 bp, Homo sapiens
  misc_feature (907)..(907): n is a, c, g, or t
  misc_feature (1003)..(1003): n is a, c, g, or t
  misc_feature (1341)..(1341): n is a, c, g, or t
  misc_feature (1352)..(1352): n is a, c, g, or t
  misc_feature (1374)..(1375): n is a, c, g, or t
  misc_feature (1466)..(1466): n is a, c, g, or t
  misc_feature (1475)..(1475): n is a, c, g, or t
  misc_feature (1480)..(1480): n is a, c, g, or t
  misc_feature (1496)..(1496): n is a, c, g, or t
  misc_feature (1533)..(1533): n is a, c, g, or t
gcgtgccgatgtgcgaggggggtagacgaatgggttgttgtgcgtcgtgcgttcatgtaagtctgactatggtctgggcaccacgcgatgctttgtgggacgctcgccaccacaaatcgtctctgatgagtctgtgcgagacgacgatgaatgactccgcttgccgctctgtgtatagtgacacactatgtgtgtggccgcccctcgtgggggggacgcccacactagtcccctcgctcgctcgtccgccttttttgatagtaagacggtggggggggtttcccgccgttctgtcgggtggcaagcgcaaggagcacaagtgtggtgcgccctctctccgcgggtttgttgcgcgcggacgatctccgggggggctacccaccgtcccagtggcgcgcgcgcccctccgaatggtgagagttgtgtgtgtcccgcgcagatctgtgcgcgccgcttttgttagtagaaggtacccccctgttgttgtgaggagccgggggtggtgtgtgaagagctttggggaagatatctcccccccccgccccccaggtgtgtttccgcagacaagactgttgtgtgccccgccgcgtttgcccaggcgcccccacggggggagaggtcgtgttcggccgttctgccgcgtagggatagcctcctctggggcccccgcctggggtgggagggccccaaatgtgataaggtggatccttttgtaggggccgccaggacagatgtgtgttggtgtgcccccgcgctgctgtgggtggggagatgtcgcaggggagcgccccccttttgagacgtgtttgggaggggagccgccccctgctgcgcgcggccacccacagtggcggcagcacacacgcaccccgttggcgcgtccacaggctgtctgcgcgccaccacncgatggtggccgccgccctctcttctttcaaaaggctctgtttgccccaacagagagagaagaagcgcgcacattgctcctttatatgggacaagngtttttctccacaggcgtccccctctgttggagataagacacccccctcctcctctttttagaatctcgctgggtttcacagagccccccaaccggcacacattgtcctgatgaggctttgttctcctcttctcgctctgggttcccacacatcgttgtgtgagaagtgtggctctctctcgaaaaggggggtggtgtataaagatgctctgtcgagaagcccgcaccgagcacaccacagcgccccttcggcgctataacgcctgtggctccacagctttgcgttgtggaagaccttcgtcgtggctctcggggagaactcgcgagagtctcacagncccccacagcncttgtgggaagagaagggcgcnncctgctgtggagagcgatatccttgtcacagctggagaagcgccggcaggggcccacagggtctagtggtgttgagatgtcccacacaggncacaaagcntgtgntgtaagagagagaganaaaccacgcgaatacacggggcgcttttctcatgaanattgtgtataactcgggaaaaggaaagtgacgcacaacttatagatgtgtcaccacacttaatcaccccacagtgtaccacaggaattatgactgcggtttaataatttaaactcttgtcttcacataaggtgtacccacatttaaagagatgttatttaatgctaagatttaactgctttaataaagctctattttttaatatcca

SEQ ID NO: 617271 - DNA, 278 bp, Homo sapiens
catgttcagtcattggtacatattttcacgaatatttgacttcagagtctcagcatttttctaatatgtagagtggctggacattaagaactttactgcctctgcgaaattggaagaattttcatattgatttaacgtgtagggagtcagtggcacattgatggggcattattcatgggcacttagtcacatacatggaatcattagattgcatttccagcccactttactcaacaatgggatcaatcgtgcacattttcaacatttgccttatgcaa

SEQ ID NO: 617272 - DNA, 142 bp, Homo sapiens
tataccctgtgacagccagcagagcacaatgagagagagagacctcactgctgggagtcctgccacactcagtcccccaccacactgaatctccccttctcacagttgccatgtagaccccttgaagaggggaggggcctag

SEQ ID NO: 617273 - DNA, 162 bp, Homo sapiens
aaggagataaataaagagtatgggccacgaactcacgaaacgggaaatatttcaccaatcggaatcaccaccaccagagcacccccacccaccggcaaagaggcttttattgttgtgcgctctctattccgtgaaatttaaattcagccacccacgcgcacg

SEQ ID NO: 617274 - DNA, 675 bp, Homo sapiens
gagcaacggggtgggggcacacgtgtgcccagctgccagccctctggaaagccgtccagccgcggtgaagcactaccagtcctgtaatggcatggccaggaagcccagcagagctgataagatcgaacccttattggccaggttcagtggctcacgtatgtaatcccagcactttgggaagccaaggagggaggatcacttgaactcaggtattcgagaccagcactgggtctacatagtgtagaccacattcttctacctatgaacttatataattaagtttagtccaggccaaacggttgactataagtgccttgttagtccctagccatctgaagccagaggatcgagttgaaccagggagatcatggtcacagtgaactatgattacgccaacgctggggtcaccatatgcaaaggatctctgtcttctaaaaaaaaagggggggcgggggacgggtgggtgcagtggctcacatctgtaaccccagcactttgggaggctgagatgggcagatcacttgaggtcaggagttcgagaccagcctggccaacatggtgaaaccccatatccattaaaaatatttaaaaattagccagacatggtggcacgcgtctgtggtcctagctcctcgggaggctgaggcaggagtatcgcttgatctcgggaggcta

SEQ ID NO: 617275 - DNA, 186 bp, Homo sapiens
  misc_feature (179)..(179): n is a, c, g, or t
aaatttttttaaaatttgatttgcatttccctgaagtttatagttatgttgagcattttatcatatgcctattgaccatctatatgtttatagttagataggaaggataagttactagtgttcaatagtactatagactgactataattaacaattcattttatattttcaaatagctnggaagaa

SEQ ID NO: 617276 - DNA, 647 bp, Homo sapiens
tcgaggatctcattcagtcaatctgttgcacttaaactttttaatgcttcctaccatgtttaatacaggattttccctttagtcataaagccgtcttagaatgactccaggactgtaagaatgtgagtcagaaatttatgtccagactgtgatattgttatgctcttggattcccctgccaccgttgtcactgggctagtgagcgaatttattattgacttcacagtctcttttagtgactttgttcctataacttttctttactccagaattactctttctcttgcagtctttttcctatgcctcagaaaattcttattatttacttcgacattataagcatatttttactttctctatgagtatcttaaaacccactcatcctttcatagaaccatggaagtctgttataataaaacttactattccatagatttgcacacaatccagaacaatcacgctcctataaatcctattgagaagaacaacagggactccactttttgcttcccatcactgctgggaggacaagcatttgagcatttctttgtcccagtttctactggagaaactgtgcaaggacatcatagaagtacccacctcacaggatcgtcattcatgttcaatgagttctacatgttaaaata

SEQ ID NO: 617277 - DNA, 432 bp, Homo sapiens
  misc_feature (280)..(280): n is a, c, g, or t
agcaaggtgatcgtgcgcggctacaagtgggctgagtaccatgcggacatctacgacaaagtgtcgggcgacatgcagaagcaaggctgcgactgtgagtgtctgggcggcgggcgcatctcccaccagagtcaggacaagaagattcacgtgtacggctattccatggcctatggtcctgccctgcacgccatttcaactgagaaaatcaaagccttgtaccccgactacgaggtctcctgggctaacgacggctactgagcactcccatcccggggcncttgcctccagcagccacttcagagcccccgcctttgcctgcactcctcttcgagggctgcctgtcctgctctgcggcagcctctggtgacgtgctgtcctccctgccttggagacaggctagcctggccacagaattaaacgtgttgccac

SEQ ID NO: 617278 - DNA, 1589 bp, Homo sapiens
  misc_feature (476)..(476): n is a, c, g, or t
gttgtgcactctccatcctgctgtgcgctctcgtcggtgatgtcccagccatgtccgacgacgagagaggtatggtcgaggcagcgtatccggggaagacgcctcttcgccgcctccgaaaatcgaggcagcgatcgaccccctagcatcccgtcggcctccgataggggccgtcgccgtcgccgcactcgccgccatctgtctgacgctgtcctagtgcctcactcggctttggaggctatcgaacataggtgaagctgcagagtccggccggcagcgcccccggttccccgtgggcccggccagctgacgctgcgtctgtgggcctgcggtgctcaacttcgcgagacctcaatggctaggcaggggctgtacgaccgtctcccgcctctgcctgtcactccgcggcatggcagcggcgcgggtgttgtgatcgcacttgggctgcaggggtcagcgaccgcaaggcaggagancgggtgatggtgttgaaccggtcagggatgtggcaggaagaggtgactgtgccctcggtccagaccttcctgattcctgacctctgaagaggttgggaagtgaccattatggatgtctgggccctgcccaaggcgacagggagggtcagagggaggccggctgcttacctgacccaccaccctttcccacgggaactgctgtgctgctttttgtcgccaaggttagcacagtcaccccctgtatgtgtaccatgtgctttcagcatcatgacctcatcttatccatcccgataccttgagccctgcgcagacatccgccaaagaatagaaagcgtcagctcaggatataggggccaatctctgtgagtccagcatgtaccgtgtcatctccctagatgtcccttcagacctgggactgacacaggatgcccgactcatgggctatgacacagattacccaatacctacaggtacctctggtacccgcagagcttccttaagccacaatatggcgataacttccaatacatccaagggtttcactgcacacttctataaaccaaggcatgaactcattcacaaaaagggaggggagaaatcaaagaggctaggtccaataaggttaaaacagtctgggaaagggattacagaagaacacacaaagctatagacgtgaagattctagttgggattatgtactacaagtgaattaagagaaggaaaaaacctgtgattgtagtgagtgtggagggagagggaaaggagggaaaccgtgggcagccacaaacaaagaaacacagaaagacaccgggacatcgcccgaagcagacccatccagtagaacgcaggataggcaacagaggcaggacgcacagcaatccgcacaagtaaccaacaaaagactggaccaaaaaataggacgaagagagacaaaatggagtgcggacagcacaaacgaacagcatgggcaagcaagggcacacaaaagggtgccaaaaatggggtcaggacgaccgggagccgacaaaaagaccgggagaaggccaaaggtcggagaaagagccaaacaaccaagaagcaaaaacggggacagcacaaccagagccagaaacg

SEQ ID NO: 617279 - DNA, 708 bp, Homo sapiens
  misc_feature (476)..(476): n is a, c, g, or t
gttgtgcactctccatcctgctgtgcgctctcgtcggtgatgtcccagccatgtccgacgacgagagaggtatggtcgaggcagcgtatccggggaagacgcctcttcgccgcctccgaaaatcgaggcagcgatcgaccccctagcatcccgtcggcctccgataggggccgtcgccgtcgccgcactcgccgccatctgtctgacgctgtcctagtgcctcactcggctttggaggctatcgaacataggtgaagctgcagagtccggccggcagcgcccccggttccccgtgggcccggccagctgacgctgcgtctgtgggcctgcggtgctcaacttcgcgagacctcaatggctaggcaggggctgtacgaccgtctcccgcctctgcctgtcactccgcggcatggcagcggcgcgggtgttgtgatcgcacttgggctgcaggggtcagcgaccgcaaggcaggagancgggtgatggtgttgaaccggtcagggatgtggcaggaagaggtgactgtgccctcggtccagaccttcctgattcctgaggccatgacctttgaggaagctgctgacttgcctcgtcaattacgttaccagactactatggtcctctttgacttcggcaactacagcctggccacagcgtctgggtacacatggcttgcaggtggtgtgggtatggctgccgtgcattgtg

SEQ ID NO: 617280 - DNA, 574 bp, Homo sapiens
aatgagtgtggtgcattgcctgcttcccgacatccatgtccagtgcctgcagataccagtgtcctgaaatgagtgatggttgatttgacatgatggccccatccatcacataccatgatcacaaaatgttgagaattgatcgtacacatgtgaactgtgatcaccatcaagtctaccgaacgtgatgcaatgtggggcatatgggaacgatgttgatcgtttttggacattcctggctatggattcagcaagacagacaacaactatggtaaactcatgtggtaggaaccaaataggacaaaaactggttagagactatggggattataacgtttttgggccccatcatagatgtgggcacaacccgagtgagaacaccacttggagttaggagacacaacaaaaacccatcgttgtggatcgcagagactgatagtaggtgtagctgtagcgaaccagcccaacccgccaacattatttcccgagacgcgagaaaaaacgattttggtgagcaaaaaactatttaccaaagcacaagatgaaaagcgacgagaacacagaccctgagtcccgc

SEQ ID NO: 617281 - DNA, 564 bp, Homo sapiens
acctcattttatgggcaagcaacactcttattccaaaatcagaaaagacaattgtaaggcctttcaataaaaaaattataaataaaatataaccaaccaaccccaagtgtatgtttctaaaaatcattatcaaataggtttatttcaggaatgcaaagatggttcaacatcagaaaaatctattgacatgatttacctcgtgaatggactagaggggaagaattgcatgattatcagtacagattaaaaaaggatttgatagcactggatctctatttattgtttaaactctcagaaaactagtaatggacagaacattttcttaacttgatcaaaagctacctatttaaagactgacagcaacatcactatttattagaaaaactttacacagcatctcccatagaagcgagtacgagataaaggaatatcatgtctatttctcaaattcgtcaccaggatgaatagaataagataagaaaaatgcataggaagtactggattggaaagggaagaacacactgccatcatatgcagatgatgtgattacctacacacaaagcc

SEQ ID NO: 617282 - DNA, 352 bp, Homo sapiens
tgagacagagttttgctcttgttgcccaggctggagtgcggtggtgcagtctcggctcacggcaacctccgcctctcatgttcaagctattatcctgactcagctgggattgcaggcgcccaccgccacacctggctgattttggtatttttggtggagacggggtttctccatgtcggccaggctggtctcgaactcctgacctcaggtgatccacccgccttgggctcccaaagtgctgggattacagccctgagccaccatggctgacaataataaaaaaattttaaagcataactaaagatttataaattgttgcggttgtaacaagtatttactgtaccagtattgt

SEQ ID NO: 617283 - DNA, 263 bp, Homo sapiens
accgtaatatgtacaacttaaatgaaacggaacagtgcttgaaatacacaaactatggccgggtgcggtggctcacgcctgtaatcccagcgctttgggaggcgaggcgggtggatcacttgaggtcaggagttcgagagcagcctgtccaacatggtgaaatcccgtccccaccaaaaatacaaaaatgagccaggcgcgatgcctgtaatcccagctactcgggaggctgaggcaggagaattgtttgaaccagggaggcg

SEQ ID NO: 617284 - DNA, 576 bp, Homo sapiens
ccctcaaccaccagggccaagaataattcaggcttttcttcaaacacttttttggcccctgggacttttatattaaagtgaccattttttttcacccaggggaaatttttataagggcccccttgtgtaaaggggcaggaacttcatgccagtaccagttgtggaaaactcaggctttgtccccccttttgcccatctttcagggaaagccctcaagcctgttaattcatgggggggttacaaaacttacaattccagcctttaataatttaccagaaagtaaataaattgccgggcacagtggctcccccctataatcccagccctgtgggaggcttcagtgggagggtccccccaagtcaggagttttagcccagcctgaccaacatggtgaaaccccccctttgctaaaaatacaaaaattaggtggtcatggaaacaagtgcctttaatcccagttgcgcgggagctttaggcaggagagctgcttgaacctgggaggcggagtttccagttagcttaaatggggccattgcactcccacttaaaaaacattctccgtcagcattcaaacat

SEQ ID NO: 617285 - DNA, 856 bp, Homo sapiens
ctccctgaaggaggcctacaggtgttccaatccttgacgccgagcccctgcagagcttcaccaagatcttgtctagagatgaacgcacctgaatttcaggggctaaaacgcttgagcgctagacgatgcctagcttcctcgttgaaccccttcagggtccaaggattgctgttggccaatgggcaagtgtcagtggtgcctatgaaaatctctcggatgctgctcgcgagggctcattcgaccctggggaagcgaacgtgtacggaggtttctagtcgagtctttgacccgtcgcgtctgggtttacctctctcgtcggggctcacgcaacgcatggtcgccgctggacagtggtgtgttttacgctggcttgaaaggaatatactgggctgaattattgtcttccgtgaggagtgagcagctaacgcgccagagtggacgagactaggggtatgcctagacagctgtgctgtctcggaaagtttggagtgtacgtacttcttgcagggccccacccatgtattgattctagatcgagctctggagtcagaggcagggagctgttgcaatgtgatgcacatgccagacattgagcaacttagtgaacgtgatccctgatgcaaccggtctaagactaggtgagtctaaatgtaccccaatgttaactgaagcggaaataggctccgcgagctaagggactcgccgtacgggtctcacacgtgagtaggaggagggcctgggatctgaagcctcaagggtcagaggccagagccgactgccgtaagatgggtgctgagaagtagagtcagggcagggcagctggtatcgaggtgccccatgggagtaagggaagtac

SEQ ID NO: 617286 - DNA, 423 bp, Homo sapiens
gaaccatagcaggatccccatctcgtgcccccagttcttggggggagaaacaggactttttacataatcatatggagctgcaaaagccaaaaagaatatcttctatagatttctttatattttttaaaacccactactaaaattgtatccacattagtattgtacgtttgtcgagagtgatttcctgagactggtttggatctccctgcatgacagtcccccataatcttagtgagtcctggactgcactgatcatccataaagcttccttgcaatcttggggtttggctttagttctcttctcttccttgtatttctcagtatgtgctagaatccagttcacacccttcactgtgcgtgcagacacattgacactctccgccacgagtgctccagagcccactaggcttgcagatcgggtgc

SEQ ID NO: 617287 - DNA, 125 bp, Homo sapiens
atcgtatcgtatgtccgcctatccagaacctccactctttcgcaccctttgctgatgcaagctaaggggctgatgaccctgtctttactggctgggcactgaggcattcagtatgccagtattaa

SEQ ID NO: 617288 - DNA, 916 bp, Homo sapiens
  misc_feature (619)..(619): n is a, c, g, or t
  misc_feature (869)..(869): n is a, c, g, or t
gatagaactgaaaacacctggcggggcgcggcggcacacgcctataatcccagcactttggaaggctgaggcgggaagatcgcttgagtccaggagttcgagaccagcctgggcaacatagcaaggccccgtctttacaaaaaatttaaaaattagcagggtctggttacaggagcctgtagttccagctacttgggaggtgggaagatcgcttgagcccggtaggttgaggctgcactgagctatgatcgcgcccctgcactccgacctggtagacagagccagaccctgtctcaacgaaaggaaagaaatgggccgggcgcggtggctcacgcctgtaatcccagcactttggaaggccgacacgggcggatcacgaggttaggagatcgagaccatcctggctaacacggtgaaaccccgtctctactaaaaatacaaaaaattagccgggcgtggtggcgggcgcctgtagtcccagctactcgggagcctgaggcacgagaatggtgtgaacccgggaggcggagcttttagtgagccgagatcgtgccactgcactccagcctgggcgacagagcaagactccgggaggcggagcttttagtgagccgagatncgtggccactggcaactccaagcctgggcgacaagagcaaagactcccgtccccccccccccccaaaagaaaacaaggaattcaattggaaacctttggggcttagactttaactcggttgcaaagattggtaccgggttggaaaaagttcaaaggaagggggattaggaggcgcttcatatataataggccgtgacgatcctacgcggtacctgggaaagaatggccctggttctatctccatggccgnacctcttgtctgtatggcgacgtcgtaaaacctagggaaatagacga

SEQ ID NO: 617289 - DNA, 215 bp, Homo sapiens
tagaggatccccctggcttgctctggtctccacattgctcacagcgtactgggaaggcgatgcctggcgggtgctgctggtggagagactcgggtatgtctcctgctccgattcattggccttgctcaggaccggggaagagttctggtcgagcgagtgatatgcgggactcagttgatacttggggataactttgctaatgtccccgacatcac

SEQ ID NO: 617290 - DNA, 109 bp, Homo sapiens
catggtctgggagaaagatccctgagcagttggtcaggcgaattcccagcacctgttccagttcctgcgttcgctgctgcccttggcaagatgtgcctgcctactgctt

SEQ ID NO: 617291 - DNA, 120 bp, Homo sapiens
atgcccccctcatccgcttatccaatggtcagcatttccagcagcggcacgatcttcactcactgcaacctccatctcctgggtccaagcaattcttccccctcatccgcttatccaatg

SEQ ID NO: 617292 - DNA, 110 bp, Homo sapiens
ctagagaccgttcgcatgagggccgtgaaatcagttcctgtgggttatgcggttgtgtttgggtttagtttgtttctttataaaaaattcaatcgggcagctccccttat

SEQ ID NO: 617293 - DNA, 963 bp, Homo sapiens
gaatccctgggggcccccccgcccccgtttaacctgttgatgtcccagcctctttccttgtttttggaaccccgacggtaccaccccagaccctttcaaagagggcccactgtgattccccggcccgctgcgggcgcctccgccgagactttgtgtgggttggcgctggccgctccccccattatatgcccgggactttagagggagagtgagcgcccagggacccggtttttggttcgcgtttcgagcaattgttcacacacggttctcggcttgggggggcacaccttaatataggccttaagggccacctctcccccgtgctattgttaaagagatatctctttgagtctgcacccacttgtcacgagaacaccgggtttcccctcccactcgtatatctcacgctttctttttggaaaaaacttggagcacggccacttttccacacccgcacctctttgaaagaaaatggaggccacaaaaccctgggccaccacacttgtctcaataaaagttttagaataggttcttttcttccccttccctccaggaggagcccacccagcttctttttttttataaagagtccctttcttatctgtttgggaaacccaccaggggtgccttttggggccaccatatttttacccaataagattgttgaattaatggcccaaaaaaaaaaaattatttacccagcccctccagattgtgtttgcccgaggggccctttgagccaaagaaaatgggttttgctgggctccattttgcccctgtgtgctaagccttgggtggctgcattcccctcctgtcatagatctgaccccccagcatgattgtatttctttcccctcccagtccaaccgtaataccagtttcccagaaaatttgcccagtctgccaatgcccaaagggtaaaaatctgtatttcaccgttgtatagaataaaggctttagtta

SEQ ID NO: 617294 - DNA, 648 bp, Homo sapiens
gtagtttttttattagaaatcgttattcaataatagtacatgttacaaataaataccattttaatactgaaaaaatgtagactttcaaatcagttagggtggtcacccttatagcaaagggcgattatttttccccattagtcttccttgatgcatgttgctcacgaacaaggaaatgggcttaatgcgtatgaataataagtaacaaacacttgccttctgtcaggccctgtgctgaataccgtctgcatatgtataggaagagggttaactcagcacggtctgtgtttgcccaggactctgtacattctccaagaagaggtctgcctttaggactggtcctgtggccagtcgtcctggagaagtgagctctcagcttttagaaaattctatctgctaagaatagtttgcatgtctcaggtctgggccacaaaatatcagttgaatcagatggttgatgttaacaagtgatgatttatggtaaacatagatcgtctaatctccatttgctctctcatatatctatatttatctatccatagtatatgtacctatatatatcaaatatgcgatatgttgatagcaattgtatatacgtagagagatatatgtagtttgaagagaggctgatattattttcatttagat

SEQ ID NO: 617295 - DNA, 141 bp, Homo sapiens
tagagatcctgatcacgtgcattgtgggtacgcatcacctgaatcaggacgatgctgtcgtgcggcagaggatagagggagagcacagttgaattgcgacgtacgtggagggacttgaaggttccaacatgatctgggtca

SEQ ID NO: 617296 - DNA, 372 bp, Homo sapiens
cccgcgcatagcacggagggagagcgcgagcgagtcgcacgacagggaatggaatgcaatggaatgtaatggagtggaaggcattagaatcaactggaatggaatggagtggaatggaatggaatcaacgccagtggaatggaatggaatggaatggataataatggaatggaatggaatcaatccgggtggaatggagtggaatggaatgcaatggaatggaatggaatcaactcgagtggaatgaaatgtaacgtaatggaatggaatggaatggaatggaatggaatggaatcaattagagtataatataacggtatagaatggaatggaatggaatggaatggaatcaactagagtggaaacgaatgg

SEQ ID NO: 617297 - DNA, 527 bp, Homo sapiens
  misc_feature (39)..(39): n is a, c, g, or t
  misc_feature (41)..(41): n is a, c, g, or t
  misc_feature (474)..(474): n is a, c, g, or t
  misc_feature (520)..(520): n is a, c, g, or t
ctggcagtaacggatctgacaaccggatttacgatttcntngatgggatggattgaatgccagcgacagatggaccgggccgcccggcgtggaaacatccgaggagaagccctgatggtatttcacgtcaccggcaggcaaatcatcaccgtgtttaccttcaaactcagcgaacagatcctgcggcatcttgcccagcgtgttgaccagcacattcaagcggccacggtgtgccataccaatcacgatctcttcgacgcacgttcaccggcacgctggatggtttcgtccatcgacgcgataaagctctctccgccttccagagaaaagcgtttctgaccaacatattttgtatggagatagcgttccagtccttcagcggctgtcaggcggtccagaatgtgttttttcttttcctgcagaaaaaactggtgtggaacggatggattccaatcgctgctgcatccagcgttntttctgccggatcgctgatatacataaattcagcaccgatcgaacnggcagta

SEQ ID NO: 617298 - DNA, 1283 bp, Homo sapiens
gacggactctccgtgattttaggagtgtccctggtcagagatttattgtctcttgtacaaccaaggggcctccgatctggatttccaaggaagaatttcctctgaagtcgaccggtaatttgctactaccaggcaccagtgccctatcgcaatagtccagcagctgagcccggagcttgacgaagtgatctgtctgacatcgctcaccggatcgtggcacctggcaatggagcactgctgagctgcggattacgtccatctgtgaggcattgccaatgcggactgcggtccattggcatccgaagatcaccgacgataaccggcgacttctacacggcagactgctggctgaacagctggaccagacatcgcgtgaaacccctgcatttgagagcggtgtcatccttcttctcatgagaataactctaaccaggaacggcgtgctgatgggcgttgcctatccgccgcaagttagtcaaattccaaggggcgtgtgtaggtgggcatcaaggtcagacgcaaggcgcgtggatccccacttggtcagggcacaaaatgggctgagtattacccatccaagggttaggaatgcggctagatctggatcgacttgatgacccaatgtagatatcaaagggacctggacatcttgaatatttaccaaaagtggacagatcggtgctgcgtgaactactttgggggaaactacagaccctcttaatgtgccttcgaccaagtaattgaacaattggcctagatgttccttggccccgagtatatggcccagtaattcatgcccagtaagacacgtggcgattggtgcgcccattcgctgggacgccctcgaggattacttcccctgattgggggacccaacggaatgtgaagagctggcaaataatgtagacggaaaagggtacgtgtatgaacaggaataaagagcacatattgtcacacccatttacaagtaagagacacctgtatcaaacacaatgtgcaatcccattatttttgtttctagtataccacaaacaataaccaatgtaccaacatggtgaacaaaataccccagcttggacaacatcatttttaacaaaagaaatagaaaacacaaaaaaaagaaatatatcataagacaatataaacaacatataatgaaaaaaaatgaagataaacatatacatatgataaactaacaagcacctccgcttctttctcatcttcatattttaacaaaataaacaaaaaataatcaagatcatataaaaataaacaaaaaaaaa

SEQ ID NO: 617299 - DNA, 88 bp, Homo sapiens
ggatttgctggtgcagtacaactaggcttaatagggacatgtaaggccattacacaaataaataaccaatgttaaaatccaaaaaaaa

SEQ ID NO: 617300 - DNA, 329 bp, Homo sapiens
tcagagacaacaggttgataggacgcaacagattatatctaaagaactgacttacccagataacagactcctccaaagctataccgttactcaccacaaagcttattaccatattctaccattcaaaaacaaaactttataccacatacatcattgccagtcaaaaatagtcagcttctaaattctgtattaactttaccatccaggctgacctcagctgtaccatcacagcagtatgccacgcacatctgacaaaagacctcctcctcctccttactactatagatatcgaagagtgcacttttggggtacccgaagctcaaattcgt

SEQ ID NO: 617301 - DNA, 354 bp, Homo sapiens
cagtacgtgatgtgaataacaataaaacgagtcacatgattttttttggtttcctcgtgcatatgaaagttatgtttatattttagcattatgtctaaaaaacaatgtacataccctttttttttttcttttggagacacagtttcactccgtggcacagacgggagtgcaagggggcaatcttagctcacggcaacttccgcctccggggttcaagcaattgtgggtgcctcagcaccccggagtagcggggattaacagacttgtgcggccacacccagctaagttgttgggtgtgtaagtagagagggggtttggccatgtgggccaggcgggtctcgaactacgggccgg

SEQ ID NO: 617302 - DNA, 124 bp, Homo sapiens
gacctctacagcgcacgcgcggcacatagcataccgtcttcaaaagaaagagagatgcatatatatctactaatagatgtattgatattaacattatactgtaagtgtaaatgactaaaatcgg

SEQ ID NO: 617303 - DNA, 456 bp, Homo sapiens
  misc_feature (11)..(11): n is a, c, g, or t
  misc_feature (46)..(46): n is a, c, g, or t
  misc_feature (264)..(264): n is a, c, g, or t
  misc_feature (456)..(456): n is a, c, g, or t
atcctgaacanttaaattttagacacctacttgaatggattaaganaacaacacatagctggtccaaacacgaatttctgggccatatcctatgaagggtgtttcctggaagacactgaagataaccatgacccaatgtggatgggcactgatatggtttggctgtgtccccacccagatctcatcttgaattgtagttcctgtaatacctacatgtcgtgggagggacccagtgggaggtgactgaatcatggtggtggttancgccatgctgttctcatgacagtgagtgagttctcatgatctgatggttttataaggggcttttccctttgggtcagcacttcttgttgctgccatgtgaagagggatagctttgcttccccttctgccatgattgtgaggcccctgcagccatgtggaactgtcagcccattaaacccctttgttctttan

SEQ ID NO: 617304 - DNA, 293 bp, Homo sapiens
  misc_feature (23)..(23): n is a, c, g, or t
  misc_feature (100)..(100): n is a, c, g, or t
  misc_feature (111)..(111): n is a, c, g, or t
  misc_feature (125)..(125): n is a, c, g, or t
  misc_feature (149)..(149): n is a, c, g, or t
  misc_feature (152)..(152): n is a, c, g, or t
  misc_feature (164)..(164): n is a, c, g, or t
  misc_feature (167)..(167): n is a, c, g, or t
  misc_feature (201)..(201): n is a, c, g, or t
  misc_feature (225)..(225): n is a, c, g, or t
  misc_feature (230)..(230): n is a, c, g, or t
  misc_feature (238)..(238): n is a, c, g, or t
  misc_feature (241)..(241): n is a, c, g, or t
  misc_feature (253)..(253): n is a, c, g, or t
  misc_feature (255)..(255): n is a, c, g, or t
  misc_feature (259)..(259): n is a, c, g, or t
  misc_feature (265)..(265): n is a, c, g, or t
  misc_feature (271)..(271): n is a, c, g, or t
tttaaaacttccacatattcccnggaatccaaacggccacatgtacatgcagggtgagcaaatagagaagacttgagaaagccttaaactctcacctccngctaaccacgnggcttgctcaaatnggaagtgaaaactacggtgaattngtngcttagctgaangtngaaggtgtgccccaacacttacacagagcctacnggtaaagacagagtgttttctttncgtcncggtttcnggnatttacggaaancngttnctctcnccggancactagctgcaaattacgctac

SEQ ID NO: 617305 - DNA, 164 bp, Homo sapiens
cctgttttgaaaaggaatcctcggtggataaactggactgtcctctacagaaggaagcacaaaaagggacagtcggaccgaaattcaaaagacaaagaacccgcctgagcagtcaaattccagagggaccattactaggtgcatctcttgcttgatataattgg

SEQ ID NO: 617306 - DNA, 236 bp, Homo sapiens
cgagagggaggggtgatagaggatcccgaatagtaacacacaagtcgagagagaaagttcagcgccccatttattctttctctttgtagtcaggccttcaaacctaaatactggaaaaactaatctggtttcctttcctatagtttgggctttttcaatgtcatataaatggagggatacagggtgtagccttttgactcatgtctttttttacttcggatgttacatattacggg

SEQ ID NO: 617307 - DNA, 669 bp, Homo sapiens
ggctagccacgcaggcggggccctggctttataaaggtataattgacaaacaagaagagtacctaggccaggtgcggtggcttacgcctgtaatcccagcactttgggaggccgaggtcatatgatactctcagagtgagcgtctggataggaccgagaagacgcagtgacatgtacgttagcaaagcttatcgttatagccacactgatattggtacccgcaataaatagtgcactaggaaacgccaccccagatgaccacacactgccccgtgggcctccctgggccctctccggcaaaggacctggaaacaacggtggttcctttcgataaagaacgcaggatagctcctgtggctcggtggctgtacatgacgcggatgtgcacgcgtgaggggtgcccggcacacacgtgcctgacgtgcagatggctggacgctgctgcacggtactgcaagggcaaacgtgcatggctcgtctacacgtgctcatgccgtggcacatctgcgagactgcatgtacacaggcacgcgtgccacatctggagtcatcatatatccgcaaccagcaccgcatggaccctaggccatgatggccaagcaaaggtgacccgcctacatcattcttcaagcaaacatctacgatacagacgatccgtcattcctagag

SEQ ID NO: 617308 - DNA, 175 bp, Homo sapiens
tcttattgcacggccaagaagtaggtggacaagaacagcaacgagtacctgggtgctggcgcgagcgcaacaacatctgcggtgcgcaagagcctgcgacaaggccaagcagcgcaatgtggagacgcagcagaccggtgctggagctagaccagctgacacatgacctgcctgc

SEQ ID NO: 617309 - DNA, 266 bp, Homo sapiens
tactgagacatagattctcacctgaccttcaaagaagggccaagttccctttaaaggtcgcaccgtaccttggcaccacacgtcatcagatgaattacactacaaggaaaagacgtgctcacaccaggcagctccagctgttacctgagatactgaagtgcagctcaggcagacgattatttaacacctgccctaggtattaatctgttcattattctctattaaacacaaaatcgcaagctcatacacagcaaacagagggcagc

SEQ ID NO: 617310 - DNA, 657 bp, Homo sapiens
agcgggggagggaccggacttccggctggtctgtggggttacgaggttcggggttatcctggctggcgcgtcaggggcagggcaacagagtggctggccgctacggccctggtaacgcggccagtgtggagaagcgtgcgtgcgagatcctgagcgagtctaggacgacagaggagccagggcctgactgcagcaggtcctggagtgcctcatcccttagttgtcaacaccagattgaaatggtttgccatctgcttcgaatgtggcgtgtactttgctattcttggaactggatctgcttgtgtgctatcctgtgcgctggactatataatgctttctctgcaggagttttatacgcctcggcaatcttgctggcgtgtagccagtacatgcttttgtaagtagggacctggtgaacgcaaacttgacatggaaacaacttgttttgaacgcaacgaaagattggctgtgcagagaagtatgtgtaatgcatttggggtgtatcatatttagccctgtgtgctgctctttggtggcataagaagggactggctgtgttattctgcatattgcagattcttgtcaatgacctggtatagcctgtcatacatcccatatgcaagggatgcagttatgaaatgctgttcttctctccta

SEQ ID NO: 617311 - DNA, 406 bp, Homo sapiens
tgcaagccaaggcagcacacactcacagactgagatcacctctcctgagagccttgtatgatgcatgagctgtcccagatgcagacccacatcacaaacacatctgtggtgctgtccttggacaacaaccgcaacctggtcctggacagcatcatcgatgaggtcaaccccaatatgattagatcgcgcagagacaccgggctgaggctgagtcctggtaccagaccatgtacgatgagcaacaggtaggggtgtctaaataatgcagtcaactgtaagcctacttgtgcagtggtaatgtgctactcctcataggcagcgagggatggggacactggtagattgaacctcgggccaaggtccctcgcaattaaaatactgcttgctctgtaactgccaaccatat

SEQ ID NO: 617312 - DNA, 796 bp, Homo sapiens
  misc_feature (402)..(402): n is a, c, g, or t
ggaggagccggccccgcagccgctgacagggctctgggctggggccatggcgaagaagagcgccgagaacggcatctatagcgtgtccggcgacgagaagaagggccccctcatctgctgccctgggccctgactggggcccctggccaatggtgctgactggcccctgtgtggcctgggtgacaccctggcggcctgcctggcctgtgcctgctgcgcgagaccctggacgctgccagatggacttcatcactgtcgtgctgtggtgcttctgccgtgcggcttcgggcaactgtggtggcgccttcaccctacccttgtgcttacaagaaccgggcggagggtgttggttcctatattccctacgtcccttgatcgccctggtttggaggaatccccatntttcttcttagacgatctcgcttgggcccagttcatcgaaggccgtgcagcatcaaatgtctgggaacatcttgtcccctgttcaaaggcctgggctacgcctcccaatggtgatcgtcttctactgcaacacctactacatcatggtgcttggcttggggcttctattacctggtcaagtcctttaacagcacgctgccttgggccaccaattgtggccacacctggaacaattcccgaatgcgttggagatccttccagccatgaacgactggtcgccaattgccacgccttgggccaaaccttcacttgttgaccagctttgttgaccgcggttcccttgtcatcgcaattctggcagcacacaaggcttgaaggcttgcctggcgaactg

SEQ ID NO: 617313 - DNA, 280 bp, Homo sapiens
tccaaagcagcgtaaaaacaaagtactatgcaagactgtaggagaaaaacgtgattgtactgaacagatgagacacttggagaaaagatgaacaattattcattttggtttaagacatcaggagtactaataaagaaccaactggtaaactgctgataatcgcatatatatatctagcatacaactacactgaatcattcttttttttttttatatatatcctaaagtttaaggggatacatgtgcacttggtgcaggttagttccttttgtatactgtg

SEQ ID NO: 617314 - DNA, 552 bp, Homo sapiens
  misc_feature (461)..(461): n is a, c, g, or t
  misc_feature (486)..(486): n is a, c, g, or t
  misc_feature (550)..(550): n is a, c, g, or t
aaagaccatccccaaaataaaaatcaatcaggagactgaaactgaccaaaagaaaccatgaggaccacttgttgctcaggacctgagggtttgtcccattgaagggtgagaagacgaggtggggtgaggtgaagaccttcagtcacacagccagagtgtgcgccttgggtgaaaggggataggatgcgctgtctctgctcttccatacctataaccccttgagctcaagaccacaggacccaccactcagaccaccataaaagtcttgttagtggtcctgccttgggtttctctcactccctccaaaccatcacacttgatagatgagaaactctataattgacacgtcacactctgggtcagaaggtgttaagtagttcctgttattcaagggatggaagtacaaccactttaggcccagtgctcaaggttatactttccttactctgtaaccaattctntagttttcaccttcggagggtggcngggggccttcagacccttcacatgcatttctggcttagggttttccttttgtggcaaaaccgtnct

SEQ ID NO: 617315 - DNA, 209 bp, Homo sapiens
gctttcccttctcaacctagtgatttggtcaggctttcaaaagaaggggagcaaaaaggctgtccacgtatttcgccaaaaccctcaggctgcaaaatcaggcagcatcttcacagccctccttccgatagcatgagtgattaacccactcttcctgtaactccatttcagagactcggtgttctgtaataggtagggtataaatacat

SEQ ID NO: 617316 - DNA, 141 bp, Homo sapiens
  misc_feature (9)..(9): n is a, c, g, or t
  misc_feature (81)..(81): n is a, c, g, or t
  misc_feature (93)..(93): n is a, c, g, or t
  misc_feature (117)..(117): n is a, c, g, or t
aagaggttnttaccgtgggcaactttttcaacgaaggcttgaaccaacctacggttgattcgtgctttgacccctacacantttcccattatnccgttggagatgagtgggaacgantgtttgattcaggctttaaactgt

SEQ ID NO: 617317 - DNA, 268 bp, Homo sapiens
tgtagtagacatggggttaccatgctggccaggctgggtctgaactcctgactcaggtaatccacccactttggcctcctgaagtgctgggattactggccatagccaccgcacccagacagttattgcattcttgtttcctgtaaccaatatttcatttatccctttatgtggagagaattaggtcatcatttcctccgtaagtctagaacatttatctgaattcttagaacattttcattaatcctctccctgcgagacctatgat

SEQ ID NO: 617318 - DNA, 365 bp, Homo sapiens
ggctgtatggtcatgagaaaatggtcatttccttgattacctgatacggtttggctgtgtccccacccaagtcttattttgaattgtaatccccataattcccacatgttgaaggagggacttggtggtaggtgactggatcatgggggtggtatcccccatgctgttctcatgattgtgagttctcatgagatccaatggttttatacatggtagtctctcctgctgccatgtaaaacatgcctgcttccccttctgccaggattgtaagtttcccgaggcctgcccagccatgtggagctatgagtcaattaaacctctttcctttatataaaaaaaataaaaaaagtcgacgcggccggaat

SEQ ID NO: 617319 - DNA, 838 bp, Homo sapiens
atatttctattgtgattgaggtccgacgtcgcggttttctcaagcgcctaaacatgcattgcgattgcgagattacatgccctttacttcattcttccccccatttttcaaggtcgtgctgtacttgtaatgcaccacctgtctgggaatccctatcgtgggcctcgtacaggacgtccacttgtcttctgtggttctattcctcggaccgttgagataatcctctcacggggcgaattgcactttgtcgtgaaattccagtcccagatcgttggcctttccatgtggatgcctcctgcttggagaccctttaggctcttgcttccgagggctattcgtcgccatcaggactctccctgttccttagggaatgccctcggttcctctttgccgtgctcgtgatcttttttgcttgcgtcttccttggtaactgcgacgcgttgtcctattgctcttcggtcttggttgtgggggcatgcagtcacacattagcaacgtctcgatctctttttccccagtccccttatatataaagtagcctagtactccgacgttgaggcgtgcgaaggggtgatgtcgggctcgccagtgcgactagtaagacttactgcagtcgattctgcggatttagctaagtagtttctacagagctagatctgtgcgcatgtgtgtgttcgtgtatatatacatatctagggctagtaccttagtgttcacagcccgggagctgggagacctaacctgtaacagctgcgtctttctcttaattgtttcaataaaatagaagagaatcgcgcatcgtcgcgcgtcccccccccacccccttttctacaatact

SEQ ID NO: 617320 - DNA, 283 bp, Homo sapiens
tcctggactctctggtgggcttctccttctcctactatcctatccccggttttaggggaccccacacgcttgacagtgacactgtgacacagagatgaccccacagcgagggagtggctgagtagaaggggagtgggacacaacattgctaacagagctcacgttgagaaagagtttaaaacaggcttcttgtgggccgggcacgggtggttcacgccgtgtaatcccaggcacttggagaaggcaggaggcgggtgggatcacataggtgcaggaagagacc

SEQ ID NO: 617321 - DNA, 1109 bp, Homo sapiens
ggcagagccctggtgagtgcctggtgcctgggctcgtgggtgccacccctgtgggtgccctgggccatggatgtgctgccgtctgaaggtgaactgaacttctgcgatggagctgcatgctgccgctggcctggacactcgatggcctcaatggcctgagcttgctgagcggctgcagtgcggcgttggaggccgaggagcctgactgacgagctgggagctcgacgccgacgacgaacctgtgggctgacccggtggcacatcaacgatggcaggtcgacgaccgagcggtgggctccgaggctggaggggaccgctgcagccacctgccgccctggagcttgcaggccctgcactgcgtgagccctggctggctaactctggggcccggacggggaacattattgccatggaccaactacttaccagggcagaaccaattctacggatacccaaggtcatcaaacaacgacaaaaccgacgttcaggctacgagaggagaccacttggaccactggcacgcagccagcagggccttatcgtccagacctgccgacagagatgacgcacggaggaaccaccagattcctcccggctgaaagcttctcaagtcaagccagacaggcagcaaattccagagtcgcaaagaggcttatgacgaaaaccggggacggggggtcctttggagcaccgagaggcactggcagcgggcgatctcctagcctccggctgaagaggatgcagatgactttgatgataccctggtcgctattgacacctataaatgcgaccctccattcaggtggccccggacatccgggagctagtggttatccggtcaagccaattagcgggcgcttggagttacctgtgcgcacggaagccccggtcgcccgagtaaaggggggcccaaacgggggcgtcggtattcctccgcaaagaggatctcacgccgggaatctcccggaaaaacctgtccggtgaaaaagcaacaccccaacgtggcggaatccaggtgagcccagaacccggagacccactaggggagacgtcaccgatgggtagacgagagagcatcacacaggcggacaccacacgtggagcaacgt

SEQ ID NO: 617322 - DNA, 279 bp, Homo sapiens
tcagaggatcccccccaaactagagaaagatatcaatagttcaaggtataagaagtatagaacacaagccagtttaacccaaagagtactacttcaagacatttaataaccaaactccgcaaaggtcaaagataaagaagaggatcctaaaagcagcaagacaatagaaacaaataacaattttaaaaaatacagagggaactccaatacatcgggcagcagacgttggagtggaaaccctataggccaggagcgacggacaggagtcgctcttggccg

SEQ ID NO: 617323 - DNA, 830 bp, Homo sapiens
gacagtccctcctctccggagcatttagataccacgaagggaaagcttcattctccttgttgttggttgtttttacctttgctctttcccccttccatctctgacttaagcacacaagcacaacgagcattacccaaaaactgtctttcaaaagcagagcagagcagcaaacaaacaacacatagtattatggcataacccttgcagcggtgtggcggcaggaacgggtttgtgctacagcatgcataagcaggcattttatacccgcaataaatcaactcgcttttcatcattaacatgtcaccttgtattctctagttgtaacagcaatcgcgctattcaaccacgcaacagtgagtgctgtcatcgcggcagcagtgattcagcgttcccaatccgtttcaccgtgcttttctcaccagacacacaagcgtatcaaaacaccattatctcaacacacacctatcaccaaaacttcagccaaaccaattttataatacgtacagaccagcacgggctcatccacggtcagcaaaacaacatataccttgactagccttaaacccgttgataaaaaggcacacgcctgtcactgcggcgtacactcagagacatctactcgtacctctacgcctcttgctcatcattgcattgataggtcccacctttcactaaagttccatttgcaaatgtccatcaataatacccgctacggatagacaagtagctaaaccgttctatcaccctcacatttcatctggcctgacaagctcacacctcttcggattcacaacatacgcgtaaacagtagagacagtgtgcaattgacc

SEQ ID NO: 617324 - DNA, 492 bp, Homo sapiens
  misc_feature (7)..(8): n is a, c, g, or t
agcgggnngtggggggaggaacatggcgcaagctctgtctgaggaggagtttcagcggatgcaggctcagctcctggaactccggacaaacaactaccagctttcagatgaactacgcaagaatggtgttgaactcaccagtcttcgacagaaggtcgcctacttggataaggagttcagcaaagctcagaaggtacctccctccacccacccatccacctacccatccacccttgcttctacctatctgactcattcatccctccagtgagcacctacagtgaaccagacctaatgttgcatgctgttttcacgtagtcatttaaaggattctcaatggaattctctttagttgctaattttacctaatcctgcttaatttagtgattaattttaatttacttttaattcatttctaatttcagttactcattcttcattcactgacttttaattaagggggccgaaggttatttccctttaggtgagggg

SEQ ID NO: 617325 - DNA, 630 bp, Homo sapiens
  misc_feature (7)..(8): n is a, c, g, or t
agcgggnngtggggggaggaacatggcgcaagctctgtctgaggaggagtttcagcggatgcaggctcagctcctggaactccggacaaacaactaccagctttcagatgaactacgcaagaatggtgttggtgagccaggagggccttattagatgggggtggctttggggaatggtgtccgaggttttccctcagaggcctggcaggaaggcctttcagtttcttgccactggctgaggctgagtttccctgctttcccgacaccagaactcaccagtcttcgacagaaggtcgcctacttggataaggagttcagcaaagctcagaaggtacctccctccacccacccatccacctacccatccacccttgcttctacctatctgactcattcatccctccagtgagcacctacagtgaaccagacctaatgttgcatgctgttttcacgtagtcatttaaaggattctcaatggaattctctttagttgctaattttacctaatcctgcttaatttagtgattaattttaatttacttttaattcatttctaatttcagttactcattcttcattcactgacttttaattaagggggccgaaggttatttccctttaggtgagggg

SEQ ID NO: 617326 - DNA, 817 bp, Homo sapiens
  misc_feature (7)..(8): n is a, c, g, or t
  misc_feature (738)..(738): n is a, c, g, or t
agcgggnngtggggggaggaacatggcgcaagctctgtctgaggaggagtttcagcggatgcaggctcagctcctggaactccggacaaacaactaccagctttcagatgaactacgcaagaatggtgttgaactcaccagtcttcgacagaaggtcgcctacttggataaggagttcagcaaagctcagaaggcactgagcaagagcaagaaagctcaggaagtcgaggtattgctgagtgaaaatgagatgctgcaggcaaagctgcacagccaggaggaggacttccgtttgcagaacagcacactaatggccgagttcagcaagctctgcagccagatggaacagctggagcaagagaaccagcaactgaaggagggggctgcaggagcaggggttgcccaagctgggcccctcgtggatggggagctgctgaggctacaggctgaaaacacagccttgcagaagaacgtggcagccctgcaggaacgctatgggaaagaagccgggaagttctcagctgtcagtgagggccagggggatcccccagggggcccggcccccaccgtcctggcccccatgccgttggcagaggtggagctgaaatgggaaatggagaaagaggagaagagattgctctgggaacagctgcaaggcttagagagctcaaagcaggccgaaacatccaggctgcaggaggaacttgctaagctctccgagaaactgaaaaagaaacnagaaagtttggccgtctgcagacagaaaaggagactctgtttaatgacagcaggaacagattgcggaattacaacaggt

SEQ ID NO: 617327 - DNA, 108 bp, Homo sapiens
  misc_feature (7)..(7): n is a, c, g, or t
gaccccncctcaccagaccctggcagaagcaggaagcagccatttggcagaagcaggaagcggcagaagcaggaagcaggggtcttggtgaggggcagaagcaggaag

SEQ ID NO: 617328 - DNA, 800 bp, Homo sapiens
cttccatatatgggttccccttcggtgcccctctatacttgtcctaatgcgttcattgcccatgcccccttgtgaaacagtcgcacacaaagtgctagttgtacaactttccagcgcttcgtggattttaaagcccgtgttgtatatttcctccccgcccttatctcttgtctcattgccgctcccactccctatagacagccctgttaaaaaacacaaacgaggggtcaacaatgcctcccccctgcgccaccacaaaaacacaagtggcgcaccccccggtgggcctgtgaactctttcgggtacccccgcgcttcgggcgggtcttattttgtccacgtgcctcaacaaaacggtcccccccccctatgtggcctctggcgacccacgcgggcgacctcgtgagactccctggacgcggtgcccccatcggcgtgggtgatctccccgcgcttgtgagccccccccttgctattatatattaacctcccaccacaccttcttgcaactcacagagagctgttgcccccaacccacactatagctttaaaacaccaagtccaatttcgcgaacgtttttaaacccccaacacccgtttgctcctcgcgctatacaaagcaacccgcggtaataactatcgcgctcccaatgctctcttaaatactcttgtgaacccaaaaccccagcttttcacttccccctcgctccctttaaatttaattcccccctaaaattcctttaaaaggggcccctttttcccctttcccccccctttcccccctttgagccccaaaaaaa

SEQ ID NO: 617329 - DNA, 708 bp, Homo sapiens
ctcaaaaaaaaaaaaaaaaaagaaagaatgaaaatattgcaggcaataaaataaaaattctctgtaggcctcgatattctcatctgaaaatggggacaaggaattttctcaggactgctttgagaagtgtacttcagccaggagttgggcagggggctggcttagttgtattggcattgtatacctctccaagactaacggctggcaatgcaggagctgtcatcagtgttggccctggaaatgccctgcgagctctttgtggtgcttaggatgagagggagctatctctgggcccaggatccagccctccacagaagaggggttgcagtgaggctgtctgtagcactaacaacttccagaggagcctgaggtcttggattgcatctctgaggttgggagtaggaagaggaaaatggtttttgtgtgcctttacatctgctactacctcactgccatgtgttgctgtatctgtccttgtttccctgtatttgtcctaactctgtgtctctttccttctctctctttccattcttttctctgagtctctttctgtctctgtctgttttcctgttcctgtctctctgactcatttctcttcccaatcttctctttgtctctccccctcctgttcctgtctcggtgatttctcttttttctgctttctctctctaactccttgtttcttccaccccattctctctccctccc

SEQ ID NO: 617330 - DNA, 1191 bp, Homo sapiens
gactgtgccagacacgtcagacaccatggccagcttcctgaagggggcccatgtggcacatcaacgcacgggccgcaggcagcatgtggagcctgagtgcatccatggcagcaaggtggccaaggcttcagtgtgccaactacagctttccacaaggcagcagtggccgcttccagtgcacgtggtgcacccagtgcccccagtgggctctgttgtccccagcacagcagccaatgcctgtgtcctgagcattcaccacaggggtttggtcacacatgcaccaggcttacttggtgcctacacagccagcagcacaggcaggcagggagcaaccaggtctgtgcttggcaggcacaaaagctggctgtgtagccgagggacggccacaagacagcgcagcatgggaagccaggcagcgccgtgtggaggcggttgaagctagcgttgcagggcttgcaccggccaggggacagacagccggctcatacagggcacgccagggtagcgccgctggcgcgagccccacccaaggcagggcacgtatggagacgccaggacaggcaacaggaaacgctggggttttcagaggcaaacgcagacaactgcaggcagcgacgctcatgggccgatgcaacccccgcacggggccgaacattctcaaacgcaaggcacgggcagcagggggcaccaattggtcccgaacgcaaagacattcccaaatcagttcacaaggaaaccgactcgaggacacttgggagcagaaggctggacgggcaaggcccccccttatacccttggacagacaacagggcaaggcagtccagaccaccacagccgcgagcagaaagcgcaacattatacggggggacacggacggacggccccaagggtttgggcttggcacgcaagtcctcgcagaagggggaccacccagcgtgggcagcaggcaccttcctccaccccagtgacgctggtacgaggcctggccacgaggtagggcaaccacaggagagccaaacccctaccccagatgtatcactgggggatgacacagacacagcacacggaacgggcacggcaatgctgcgttcttgccatgtgccaccctatcgctcaaggccagggaggacccattagctacagacgccaggccccccacactggcgtgccacacagacacaggttcgcatg

SEQ ID NO: 617331 - DNA, 658 bp, Homo sapiens
  misc_feature (7)..(8): n is a, c, g, or t
  misc_feature (579)..(579): n is a, c, g, or t
agcgggnngtggggggaggaacatggcgcaagctctgtctgaggaggagtttcagcggatgcaggctcagctcctggaactccggacaaacaactaccagctttcagatgaactacgcaagaatggtgttgaactcaccagtcttcgacagaaggtcgcctacttggataaggagttcagcaaagctcagaaggcactgagcaagagcaagaaagctcaggaagtcgaggtattgctgagtgaaaatgagatgctgcaggcaaagctgcacagccaggaggaggacttccgtttgcagaacagcacactaatggccgagttcagcaaggaacgctatgggaaagaagccgggaagttctcagctgtcagtgagggccagggggatcccccagggggcccggcccccaccgtcctggcccccatgccgttggcagaggtggagctgaaatgggaaatggagaaagaggagaagagattgctctgggaacagctgcaaggcttagagagctcaaagcaggccgaaacatccaggctgcaggaggaacttgctaagctctccgagaaactgaaaaagaaacnagaaagtttggccgtctgcagacagaaaaggagactctgtttaatgacagcaggaacagattgcggaattacaacaggt

SEQ ID NO: 617332 - DNA, 110 bp, Homo sapiens
gatatagtaaagactggggctagagacttcattggtacataaattatcccaaggcagacaaaatgtaatggcggggctgggcacagtggctcatgcctgtaatcccagca

SEQ ID NO: 617333 - DNA, 612 bp, Homo sapiens
  misc_feature (304)..(304): n is a, c, g, or t
acatggttttggaggttcccttggggtctgccccgtatacgcacagtgagccgtgattgtgcctttgctccgcagcctcaaccttgtcttttattatgagcaacgacacccacagatcgcgtggcactgtggtctccatatcctagtaaggcagtccatctctgtacactttggctctaaaatcccacccacggccactttaggcactgagcaagagcaagaaagctcaggtaaggggatcccttgtgggtgagtgtgactgggagatgtcttggtgggctatttctgtatgctgatatttccntgtactggcctttctttctttgtgtgcctttacatctgctactacctcactgccatgtgttgctgtatctgtccttgtttccctgtatttgtcctaactctgtgtctctttccttctctctctttccattcttttctctgagtctctttctgtctctgtctgttttcctgttcctgtctctctgactcatttctcttcccaatcttctctttgtctctccccctcctgttcctgtctcggtgatttctcttttttctgctttctctctctaactccttgtttcttccaccccattctctctccctccc

SEQ ID NO: 617334 - DNA, 608 bp, Homo sapiens
  misc_feature (96)..(96): n is a, c, g, or t
  misc_feature (155)..(155): n is a, c, g, or t
  misc_feature (179)..(179): n is a, c, g, or t
  misc_feature (200)..(200): n is a, c, g, or t
  misc_feature (212)..(212): n is a, c, g, or t
  misc_feature (230)..(230): n is a, c, g, or t
  misc_feature (245)..(245): n is a, c, g, or t
  misc_feature (268)..(268): n is a, c, g, or t
  misc_feature (281)..(281): n is a, c, g, or t
  misc_feature (286)..(286): n is a, c, g, or t
  misc_feature (293)..(293): n is a, c, g, or t
  misc_feature (304)..(304): n is a, c, g, or t
  misc_feature (313)..(313): n is a, c, g, or t
  misc_feature (361)..(361): n is a, c, g, or t
  misc_feature (363)..(363): n is a, c, g, or t
  misc_feature (394)..(394): n is a, c, g, or t
  misc_feature (400)..(400): n is a, c, g, or t
  misc_feature (410)..(410): n is a, c, g, or t
  misc_feature (412)..(412): n is a, c, g, or t
  misc_feature (420)..(420): n is a, c, g, or t
  misc_feature (442)..(442): n is a, c, g, or t
  misc_feature (470)..(470): n is a, c, g, or t
  misc_feature (478)..(478): n is a, c, g, or t
  misc_feature (484)..(484): n is a, c, g, or t
  misc_feature (489)..(489): n is a, c, g, or t
  misc_feature (512)..(512): n is a, c, g, or t
  misc_feature (518)..(518): n is a, c, g, or t
  misc_feature (528)..(528): n is a, c, g, or t
  misc_feature (531)..(531): n is a, c, g, or t
  misc_feature (553)..(553): n is a, c, g, or t
  misc_feature (563)..(563): n is a, c, g, or t
  misc_feature (570)..(570): n is a, c, g, or t
  misc_feature (582)..(582): n is a, c, g, or t
  misc_feature (596)..(596): n is a, c, g, or t
agggtttcccattgagcagggtgtcttgaccatggccgtgtccgctcgctatgagtaaggggccttcctgtttcagaccaaggagaactgagaaanaaagaaaaatccgttcgtgggtgccttgtggatgccaatctgagcgttctccacttggntattgtaaaaaaaggagagaaggntattcctgggctggctgatantacagggcctcnccgcctgggcccccaaanaggtagcagaatccnccaacttttccatctctctaaanaagatgatggccncccgnatgttgnaagaaagcccnttaataaanaagggaagaaacctagggcccaagccccccagattcagggtcttggtncnccccgggtcctgcagccccaacggcgggggnttgctnttaaaaagcngngggcccanaaaaataaagaaagggtgccgnatatggttaacttttggcccaaagaatnaagggggntaaggngaagngcccgggaccaattgggaaaagncgccgnctttcccctntgnggggttttacttttaagtttgnatcccggccnaaataanattttttggggnaccaataaataagntccggctctgga

SEQ ID NO: 617335 - DNA, 164 bp, Homo sapiens
tgtgtgaaaccgcatgtttgtggtcgaaactagaggaccccgagtaagagattttagaaacggaaggagaggatctcacgcacagtaggctatagtacactcatacccatgactgcacaaaaccacatctagactctatggaaactcctgggcacctatgtaca

SEQ ID NO: 617336 - DNA, 1155 bp, Homo sapiens
  misc_feature (1076)..(1076): n is a, c, g, or t
ctcaaaaaaaaaaaaaaaaaagaaagaatgaaaatattgcaggcaataaaataaaaattctctgtaggcctcgatattctcatctgaaaatggggacaaggaattttctcaggactgctttgagaagtgtacttcagccaggagttgggcagggggctggcttagttgtattggcattgtatacctctccaagactaacggctggcaatgcaggagctgtcatcagtgttggccctggaaatgccctgcgagctctttgtggtgcttaggatgagagggagctatctctgggcccaggatccagccctccacagaagaggggttgcagtgaggctgtctgtagcactaacaacttccagaggagcctgaggtcttggattgcatctctgaggttgggagtaggaagaggaaaatggtttttggtgtcctcatacttggtatgctcttggtattctctgactctgccacttaaaagatgtgtgaatttgaacttgtttaacatctctgtgcctcaatgtccttatttgtaaagtgggagggcacctatatcatagggtcattatgggaattaagtgaattgtaaagtacatggacaaatgctatgtaggtttcagcaaatactgctctgattctctgcttctctgccccttctcttcctctgttcagctctgcagccagatggaacagctggagcaagagaaccagcaactgaaggagggggctgcaggagcaggggttgcccaagctgggcccctcgtggatggggagctgctgaggctacaggctgaaaacacagccttgcagaagaacgtggcagccctgcaggaacgctatgggaaagaagccgggaagttctcagctgtcagtgagggccagggggatcccccagggggcccggcccccaccgtcctggcccccatgccgttggcagaggtggagctgaaatgggaaatggagaaagaggagaagagattgctctgggaacagctgcaaggcttagagagctcaaagcaggccgaaacatccaggctgcaggaggaacttgctaagctctccgagaaactgaaaaagaaacnagaaagtttggccgtctgcagacagaaaaggagactctgtttaatgacagcaggaacagattgcggaattacaacaggt

SEQ ID NO: 617337 - DNA, 161 bp, Homo sapiens
tgcttggtgccatggagaacacacgtgtaggtgcttctgggtagcactggtttgcattagataatgtttccctgccagagtttgtgtgggcggacgcatgtgcaccacagagtgcactcaagaggactttcagtcacaggatttcataattgtcatcgtca

SEQ ID NO: 617338 - DNA, 740 bp, Homo sapiens
  misc_feature (7)..(8): n is a, c, g, or t
  misc_feature (432)..(432): n is a, c, g, or t
agcgggnngtggggggaggaacatggcgcaagctctgtctgaggaggagtttcagcggatgcaggctcagctcctggaactccggacaaacaactaccagctttcagatgaactacgcaagaatggtgttggtgagccaggagggccttattagatgggggtggctttggggaatggtgtccgaggttttccctcagaggcctggcaggaaggcctttcagtttcttgccactggctgaggctgagtttccctgctttcccgacaccagaactcaccagtcttcgacagaaggtcgcctacttggataaggagttcagcaaagctcagaaggcactgagcaagagcaagaaagctcaggtaaggggatcccttgtgggtgagtgtgactgggagatgtcttggtgggctatttctgtatgctgatatttccntgtactggcctttctttctttgtgtgcctttacatctgctactacctcactgccatgtgttgctgtatctgtccttgtttccctgtatttgtcctaactctgtgtctctttccttctctctctttccattcttttctctgagtctctttctgtctctgtctgttttcctgttcctgtctctctgactcatttctcttcccaatcttctctttgtctctccccctcctgttcctgtctcggtgatttctcttttttctgctttctctctctaactccttgtttcttccaccccattctctctccctccc

SEQ ID NO: 617339 - DNA, 225 bp, Homo sapiens
attgagctcacctctgtgatttggctccctcgctggtagagggggggatagggtggctgacatcaggggtgggggtgggacaggaagtgagatgtatctagcacaggcacacaaagagtctcataaagggccggggccattatgctcacagcaggtctagcagcagtatggtcatggcggaagggcaatgggggatattacacggagtgcggatcaaaggctccc

SEQ ID NO: 617340 - DNA, 361 bp, Homo sapiens
tcaagggggatcaaccaattcatcatcaataatttaacagtggcatactaccatagcatgagttaacaaaggggaatgacgggcagagcagtgtcttgatgctattgcgatgggtgctcttgctaaaggagaaattttattaggaagagaagagaggagtgaatacagaccatgtggaattgccatgatgaagatggatggagggaagagaaaagcatcaaagaacagcgttcatgatattagtgatgatgatgataacttattgagcactttctacaaaaatcatagctgacactattgaacacttagtgtcagatattatgtaataaactttacatactaatgaggttaaacatcaaaa

SEQ ID NO: 617341 - DNA, 215 bp, Homo sapiens
ttttttttttcccttttggaatagggttttccccccccccccccccccaaaaaaccctttccctttttccggggaattaggggccggggcggccaaccccccctcccccgggtttttgggtttgggggggaatttttggcccgtcccccggtttatttttttccgggggccccccttggaatttaaccccccccggtttccttgggccccttgga

SEQ ID NO: 617342 - DNA, 884 bp, Homo sapiens
  misc_feature (706)..(706): n is a, c, g, or t
  misc_feature (866)..(866): n is a, c, g, or t
ggggagaaaacgcgccccacaagggggggaaaaaccacgggaacccgaacaaggcgctaacaaagtcccacaatgcgagtatcgagcgcaccttataaggaccacgtgcaccccaataactacggcatgggagccatacaggagagagggaatcctgacgaccacaagattgaggagtattcaagttcgatctatacagcgggaaaccacagagaagaggacacgacgcaaaggcccaggacggacacggggcagaagggggtatcgaccgtgccccatatagtgccgtgaaccgcatacgtgcgcgtcgtgaggcaagacaagaaatgggaataactggaagaggattgaaggatgtgcacgcggacgaatctggggagttcaggacactacggcgctttcacagatctcccaataccccatggaccaggtcttattttttgtggagaacttggagagttgtagcacactgtgttatttatattatcctcaaggtagtgaatgcaaggaaaacttagcttccagaaatgatgggtggtttctgggcctacaagactgagacatttagtggcgaccggtgggagacttctaattaatatcatgtatcttgagctggggagatttgaaaatttgtgagtcttcagatgtctggacaatatgtgggatgtgtgcacgtttgtgtctatttgaaaaactcgatgaagtnctcgtcagttcagtgccctctgtccccaggttacctgggaagtacgggtggtaggcagaagtgagcaggaccactggttctgtgccgcagcacgccaaacttaagaattctacagactagctctatacgtagtgaggacccagatttagagtaactgacnacgtgtctccgcatttgt

SEQ ID NO: 617343 - DNA, 112 bp, Homo sapiens
agtgacactaagtatttcgagctctgtaatgtcgcggtcgagatgtacgcgtatcgatggcgcagttggcaggcggcgcaatatgcatcctaggcctattaatattcgggag

SEQ ID NO: 617344 - DNA, 473 bp, Homo sapiens
cgactactactaaattcgcggacgtcgacccagcttagggagatcacaattggaggcagagaggcatgcaggcggggtctaggagacctgcttctccaggcctcttgcctttgagtctttgtgggatggaaagcctcacgaggggactgggaggagaatacccaggtcttaagggacccaaagtcaggatgttgtttgatcttctcaaacatctagttccctgcttgatgggaggatctaatgaaatacctgaaacatatattggcatttatcaatgggtcaaatcttcatttatctcttggcttaaacctgggctcctgagggtgcggcagagagcccaggccagggctctgttcttgccacacctggttgatcctcagatgtggagggaggtaggcaatgctacagtcttcattcaaacagctttcccgtttgccctgagagctcagaatcttccctttaagcccagaccc

SEQ ID NO: 617345 - DNA, 197 bp, Homo sapiens
agatcccccagccattttaggtgtaaaggcttttgcttttggttatttttacaaataatttatggcaatctggaaattgtcattactgctgcctggctttctggatggttcagagggcccctgaaatattcagaaaagaggtaaacaagatcacttgacatgtttagtcacatgagattgccaaaatgatgtccaat

SEQ ID NO: 617346 - DNA, 834 bp, Homo sapiens
acactaggataagaggactggggtggttacgctcatccagtcaagaccatccatgcagccacccagggaacccaggtcattgagggtacccccatcactgacatccccacgtggggccccagctccacgctgatgccaggccacatactcgactccctcagaccgccctctcagcacactgagacagcagtggtggtcaacatgcctgcccaggccactgtatgccagccctcagcccctggccgatgtccacactgcccggtgtggtggcaggtgtgcccgccacaggacccacctgcgtgtgggcaacagtgcacatggcaagtggccccatgcatgccatccacctgcctgccagcccagcctgtccatgacacatctccccagtggtgcccctgccaccaatgggccccccacaacctgactcgtgcccacgggctgcagatgctgctggaccattggcgtggggaagtatgagttacaccgaccctggggacaccaccagagaaatgtaagaaggaattagaaccagcaacgcagagcgaaagcagtttacagacctgaaaattgtgttagaaggcagagagtttgaagtccaccaaaatgttctagcttcctgcagccttgtattatcaaggacccttgattcaacaggtccgtgcaaagacagcgtgcacagctggcagggaagaagatgagagcatcggtccctgtagaaacctcaaggcagacgtcctgggagttgcatgctggaagtttgactacacaggggtcacctggtcatcgaattcggacaacgccaaacactgttggtggcggcaacagttcagatcc

SEQ ID NO: 617347 - DNA, 187 bp, Homo sapiens
gggaatgagatagcgttgttgatgagatatttggaggtggggatagtatagggggaaatagaaggatcaggtacgtgcggtcgggtaggcctagcgattgtgggggcgatgaatgaagcgaacagattttcgttcatgtgggttctctggccttttcgcaaggctatctcttccccgacgctatctt

SEQ ID NO: 617348 - DNA, 894 bp, Homo sapiens
ggtccagtaataagagtcaggtgtgggttatgctttcagagtcagacatggttaggtttatttaaaaactattagcaggttttcactgacaatgctttttaaaaataaaaaatgtaaatccatttttaaggcagatggtcattatgcatatacagttgaactatagttgggtccatataggaaccaatcaccaaaaatctggtaacagaattaggaaatcctttgagaagagggccttaatgaccttttatgtgaaaaaaatttgagagaattctgacattttttctgtctctctcacagggttgggtttcagataggagtaggtatgacgaccaagaagagagaaaattgtgggctgacctgtataggtggtaatagtggtgtccctaaagggaggaaatgatttcaaggtacccacagtgaacatgttcagctgaactgaagagtttatatgtatggttcaaacagagttgaaaacgggagattcctgaagtgttctttgctggtttaacaattattcgtatgcgtgttattaacaatacaggtgtgtcttttgctaacatagatgacggggggatttaaaatggttgggtaatcgacccccttttctaccatttacttggaggtacgcaaatgtgccccatataaattaccggatggacacttgatggcgcccaacgtcgccaactttacctttaacgttccctgcaccgttcattacgacatttgccccattacatgcgcgcccttttctgcatctcccactgtcaccggcccggataccgattcagcgggatcacgcgagtaaaaccccatgtgcagtttttctttccgccatcggtcccgctatagggtaggcccacagctgtctcacgcgaattatagggcccccga

SEQ ID NO: 617349 - DNA, 337 bp, Homo sapiens
agtagtgagtgtcaacattgcttgaaaactcctgagtccgagaatgaactcccatgcacccattttaattgtctaatccatgatgcaagggtacttcagagggaaaggctcgacacttttttgaagtctgaaactgaacgaaggacgtcatacatacgatgtgttggcccataggtccgacgatttaaggtagtttcattggatgggaggacggttggtgtgcatgaatcaagcggcggagcacactgctgactaatgtgtaatattggttacagtgttagaaacatttctgagtgggagacaggctattccatacaaagagggattggtagggtcc

SEQ ID NO: 617350 - DNA, 355 bp, Homo sapiens
ctcagcggggaaatatcgtgtgaagttaggccccatcggaggcagggccaaaagcgggaagaggatacagtcactctggaagtattagtgggtccagcagttccatcatgtgaagtaccctctgcggctctgagtggaacggtggtagagctacgatgtcaagacaaagaagggaatccagctccggaatacacatggttgaaggatggcgtccgatggctagaaaatcccagacttggctcccaaagcagcaacagctcatacacaatgaatacaaaaactggaactctgcaattgaatactgtttccaaactggagactggagaatgttcctgggaaccccgcttagagtcgc

SEQ ID NO: 617351 - DNA, 284 bp, Homo sapiens
  misc_feature (24)..(24): n is a, c, g, or t
  misc_feature (271)..(271): n is a, c, g, or t
gatccccttatgtttgctgagagntcatggaggatggggtcataataactgatttcttcagcactgaactatgggcttttttttttccctttttggagacagagtcttgctctgtcacccaggcgggagtatagtagcacgatctcagctcactgcaacctccacctcccaggttcaagtgattctcccgccttagcctccccagcggtgtgggaccacagacacccgccaccccgcctgcctaattttggtattttaagtagagacaggncctcaccatattg

SEQ ID NO: 617352 - DNA, 935 bp, Homo sapiens
tttaggttttaagttaaatggtaatgtgcattgggtgtttttgtttatgtttaggtttatttgtgtattagtttgctgtgtagattgtagttgtgggtagttttttggtagcctggttattcttggtatttgtgtgtatcttgtatcaatgtgttgggcattattgcaggttgaatttgttaattcggaatgcttcttccaagtagtctctatgatgattaagtttctgaaatttatctgagaccgattcaggtacttggtttggggaatttgatagttattgatgtgcatctgttaaatctgatgtacagactattactcagtcatgtccctcagtgaaccgttttttgattactagtatctaacattttgcctcctcttttttggttttgctggttataaaggtttggattggagagggctcactggattcccaattccttggagtctggatcattggattcaaatcataatgtggataggatagggaggtatgaattactcaggattcatggagctgggatcagattaaccaggaaacataggagtggattcctgccccaactcaaacggcattgcgtgtggatttttttattccacgttaatttggactatttccaaagattttttttttcctattatttgagcgattggagcccttaagatgcacgatggaattgtgttttgcgtttttatggtaaaacggagcaaagcgaggacctggagataaaacgctaggaagcaatactaccttggaaggattcaagcacgagtagaatggtaaacatttaaaggggaaagggaggggttatgtattaaaatagtaaatcagtaagtcaacttctaagtttaaagaaaacaaaaattggagttgaagtataggtaggttccaaattaggtaatcaccgggtcggtgaaaacagtataatctgcga

SEQ ID NO: 617353 - DNA, 224 bp, Homo sapiens
ttccccatatcagtcctggagcacatagctagtactcgcatctgtgattatcctcatctctcgtgcagtgtggtgcgatgagatgatcacgagataatttctacacggggttgtaccaatctaagattcgggtgtacgtgggcgtgataccgcctttaatccctggacgattcctgtataggcttccaggcagctcgcgctatcgctcattcagtataatccac

SEQ ID NO: 617354 - DNA, 280 bp, Homo sapiens
gctgagcccgtccgtccgccgccaccacccacttcgggacacagaacatccagtcatggataaaatgagctggttcagagggcaaactgcgagcagctgagcgatatgatgacatggcagcctgcatgaaggctgtaacttagcaaggagctgaattatccaatgaggagaggaatctctctcagttgcttataaaaatgttgtaggggcccgtagtccatcttggagggtcgtctcaagtattgacaaagacgaagctgcttagaaaaacagcagatgg

SEQ ID NO: 617355 - DNA, 938 bp, Homo sapiens
tggcattcaagagtgctgggattggccgggtgaggtggctcatgcctggcttcccaggtgctgggattacaggtgtgagccaccacacccagccttattttaattttttttttttttttttggaaacggaatctcactccagccggggcaacaaagcttgattgatcctgcctcaaaagaaataaaaataaaaataaattttttctaaaagatgagaagccagcgggggtggctcactttggtaaccccagcacttggggaggctgaggtgggcagatggcttatagcttaggagttcgagaccagccggggcaatatggtgaaaacccatctctacaaaaatttcaaaagttagccagacatgtgggcgtgggcctgtggtcctagctactgtggaaggctgaggcaggaatatggttggacccggggagattaaggttgcagtgagctgagattgtgccactgcactccagccggggtgacagagtgaaacccgttgtctccaaaaaacaaaaacaaaacaaaataaaacaaaacaaaaacagtttccattaagaaccaataagggaacagggcgaacaccaaacctcaatagtctcaaatctacttcaaaaggtcacatttagaaaacttcttttaatactctataataatggaactcccaatattaacatatctgggcatccttatatgctttactggtggtgacttaaacatcggaacataaaaatcttctcttctcctctggaaagttggggaaaccccctgaaggatggggctaactaagctaacaactttttttatttttggggagaaaaggcactctccttcttgttgcgcccaggttggatgtcaaggggtaactaacccttgggcccccaggaacattccagcctcggggttcacgagatctccacatggcccagccccctaaaagg

SEQ ID NO: 617356 - DNA, 736 bp, Homo sapiens
  misc_feature (642)..(642): n is a, c, g, or t
gcgcttccttccgctcggctgttttcctgcgctggagccggagggccgttgtcggccatggcgcccaggcgtgttggcatggtcttggagccccatttccacagggactggcagcggctgcgtggccacgtgggttcaacacagtgcggccctgtaagagtccgtcagacggtaaggcctggacaaagccataggtcgcgccgcattcggccctgggccacgggtcggtgttccactgcggtccagtcgtgcgtctgtcccacggttcgtgtatcacactgaagagtgctgcgctcggagcagcgggttcagcgctggaggagctcagggtggccggcattcacaagaaggtggcccgggaccatcggcagtttctgtggatccgaggaggcggaacaagtccacggagtccctgcaggccaacgtgcagcggctgaaggagtaccgctccaaactcatcctcttccccaggaagccctcggtccccaagaagggagacagttctgctgaagaactgatagactggccacccagtctgaccggaccggtcatgcccgtccggaacgtctataagaaggagaaagctcgagtcatcactgaggaagagaagaatttcaaagccttcggtagtctccgtatggnccgtgccaacgcccggctcttcggcatacgggcaaaaagagccaaggaagccgcagaacaggatgttgaccaagaaaaaattaaaagcctcctg

SEQ ID NO: 617357 - DNA, 109 bp, Homo sapiens
ggagggcctgttgcaggggcagggcgggcccgttcctttggcagctcctggagagctgtggacatgcagtcccccgaagttcgtgctgcaataaaggccatcttctctt

SEQ ID NO: 617358 - DNA, 181 bp, Homo sapiens
  misc_feature (50)..(50): n is a, c, g, or t
  misc_feature (103)..(103): n is a, c, g, or t
  misc_feature (132)..(132): n is a, c, g, or t
  misc_feature (155)..(155): n is a, c, g, or t
  misc_feature (169)..(169): n is a, c, g, or t
agatcacatgtcagaggtgacacaggtagattgaccaggtctagaggttnttctttcaggtctcttcctgtccattctgtgactaagctgtgagaggtgacanaggaagttatattgatatcatcttatagnttctctaaaagttctggatgtgncttcaaaaaatagngcttggttaggc

SEQ ID NO: 617359 - DNA, 932 bp, Homo sapiens
cgcaaggatgtgcctgacacccggggcccaaggcgttggccccagggactcttcctgtttcataaagggaaaggataatttgcacttgacgcattccaactttaggtatgaggatagagaaggatctgctcccgccatttggcccacaggagcagaaggcagacctgggatgccccagtttctcttcagggatggatagtgacctgtcttcgatcttgcacaggtaagagagtagttagctaacctatgggaattatactgtgggccttgtgagctgcttctaagaggctaacctggaatactaagctcagaggtcaaggtcaatataagcacttcagcggcttgctccgccaagtgggcctgatttagcagggtcggtcctgctgcggagcgtgccaggtccagcaccttcctgctagggcacatcgggggtctagggtcgactagcccctaactcttataagcaatcaaagaaccattagaaagggctcattaagccttttggacacaggaccccagagcagtgaaaaagctgacttgcgcctaaggtcgtaagcaagctaacttcgtgcatgggcaaatgtagcccagcgttcactcgcaacggcagtcggcacactatttacttgcctagcttgccatcgtgctagtctgagccatgccataccagacagggtcctctcaacctgtgatgctcacactcaagaggcattggcagctcagagaccagtagagcttcactttcctagaacccttccactgcccaatgtggagacgcgttagtggggctttctatggagccatcctagaccgtatgtggggacactagacctcaggtggtctcttggcgttagtgatgctaggtcgaagagaatattagctggtttctatcttttctataaaggcatttgctcacatacctgcttggataa

SEQ ID NO: 617360 - DNA, 108 bp, Homo sapiens
ctcaaatggcaccaaggaggatgtggacgtgctgaagacaaggatggaggagatgaaggctgagagcgaagcgggaaaagaaaacaaatgaaacccaaggcatgcaga

SEQ ID NO: 617361 - DNA, 358 bp, Homo sapiens
gtcgacctggaatctccagttttccttcagggaactccccaatggagtgaggacctcccacatggttcaacctggtaagagctgccactggtttctaacaatttttgagagtgctgtgtgggaggagacaaagcatgcaacaagtcaggacctctgggttccttgctctgccttcaggaccactggctgctcggctgacaggtaaacctggagccagccagctgaattgacattctcacagtgcatgaaggtgctctaaagtctgctgtttcttctcagttttcttggtaatgactagaactccattggatctttgatccaggggcttctgagtctgtgaagaagagtacgtcgacgc

SEQ ID NO: 617362 - DNA, 301 bp, Homo sapiens
tccacacaacatatagatcatttattttccttttagtcccgggttcagtacatagatggcttttctttaccctttgggttgacaattttctccaggttgctgctgatgatatgataaagctcagcataaaaggccctcaggtccatcaccatggccctgagctccccataagctgccttatcttgctcatgcaccaaggcccggtaatccattacatgagtctccttggaggccttggccacaacatccccacgttctgagaagtacttggaaatggttgtctggaaagcttccactttgg

SEQ ID NO: 617363 - DNA, 402 bp, Homo sapiens
ctcgatagtattgaaccaaggggtatcttatcatattctttatatctaaccaaattccataaactagggaagatctaatccacatacaactattgagggttcaaccattttcaaaaaatttagagcctgtcgattgtcatcaaccctcaacctttcaataaaaaacatgttggttactgacacattgttcctctatccatgagtcctcctcaatctgcatcttgtcaatctagaaagttctaagcatatagttggatagacttatcaaccactcagtcaataatataatcgatcaatcgactaataatctccagaagatcgagagatttgatgaacaaaaaaatacatagttttaaacatgattaacccttagtaagtgtgggatcacatggccactcaata

SEQ ID NO: 617364 - DNA, 335 bp, Homo sapiens
  misc_feature (177)..(177): n is a, c, g, or t
  misc_feature (219)..(219): n is a, c, g, or t
  misc_feature (233)..(233): n is a, c, g, or t
  misc_feature (243)..(243): n is a, c, g, or t
  misc_feature (262)..(262): n is a, c, g, or t
  misc_feature (269)..(269): n is a, c, g, or t
  misc_feature (290)..(290): n is a, c, g, or t
  misc_feature (294)..(294): n is a, c, g, or t
  misc_feature (310)..(310): n is a, c, g, or t
  misc_feature (323)..(323): n is a, c, g, or t
atgacacgcctcaccaaagctatgataaccttaattacaccctgagcattttgggaggttgaggtgtgcggattacttgaggtcaggagtttgagaccagcctggccaacaaggtaaaacaccatttctagttaaaatacaaaaattagccaggtgtggtggcacatgcctgtaagncagctacttgggaggctgagacaggagaatcgcttgaacccnggaggcagagattncagtgagctnagatcgcaccactgtactncagcctnggcaacaaagcgagagtctgncttnaaaaaaaccacccttntttcaggagtgangttgggttatcc

SEQ ID NO: 617365 - DNA, 814 bp, Homo sapiens
aaatcaaaaacaataagcgccggtaatggggggatctggcaaatggaggaggccccagctcctctatggtacacgggtcttattgggcagtgaccttgctccgggaaacaataattattccttcagccctgggggaattggatgtgttggatgaccccgggtggcatttcagtgtgggctctcattaatctcacccgtggcaggtttcatgtgcctcaccagccctccttcattgtggtagagagacaggtggggactctcccggccgaggatgtgtccacctgtggccctttgaggacggacacctgtgaactttctcccttctccaaactctcgctcttccgtgggaacttgtggcggaaattgcaaggtggcgggcacaaaattctcacaacctcgagggctgtggtgccaaaaaagcggggtttatacaccagagcttccaggcaaaatattctcaaccccagaggccttgtgttggtgaatatgagggcgccacttctccgcgcgcctcacagtggggggaagaggcctctcgaagtgtctcataaaatgtggagccatgtgggtataaaaggaagtggggtgccccagaggcagggggggctcctcaggtgaagatttacccctcgggagaccatctcattctccccacagtaaaacgcggggatttctccacacagattggtacaaaatacggggccccaacgagccaaatttgtttttggccccagggagaacattcggtccccagggtcaccatagaaagagggcctccaaagagagggctcctcaggaggggggtgggggcccc

SEQ ID NO: 617366 - DNA, 606 bp, Homo sapiens
  misc_feature (327)..(327): n is a, c, g, or t
agcggggaacactcactttaaaataataaaatatcgaataggtaaagttcacatattttaaagttatgctccataggggcctaaattctattttggcctgattttttagtttccttcacttttttttgggagacagggtgtggctctctggcccaggcgggagtacagcggcatgatcacagctcacggcagcctcaacctccggggctcaagagatccacccaactcagcatctggtgtagcggggactacaggtgggcgccaccatgccgggataattaaaaaacggcttggtatagatgggtctcactatgtggcccaggcggntctagaactccggggctcaagccatcctcccacctcggcctcccgaagtgctagaattataggtgtaagccatcaggtatttttcacttttaaaaacggaaatttacggaggtacagtttacacacaagaggcacccattttacagggacagttttaaacagttcaacacacacatacactggggtaaggaccagtcacaatcaatataaagaatatccgtcaccccagaaagtttcttcatacatttgtgcgattagtaacaccccctttaggcttgg

SEQ ID NO: 617367 - DNA, 707 bp, Homo sapiens
tgagccccccccccccccccccccctcaagaagccgtcgcacccaacgtccttttctttattactttatatttctcttcatttaagataccctctcagggagcaggggttccgtttggtttccttctccaaggtagacggcgcggaggcaatactaaatgtaaggtatcggtttagggtgtaggggcgcgggtagggtaggaggtcgggtcggtcttcagctaccggaagcgaagtaggcgggtagcccgggtcggccttagttccttagcgtaacgtttgaggatgagagcggctttagaaagaaatcggtagttttatcggttaatcgtagtttcagttcacgttttattacttcctcttaggggttagctggttctagtagggattagaaaaagttatagtttagggagtaggcacggttccttcaagttataactctaaaagctctcgcttcctacgaccttccaaagggaggtagggacctcttttgattttttagaaggcctcttatgggtcttacctctttacgcgttaaatctgcgtctctggggaacgtagagtttatcaggcagatttcgtagtcttagcgttgcggcccggattgctataattcggagtgtgggtctagcggttcggctcctcgggttttgttgcattccttttaatttcgggtccattctttcaaatagatctcggagcctaaga

SEQ ID NO: 617368 - DNA, 273 bp, Homo sapiens
gtccgtcaaaggcatcagagttagggtcgcgtgtctgggagacttttctgtctagctaaaggattgtaaatgcaccaatcagcactctgtgtctagctcaaggtttgtaaaggcaccagtcactgctctgtgtctagctaatctggtggggacttggagaacttttgtgcctagctggaggattgtaaatgcaccaatcggcactctgtgtctaactcaaggtttgtaaatgcaccaatcagcactctgtgtctaactcaggatgcttcttga

SEQ ID NO: 617369 - DNA, 475 bp, Homo sapiens
agcttcttcaccatattaaaaaatcgccggaggggacaaccgagccgttctggaccacaactcctagattgggccgcctcctgaggcgtcatttaacccgggagtctactcaacccacggcccgtccaaacttcgagactccgaatctcacacattgaccggccctcgtcctccggagccatccccaccgccctcacttctatcatacgcccctcatacaacaccagcatttcactgttcggcttccaacacacccactaaccttctcctcgaccttccaccctcttaccatcccttttaaaacgaacaaaactcccctctgcaacctcccctataccacacctatccttctctccccactcccttgtcacctctaaccacaaccccatcgcatcatacatccacacactcctcggctactctccctcctctccacacctctacttccccttcgccactaccactctgattctag

SEQ ID NO: 617370 - DNA, 1064 bp, Homo sapiens
tagccgggagaagggcctctccattctttattcaggtcccaataagtgtgtaaaggggcaaggggtgaggggggcgaggggcctcttagggtggagggaccgctggctaagctggaagggcgagcagttcagccaggtggcgtccaagatggcccaccggtgggcacaggggggttcacccctgtgcgaggggtggaggagagggcaccaacgccgggggggcaggagagggcacagagagggctgtggacgcactgtggagggcggtggaggagagggcggggtgtggtggcaacaagaaagcaagcctccgtgcaggccgggggataggggtgggtggaccgcctgccacagggggatcttctagtgggacattaaataacatcggggctctggcagagcactctcacaaggggggaggccgccaggggacagcgccagtgtggcaggtggggcgcagggtgtccggagaggcgcagattgtgtgtgtggaacaagtgtccacagagatggggcgtgggacccaaagagaagcagggctggtgccccaagatgggacagaggcgccatcttggtgcagaggatctctttggggggagcggccaggggcgcaaagcaacaacgagcaacacatgcgggagataaactccaattcttggagggccacacgcatgttatcttcacaagcaaaagaaactgtgcctggccggcaagggggtcatccccagaatagcgtgtgcccccgcatgggggcggtcccacggaccctatagaggggttcttgggaagtcaccggaaggggggcaaccctttcatcaaaacaaagagaggggggggctccaaggggccccgagaatcaagagcagggaaatcacggggctaacccgggcggccccacattattttccccgagggaccacaactctgtagaaaccctagaaaggaatcacgccgccgaaagatgggacagcgggggagatctccgcaccggagaggagtcccacccgtaaaaaggtgcgctaggtggggaggaacgccacacaaccccgggggggggctaagaa

SEQ ID NO: 617371 - DNA, 136 bp, Homo sapiens
tgtctacctccacaaaatagtgacatcaccatctaacactacacccccccacatcatacacgctacaccccacatacaccatactcactactctacaccatgcttcactacataccacacaccacacacactagat

SEQ ID NO: 617372 - DNA, 219 bp, Homo sapiens
gggggaattttttttttcccccccccccccgggggacagttttaaataaaaataaccccgggggttttttcccccaacccggggggggttttccctggtcccccaggcgggggcggggtgtggggggttcccttccccttttttaaagggggcccccaccccccccttttttttttttttttggccccccccccccaaaaaaaaattttgggcccccca

SEQ ID NO: 617373 - DNA, 670 bp, Homo sapiens
cccgcgcctgggcctcgccgagccctgacatgctgaggaaagcagaggagtacttgcgcctgtccctgggtgaatgtgtgtctggcctctcctgcacgcaccactggagaccagcagtgcagtcatgtgcctggaccttgcagcttcctgtgatgaagtgccccttggacagggcttatttaattaaactttcttggtttgaacaatggagacatctcatgagctgtcttaaatctttttgagtgtttacttgggcctgaattcaaatatttgggcctaagagacctagctgtacagtttagcttgtactagaagcagttgaacatggcttcaaatgatactaaaaatgctatgagtccagtcttccccagacacagcaagtggatcttgacttatccatggccacttatcacttctgctgcacttgctttcagcatgcaagattctaaagctgaaagtggataaaaacaaaatggtagccacatcctggtgtaacaaccaatgctatatttggatcgacttgtgtaaacacctacagcagattggacatgcaggtcgacagagaacctggagatgttgctactccaccacggacagagaaacgacagatagcgtgttgaagccccagcaacggacaatggagacggtagaggagatgccgccataaacc

SEQ ID NO: 617374 - DNA, 691 bp, Homo sapiens
gcgggcctgggctgcatgggctggcctcttctggcgctccgcgctgcggtggtgctgcgctgcgtgccctgtgggccccgtggcccgagcctgctagtgctgccactggctcgtggagtggccctcctgtgaccctggtgagctggaccctgtgtggctgtgtgaatgccctgactgtgctgtagacaactgtgctgtgcatctgtctgttgtgactgttgatccatgctgcttttgatgagtgctgtgtggcttcactgcttggtcgggtgattgaatgattgcttgcatgtgcaccagatgagctgtccttgcctgagcactaccatgtgacctgctggagtgaagcccttctaccctgccctcaatcctgctacattgagctctgtggcctgtggttggccatggtcttgggaaggggtacaattgtcagtcctgcgcctcgatgtggccattgattggaccacacctgactctggctgatggcttgccccaggaaccataagggggtgacttcagcgttccacatcatgcatggaattgtcatccacgccagcgactccgttggagggggccagctgggagatccatgctgtggttccagagcatgtgagctgttgagctgggcagacgggggccagcacagcagcatcacccaaccttgaggctcaagctgccttaccaccccatc

SEQ ID NO: 617375 - DNA, 1174 bp, Homo sapiens
gtgctgggtagatccgaggaaggctgaatgtgaccccgaggcgtgtaaccctgaaattcaggacgccacactgttgagaaactgtcaggcaccagacagtgacggcaacaacgaacgagcgcttgagtgcgagcagtctgataagtagcagaacctggaaccaaacctccctccatcgacggaagctacgaacgaacaaagtggtcgacccactggaacaccacgcagctgggacaagggccagcatgggcctgcacgagtcactcagagtaacacctcacactttaagacgcatgactccagagggtacaggttccatgtgaccatttatccagggtttacaaacaggcaaaacaaaaccagaggtggactctgactggagccatatgccctgaaagtctaaaggaagcatcaggttttcaagagtgggctgctctgggagtggagggaacggaggcacgaagggaccccggggatctcatctgcagctggagagatgccagctggaacaggccaactggcttggctgttgcggggagccaggctatgctctggagtctttgccggtgtaactcatttcagcagcggccggggaggaggcatcactgctgccatccccattgcacagaggggcgcctcgaagcatggggaggcatcatgctgggtaggcattgtcccgagacttcaggtccaccaagactcagcacgattgactccttggaaaagtggggtctatgaagatggtaattatgaccagatgaggtcacatgctgggataaggtggtccccattccaagacacgggtgtcctccgtagaaagccggttgaaagacccagaaaaggtccatgaggccgaggcctgcgacccacagggatgaagacagaggatcgcagatgggacagggagcaggaaccccggcgatgtggtagtgcgaaacaatgtaaaaatagccgaaaatattcaaccaatgtccaaaaaaagagcgcactgtgtaaccggatacgtaagagatataacaggaaaacattatgagtatagttatgaatacaaatgtggaagagcacacacatgtggtagaaaaaacaataacaccactaactatgacacacgtcgactcaactaacatatgtgataagtctagctcatcgctgcgtgttggttaggtgcatggat

SEQ ID NO: 617376 - DNA, 837 bp, Homo sapiens
  misc_feature (837)..(837): n is a, c, g, or t
agaagagctaactatcctaaatatatatgcacccaatacaggagcatccagattcataaagcaagtccttagagacctagaaagagacttagactcccacacaataataatgggagactttaacaaccccctgtcaattttagacagatcaacgagacagaaggttaacaaggatatccaggacttgaactcagctctgcaccaagcagacctaatagacatctacagaactctccacccaaatcaacagaatctacattcttctcagcaccacatcgcacttactccaaaatgaccacttagttggaagtaaagcactcctcagcaaatgtaaaagaacagaaattacaacaaactgtctcacagaccacagcgcaatcaaattagaactcatgactaagaaactcactgaaaaccgacaactacatggaaaccgaacaacctgctcctgaatgactactgggtaaataacgaaattaaggctgaaacaaagatgttctttgaaaccaagagaacaagacacaatgtaccagaatctctgggacacttttaaagcagcatgtgagggaaatttatagcactacatgccgaagagaagcagggaagtctaaaatcgaacctaaatcaccattagagactagagaagagacaaaaccttaaagtagcgaagaaagaataattagatctgaggatgggagaatgggaggaaaaaactggaaaatttggcccgagggtgtcgaagaatacacatgtgaccgggcgataaaaaggggggacattgtgaaggagggttccggcccaaaaggggaagattagaaaaaagaatgtgccaaaagn

SEQ ID NO: 617377 - DNA, 357 bp, Homo sapiens
atctattctatttccccaacaccaccttttttcttagttcgaacacacctcaggactaggccagtgcaccgaaacgcatccgctaccatggcggaggtcgctttgggatcatggagaggggggattgccattattttgtgaacttggtggaagggcccccacctccacctgagccaccaaagacgggagttgcccatgccaaagagtatattcagcaggttcgcaggcggaccatcgttcacactctatgatgaggagattcacactccacagggggtgtatttcgccatttattttgtaaaaataaacacacattgaagggcaccaaaaaaagacacctggcctccgtgggctaat

SEQ ID NO: 617378 - DNA, 95 bp, Homo sapiens
gttcacatgcactgtgtgtatgagaatagatggtctgttgttcagacaaaagtaaaacatttttttcaaattgttacattgaaaggttttctggg

SEQ ID NO: 617379 - DNA, 492 bp, Homo sapiens
  misc_feature (26)..(26): n is a, c, g, or t
cttcaagttgggaagccctggtgccnattgcccccaccttcaccagcttgggcagcagcaagactatttattaaaaactttaagatgggccaggtcggtggctcacacctgtaatcccagcattttgggaggccaaggtgggtggatcacttgaggccaggagttcaagaccagcctggccaacatgatgagacctccgtctctactaaaatacataaattagccgggtgtggtggcaggcgcctgaaatcccagctactcaagaggctgaggcaggagaatcgcttgaacctgggaggcaaaggttgcagtgaactgagattgcgccaccgcactccagcctgggcgacagagcgagactccatcttttaaaaaaaacaagacgggccggcacggtggctcacgcctgtaatcccagcactgagaggccgatcacttgaggtcaggagttcaagaccagcctggccaacatggtgaaaccccatctctact

SEQ ID NO: 617380 - DNA, 462 bp, Homo sapiens
gaggtgacctagagttaccgcgcgttgttgttacactcaggcaaacacctgtgtcacaataacagcctaatacatacacttattagggccaggcactgttctgagtgctgtacatgtataaagcctcctaacaactcatgtaatcctcctaatagccctgtaaggtggatactattattatctccaacttacagataagggcactgaggcacagagaggttaagaatgcaccccatggctgggtgcagtggctcacacctgtaatcccagcactttgggaggccgaagtgggcagataacttgagcccaggagttggagaccagcctagacaacatggcaaaattttgtctctacaaaagacccaaaacttagccaggcttggtggtgtgcgccttagcctccccagtgactgggactaccggtgcatgccaccatacttggataacttaaaaattcttttg

SEQ ID NO: 617381 - DNA, 560 bp, Homo sapiens
ctatcattttggaagaggaattaatgcaaaacacatttgtatttttttttatttttgcatattctcgattatctatacatatttttaaactggatcataaaaggtataaaaagtaattgatccatacaacatttttaaatatttacccctctattttcagaatatttactaaaatatcagttatcaaagagtagggaaaagttaactacaagtttgtttttcctctttttatgtatcttttgagctttgtaattaggcagtacatctctatgttttcagggaaacctatttcattcgccattttgatgatttaggcatacgccaatgctaacgccgtttcttgtaatttctattttttcaaatggagtactttaccttcctcccgcagctgaaactttcaacccgccggaagaaaagaccaaataatattataattaatatttaaaacccttgaaagatcatctcttaaaataacctcaaatagtgtaaatccaagcacttgaaaactttgccgttttagaactcgttaaatcctttaagaaggacataacagccagagt

SEQ ID NO: 617382 - DNA, 117 bp, Homo sapiens
  misc_feature (62)..(62): n is a, c, g, or t
  misc_feature (97)..(97): n is a, c, g, or t
  misc_feature (112)..(112): n is a, c, g, or t
agtaggaccccagagctgttggattgaagaagagagacaaaaagaacaaaactaagaagctnaagcagcagcagcagcagcacctgccgcagcagcnacagttgcaactccncagcc

SEQ ID NO: 617383 - DNA, 698 bp, Homo sapiens
  misc_feature (8)..(8): n is a, c, g, or t
  misc_feature (71)..(71): n is a, c, g, or t
  misc_feature (98)..(98): n is a, c, g, or t
  misc_feature (119)..(119): n is a, c, g, or t
  misc_feature (140)..(142): n is a, c, g, or t
  misc_feature (156)..(156): n is a, c, g, or t
  misc_feature (158)..(158): n is a, c, g, or t
  misc_feature (165)..(168): n is a, c, g, or t
  misc_feature (181)..(181): n is a, c, g, or t
  misc_feature (185)..(185): n is a, c, g, or t
  misc_feature (189)..(189): n is a, c, g, or t
  misc_feature (198)..(199): n is a, c, g, or t
  misc_feature (205)..(205): n is a, c, g, or t
  misc_feature (208)..(208): n is a, c, g, or t
  misc_feature (251)..(251): n is a, c, g, or t
  misc_feature (274)..(274): n is a, c, g, or t
  misc_feature (300)..(300): n is a, c, g, or t
  misc_feature (331)..(331): n is a, c, g, or t
  misc_feature (334)..(335): n is a, c, g, or t
  misc_feature (337)..(337): n is a, c, g, or t
  misc_feature (339)..(339): n is a, c, g, or t
  misc_feature (349)..(349): n is a, c, g, or t
  misc_feature (382)..(385): n is a, c, g, or t
  misc_feature (395)..(397): n is a, c, g, or t
  misc_feature (445)..(445): n is a, c, g, or t
  misc_feature (520)..(520): n is a, c, g, or t
  misc_feature (588)..(588): n is a, c, g, or t
  misc_feature (612)..(612): n is a, c, g, or t
  misc_feature (696)..(696): n is a, c, g, or t
tttgtttntgtaaaaagtcccggttcttccataacttataaacatgatttataccgaggagatgggaaagnggacggggcaggtgtggactgaccggngatggggaagctcctctcgangccccctcggggcgaacccannncctttggaggatgnanacgccannnnactcctccctgangttntctngccgcctcnncccctngcnctcagaatcctgcgtgcccctcaattccggaatccctcccggnaccccaggcccactgggcatgcngcccctgctactcagaatcccgaagngccattcagttccagaatcccctcctcagcngcnngngngggggggtcnatcctttccaatgtccccccccgacccccaagnnnnaagggaaggnnngggggctcaggtctcccctctgtggcagggggaggtggaggtggaggnggaatcggaagggcgtggaaggcgggggccaggagggctcagccgatggtgaggccaaaaccacactgaaacttnttcttgcggtgattcaagaaagccccaagggccagtgtcaggggcaggggtgggagcttcttctccancgtggcacccacgatccagttgcnatccacagagcctttgaagaggaggttggccttgggcaggtccagctggtacccgaagaagacgctggtgtcctgcatccttgngc

SEQ ID NO: 617384 - DNA, 1602 bp, Homo sapiens
  misc_feature (280)..(280): n is a, c, g, or t
  misc_feature (782)..(782): n is a, c, g, or t
  misc_feature (786)..(786): n is a, c, g, or t
  misc_feature (791)..(791): n is a, c, g, or t
  misc_feature (795)..(797): n is a, c, g, or t
  misc_feature (805)..(805): n is a, c, g, or t
  misc_feature (825)..(826): n is a, c, g, or t
  misc_feature (830)..(831): n is a, c, g, or t
  misc_feature (833)..(833): n is a, c, g, or t
  misc_feature (851)..(851): n is a, c, g, or t
  misc_feature (869)..(870): n is a, c, g, or t
  misc_feature (876)..(876): n is a, c, g, or t
  misc_feature (883)..(883): n is a, c, g, or t
  misc_feature (904)..(904): n is a, c, g, or t
  misc_feature (1240)..(1240): n is a, c, g, or t
cggacgcgtgggcagcctcagtgctatgaaggtgacagcgtgaggtgacccatctggcccgccgcgatgctggcaacacggcggctgctcggctggtcgcttcccgcgcgggtatctgtgcgtttcagcggcgacacgacagcacccaagaaaacctcatttggctcgctgaaggatgaagaccggattttcaccaacctgtacggccgccatgactggaggctgaaaggttccctgagtcgaggtgactgggtacaagacaaaaggagatcctgctganaggggcccgactggatcctgggcgagatcaagacatcgggtttgaggggccgtggaggcgctgggcttccccactgtggcctcaagtggagcttcatgaataagccctcagatggcaggcccatagtatctggtggtgaacgcagacgaggtgggagccgggcacctgcaaggaccgggagatcttacgccatgatcctcacaagctgctggaaggctgcctggtggggggccgggccatgggcgcccgcgctgcctatatctacatccgaggggaattctacaatgaggcctccaatctgcaggtggccatccgagaggcctatgaggcaggtctgattggcaagaatgcttgtggctctggctatgatttgtgacgtgtttgtggtgcgcggggctggggcctacatcttgtggagcaggagacagcgctcatcgagtccatttgaggtgcaagcagggcaagccccgcctgaagccccccttccccgcagacgtgggangtgntttgngctnnncccacaantgtggccaacgtggagacanntgtnnangtgtcccccacaatctgncgccgtggaggtacctgnntttgcntggcttntggcagagaacgcaactcagngcaccaaactattcaacatctctggccatgtcaaccacccttgcactgtggaggaggagatgtctgtgcccttgaaagaactgattgagaagcatgctgggggtgtcacgggcggctgggacaacctccttgctgtgatccctggcggctcgtctaccccactgatccccaagtctgtgtgtgagacggtgctgatggacttcgatgcgctggtgcaggcacagacaggcctgggcacagctgcggttgatcgtcatggacccgtcgacggacatcgtgaaacgcatccgcccgctcattgagttctataagcacgagaagctgtggcagtgtacnccatgccgtgagggtgtggacttggatgaacaagggtgatggcacgtaccgagaggggggatgcccggacggcgagactcgaatcactgtgggaagaatcaccaaggccagaatcagaaaggccatacagactagggctccgggtggacggagccgctcggcctgtgcaggggcaggatccggcacttcggccggagccaagaccgagagccacaggtaggccacaagattaggcccggcagatggcctatagcacacacctgacagagcgcaagggcacacccctggacaggggggaacacaacaacaaagagaggcaccccccagaaaaacaaacacacacaacgacagcacaaacggag

SEQ ID NO: 617385 - DNA, 1772 bp, Homo sapiens
  misc_feature (450)..(450): n is a, c, g, or t
  misc_feature (952)..(952): n is a, c, g, or t
  misc_feature (956)..(956): n is a, c, g, or t
  misc_feature (961)..(961): n is a, c, g, or t
  misc_feature (965)..(967): n is a, c, g, or t
  misc_feature (975)..(975): n is a, c, g, or t
  misc_feature (995)..(996): n is a, c, g, or t
  misc_feature (1000)..(1001): n is a, c, g, or t
  misc_feature (1003)..(1003): n is a, c, g, or t
  misc_feature (1021)..(1021): n is a, c, g, or t
  misc_feature (1039)..(1040): n is a, c, g, or t
  misc_feature (1046)..(1046): n is a, c, g, or t
  misc_feature (1053)..(1053): n is a, c, g, or t
  misc_feature (1074)..(1074): n is a, c, g, or t
  misc_feature (1410)..(1410): n is a, c, g, or t
ggtgcctgtaatcccagctatccagaggctgaggcacaagaattatttgaacctgggaggtggagttgcagtgagctgagattacgccactgcactccagcctaggcaaaagagcaagagtctgtctcaaaaaaaaaaaaaaggcttactaaggggcaggggtatctatgatggctatagatggttcccttagccctagcccagcccctcctaaataggggagacccaagattctgtagcttctgggcccaatccctcatgggccccagagcactctggggcctccttgaccctttggtctcccttagacagcacccaagaaaacctcatttggctcgctgaaggatgaagaccggattttcaccaacctgtacggccgccatgactggaggctgaaaggttccctgagtcgaggtgactgggtacaagacaaaaggagatcctgctganaggggcccgactggatcctgggcgagatcaagacatcgggtttgaggggccgtggaggcgctgggcttccccactgtggcctcaagtggagcttcatgaataagccctcagatggcaggcccatagtatctggtggtgaacgcagacgaggtgggagccgggcacctgcaaggaccgggagatcttacgccatgatcctcacaagctgctggaaggctgcctggtggggggccgggccatgggcgcccgcgctgcctatatctacatccgaggggaattctacaatgaggcctccaatctgcaggtggccatccgagaggcctatgaggcaggtctgattggcaagaatgcttgtggctctggctatgatttgtgacgtgtttgtggtgcgcggggctggggcctacatcttgtggagcaggagacagcgctcatcgagtccatttgaggtgcaagcagggcaagccccgcctgaagccccccttccccgcagacgtgggangtgntttgngctnnncccacaantgtggccaacgtggagacanntgtnnangtgtcccccacaatctgncgccgtggaggtacctgnntttgcntggcttntggcagagaacgcaactcagngcaccaaactattcaacatctctggccatgtcaaccacccttgcactgtggaggaggagatgtctgtgcccttgaaagaactgattgagaagcatgctgggggtgtcacgggcggctgggacaacctccttgctgtgatccctggcggctcgtctaccccactgatccccaagtctgtgtgtgagacggtgctgatggacttcgatgcgctggtgcaggcacagacaggcctgggcacagctgcggttgatcgtcatggacccgtcgacggacatcgtgaaacgcatccgcccgctcattgagttctataagcacgagaagctgtggcagtgtacnccatgccgtgagggtgtggacttggatgaacaagggtgatggcacgtaccgagaggggggatgcccggacggcgagactcgaatcactgtgggaagaatcaccaaggccagaatcagaaaggccatacagactagggctccgggtggacggagccgctcggcctgtgcaggggcaggatccggcacttcggccggagccaagaccgagagccacaggtaggccacaagattaggcccggcagatggcctatagcacacacctgacagagcgcaagggcacacccctggacaggggggaacacaacaacaaagagaggcaccccccagaaaaacaaacacacacaacgacagcacaaacggag

SEQ ID NO: 617386 - DNA, 257 bp, Homo sapiens
acgatgagtgataggtgatatagcgactgctagtgatcttgccggattgattttggagtcattgagcgtcggctgaagtcgtgctcaggtgaaggcgatttggggctgagacaatggggttttctaaagtatacactcatgtcatctgcaaagtagggaccattttgaccttcctcttttcctacacgtgacagtacccgtttacgtttctatctcttgacctgacttgacctggccagacaccttccaaccactat

SEQ ID NO: 617387 - DNA, 109 bp, Homo sapiens
agttcttcttagtctctgtctttatttgtcaatctcggaatatttgagtctctctctgagtctcatttgttaaaatgctcttttagaaggggaaacggtcaccaatata

SEQ ID NO: 617388 - DNA, 1192 bp, Homo sapiens
  misc_feature (222)..(222): n is a, c, g, or t
  misc_feature (559)..(559): n is a, c, g, or t
  misc_feature (727)..(727): n is a, c, g, or t
ggcgtgagatgggtgtctgcagcttgtgtgtgcttgtgaactgaatgaacgatatcccgggttgtcacgtcttgcaccggagagagttcgtgtgccgtcctgtgtcccgtgtaggaccgatgcaggcgcatgtcatgtggattacctagtgattcggtgagcacgtgtgccacacgctgctcggggcggccaacagtgcgtgttaagtggagctcgtcctgnccatactctactatagtgatctgtctgtgcccggcaagggacaggtatatgagtacagatccgaaaaatgcggtgctctgtccctcgcatagtaggaatcgggcgggtcagcggagtacaaaacctcgagactgagaagtagcttggactttggttcaaatcaagtctttgtgacctcgcttggagtgctcgtaattccgtgtgcttcggtcgtgccataggtcgtactgattagcacggcgagtattaccccatcgaagtttcgtcgcgttacccacgcggttttaatggttgcaagaggcagtgaagtagttcatgtgcgcgctatcctcgttgnacttgcgagagggagcgaagctgagagagattactgagaggcggggcaacgaagctagtgacaggggtggcaggactaggtactcaactaggatgcgaacgtgagtgccctccggtttgaaggcgggaccgtgatcggttggctacgctaggtagcttatctaagggncagcccttcgcgtaatgagggccctacgctttggcaagggcatgcaacgagatagaccatgagtcggcagtcgagttgtggttgattcacattgagactcagtcgcaagacccgttgtggagtttcggtctcaagttcttcaagaaggacgcgcgcttcagactcttggcgtccacgcgaaagattatggtgtgtgcacacagcaacaattcgatccgcggggtagtgccttttagataactttgttccagaggaacggccacggccaggtgtgggtctaaagggccccccatagtcgtggccatcactaatttttagacgggctgcccacgagatgtgcaccagttcaccgcatttacgtagttacaactcgagagtgtttcgcgaatacaaaattgtggcgcttaggataacagtacctttatacaggtcgcaatcatataatagttccacgtaatggcccaa

SEQ ID NO: 617389 - DNA, 171 bp, Homo sapiens
atttgtggttgttgagtatagtcaacgatttacgaacataggtaaaatggctgagtaagcattagactgtaaatctaaagacagaggttaagccctcttttagccagttccgtggtgaatatcatgttgaattgcaaattcaaagaagcagatgttgcctttcggagaaga

SEQ ID NO: 617390 - DNA, 369 bp, Homo sapiens
tatccatacaaacccctgtctcatgacagcttgcccccactctggcactgtttaagccttccttcttccaccttaattcagtctttcacattcctcctccttcattccagaagcacataatcccatcctttctgaaatcaagctcttccattcatgcccattggcttccttccctgtatgttaaagctgatgcttgagaagagatagctagtgttcaatttgagctcaaaggcatctgcaagtaattgaggagatattgaatacttttgtttatacaaaatacaggaaggtgtccttctgaggatcaaatattcttctaaaactgtaactacattctctgactgatctaaaatggacagtgcacatcca

SEQ ID NO: 617391 - DNA, 944 bp, Homo sapiens
cgatccatacttgctgaatgaatacacataaggggtaaaaagatgtctacgcatcttagacgaaagaagagaccagccaaggagatgaagttgggctgagagcagggatgagaagacggtgattcggccaaaaggtaaaggggcctcccatccgagaaccaaacttccaggagagcaggggctgcagaggccaggctgggacctcagggtatcacgcaagacagtcagacactcaccttcttggaggcctggtaccaatttgtaaacaatatcttgcatggttctgtcatgactggcaaaagaacagaaaggtggagttagctggaaatgttaattctataattcttgtacactttccatttaacaatatcaaagttcagaatcaccagtctggagctttgttggaattttacttctagtttacacatgaccaaaatgtgtcaccaaaagccatgtatgagctgaattaacgcgtcatttaacttgggctctggctgcttcaaacatttcacaataatgacagagaaggctcttctgggaaccccgtgcttcctgtctgccggacaccccagattccccacgtcccgtgccgctcaggggacaccgtccctgcagacaccccaggttccccgcgatccgtgcgctcaggggacagccgtcccttgcgacaccacaggtaccctgcgtccagtgcgctcaggcgacacccgtccctgcggacaccccaggttccctggtgtcccgtgcgcttcacgggggacacccgtccctgcagacactccgagggttgccctggaacatcgtgcgcttcacgggaccgcgttcccctgccggaggcgccgcggttcgcggggtacctggcggccagcgggacccggtctcggcggcgcgcgcgctcgccgcgctcgcgggcctcgcggaccggcgtggcctgtcccgggtgt

SEQ ID NO: 617392 - DNA, 2077 bp, Homo sapiens
  misc_feature (120)..(120): n is a, c, g, or t
  misc_feature (1023)..(1023): n is a, c, g, or t
  misc_feature (2077)..(2077): n is a, c, g, or t
ctgttctggcaaacactatgccatgttcctcgatcgctgtgctggcctcgccatgtaccgcagtgcaacataagttcttgaactaggcatcttgccttatttacacgcagcgcctcttgntattggttcaacgtcatatgtgcattataacgtaaacatcgactcgctttcttgttcccatatattcatgctatttacatataccccggtctgtacctctgccgcatgtgtcctcatgcaaaaggcggtgataacttgtgtcacttatgcgctcgagacgtgagatcggcgcgcatataggcaagcttcttgaaattgactgtctctcactaagtcgttggtccatactcgccagagaaagagatctcaaagttagtcgcccatacatttaatagcaatcctttcacacagcttagcaagatccccctagattccatccatgattgtcaattgtcagacaacggtggcctactatttatgcgctccgttgaacatagttcataactcatatggaacacgctcacgaagggtattggccattggcttagttacggccttccaggttggttgggttggggctaaaaccaaaaccattagccttgcattcgcaatatctaatctatttaagctataggggcggaaaaaccaccttacaaactttataagcacaaacctcggtaattcttcccaacgccaagttgcgccccccaaatataagttgccttacccgattctcccccttatataatctaaggttctacgcactcttggttttcgcaaaaaagagtcaaggcaggcaaaggaattggttggttttccccaatagtgattgcgatagcggaaaccattaatttaggttacaaaacaattctctctatccacaaaacagaggttggcatcttctctggggtcacaacatcttagggacaacgtgtctggtggtactcctttcctggtaggttttgtgatccctttgtcggagcgacaacggttcccccttttatagggtcacaccttaaactnttaagaggacattgttgccgaagataaaatctcaaatacgtatggagacaaaaccaaattgtttataacttacaccggttcatagcctattatagggcaatgtgactacaccgcattattctttttttctcccctccgagacgcgagaggattggccccattctaaagaataaccttttctaaacatctgcggccatatatctttccagcaataggtgactctcccactgaaaactcaagtcaccttaacgcagtgtaaagcgtagcgagctaaatgaggaagtcactcaggaccacttcggcactcttttcatgtccaataccaagcttttttggaccttttggaaatctggcctcaggagtcgaacatcagacaacctttttgaggagagtgccacaccattattacgatgggcaagttaacaacagtttaaaggggacaacacacagaccgaggcgctctgtgatacacgttctatatcaaccacggtggacaccattttcgcgtaaccatggtttctccgctgtgtgccgagcgctacattaagcacaccctcttggtttcctacgctgtcactcgatcgcttcgcagctttgggttacacacagcgaggagtgccgctctttactaacataacctaggtatctgttcacaattagtacatgggcataaggccctatatagagtacacccacagcagcaggaattataaatactcgcgaagccgttcacagtcattgtgtcaatacaaacaggttttcacccctcaatatgagagagcaacctatcacaagatatcccaccacaaagccggtgacgccagcggagacgtcttattacgtatctgttacaacccagcagtgctgtgttcccctctcatccattgatagcatcgaagtacataacatacacacctatcgaacgagaggatgtcgcactgcgcgcatggatcgcataatatacatgagagcacggcatgtcaacagcagggcatgtgaagcaaaacgttcacaaccaggcagatagcaagtcacaagtagtatagcgggccan

SEQ ID NO: 617393 - DNA, 1175 bp, Homo sapiens
  misc_feature (275)..(275): n is a, c, g, or t
  misc_feature (338)..(338): n is a, c, g, or t
  misc_feature (480)..(480): n is a, c, g, or t
  misc_feature (628)..(628): n is a, c, g, or t
  misc_feature (631)..(631): n is a, c, g, or t
catggtggctcacacctattatcccagcactttgggaggccgaggtgggtggatcatgaagtcaggagttcaagaccagcctgaccaatatggtgaaaccccgtctctactaaaaatacaaaaatcagctgggcatggtggcacgcgtctgtagtcccagctattcgggaggctgaggcaggagaatcgccagaacatgggaggcggaggttgcagtgagccgagatcacgccactgcactccagcctcggcgatgcagtaagattacatcatanaaaagaaaaaaaaaacccgtatcatcacaaattcaagccatgtccactatgaccgaaccttanaatgaggtcacattttaaatagagtataaccaaaaaacttttggaggctgaggtgggaagattgcttgagcccaggagttaagagaccagacttgcccacaacgtaggcaggacttatattccaccaaaatttaaaattaanatacgcgccaagaaaccttggttggactttttaatacaacacggtttttggcacatgttgcccaacagtggttttaaaagcgcgggtttaaaggtatttccccaatttaagcctcaaaattttgggaattagagggggaagcccttgnacncagcttagacacatggttttaaggatcacaattttgctaggggatggccacttttttgggaagcaaacctttttgaaaaacgagttcctttactgaaaaatggagttcatggaaagttttggcccaccgatgggatgggaccataatggaaccggggccacaaaacttgggaaaaggggacactggcataaaaaggcgccggttgctcttatgggaacaattccttgttgtggcccatccacacataagcgcgcgagggcacaaagcgggtgacaaacttctctgaggtattggagtataaaggctacctcttccggggaaattaattaaccaggtcttggctccctacacagcgggatatctttttatatccggcctcttggaggagggaaaaaaaacgggtgggtcaacgctatgtgtttcagagaagggttctttaaaacaagttttcgggtgtttttcgatatttacgtgggaatcttctggattattgcggggcaccgcgggcgccttatagcagcccctcttggggggggcccacttc

SEQ ID NO: 617394 - DNA, 169 bp, Homo sapiens
gatcaaaaagatcagtatgttcagatacaacaaagctagctttctaacttactaacttataatgtatatgcatatgcacatgtctagtgtctatcccctgcccaatggtatattattctttcatgcttgggttttctacgcattttcaagtttgcaggaaaagtttcaa

SEQ ID NO: 617395 - DNA, 251 bp, Homo sapiens
cgtgccatcttgtgatccgcccacctcggcctcccaaagtgctgtgattacgggcgtatgccacggcccggccacaataattttttaaaatgtgaagaagtgaaggttaatcttgggacagatcaggtcccctctcgctccccctgcagacttccagcgttgccagtaaggttaagcctctacaatacctagctttcaaaacataaacaaaagaaagtaatatctcatatcaggggtatgcggggaagaga

SEQ ID NO: 617396 - DNA, 614 bp, Homo sapiens
gtggagcttaagggaaagaggcaggacatagacctccaaagagaaggggatataaggagggcagaacatgtggataccgcagaacaagaaggccaatcacttaacgcaagtgggcgggtcatgtgacagcctctcccgctcaggaggagaggcttaaagtagatatgcaagccatgtggataccacaaagagaagcgcctcaaggtagggacgcaggcatgtggcccatcaccaagaggcggggctttcagcggggaacggtcggccatgtgctatcgacaagaccgagcgatacaacataaaacagggacgggcgacttgccagctcgaggaggcgggaccttacgaggaaggggcaggctccggggggacgctcctaagtataaacagccacaatcctagggctaaccgcgcagtactgatcattctatttcccccctctatgtgatccccacttccaaatatcccatcaacaaaccgacgtaatcaccaacccaacaatgactaatcaaactaagcctcaaaacaaattgataccatacacaacaactaagggcggaacctgatctccttatactagtatccttaatcattgttattgacaaaataactcc

SEQ ID NO: 617397 - DNA, 756 bp, Homo sapiens
taaggtttgagggggaatgctggaaatggtaaggggtatggagacatatcatataagtaaggctagggtgagtggtaggaagtttttcataggaggtgtatgagtgggtcgtagcggaatcgggggtatgctgtccgaattcataaaaacagggagtgttagaagtagggtctgggtgacaaaatatgttgtgtagagttcaggggagagtgcgtcatatgtggtccctaggaagatttgtaggggtgagggtgtcatcataatactgtggtgtatccggctatgaaaaatagtggcgaaggggcctgcggcgtatccgatgttgaagcctgagactagttcggaccccccttcggcaatggtcgaagtgggggtctcggtggggtctctgctagtgtggagataaatcatattatgtgccaagggtcatgatggcaggagtactcagaggtgtcctgtgttgtggttgatacggtgtggagaggttaaaggagccacttattagtaatgtcgatcagtacactgattggctagggtggccttcatatgagatgtgtctggggctactgcccgcagtgggcgccgatcagggcgaagttgggagttggatgctccccctgaatcagaggattgagtacccggtacggctaacggtgcgtacaatacatgggaggcctggttcacggtgccaggggttgcgatcggcgggggtcaacaaaacgcgatggaccagccggcggtatcaagccagcattg

SEQ ID NO: 617398 - DNA, 381 bp, Homo sapiens
tctacaggaccccgatttccactggtgatagaggaacaaatatgtgtgtagagcgttggaacttgtagcttctcccactcctccctaacttttggaggggtgagaggggctggagtattgatgctgatcaccagtgatcagtgataatcaatcatgctctacgtcatgaagcctccactagtaaatccctgcgttcgctgagcttctagtgttagttcacacatcaaagtgtacggagggtggcacacctcggagagcaagctcctcaccccgtaccttgtcttttgcatcgcttccatttggctgttcctgaggtgtatcccttattatatactgattatcgttagttaagtgcctccccgagctgagccatgctagcta

SEQ ID NO: 617399 - DNA, 150 bp, Homo sapiens
actgatcacatgtgctgccggacactacagcatctcaactcgcagcagtaagaagcagccactccaaacatcacgtagtgcagcacagactagtctacctgcacatgtcttcacgcacaccatatttgcagtccgtctagagcatagcat

SEQ ID NO: 617400 - DNA, 926 bp, Homo sapiens
  misc_feature (375)..(375): n is a, c, g, or t
gagggaggctcggcgctcagctggtggggaggcggggtctgcaggaacaccagagagggcggactcgtgaccatggtgtccgtgggctagtggcttggtgggcacctgttggtaggaggctaggatacgaaggttgtggatcggttcatctcgctggcactcgaccaaagtgtggagtgcgacatgagatgaatgatgtttgttgcgagtcgacggaggggcgttttgcccacggtggtttatcatagagcgtgtctttcttcactcacctggctatggtggcactttagattggacttgttcagccgctagtgatcaactggggcgcaacatctacagcgggtgagctgggcaggtgttggatgaatgtctctnggtctggcgggcttgacatgtccctacggggaacgatagacatgggtttacagggatgagacaaagggggtaagtagcaggtagggccccagggacatggggatggagaggagctgagggtatatggtgcaggaatgtgctctttgataccctatgtctgtgtgtgacgattcatacctgggaacgtgggaagctgcctgggaggcgcaagctgtagttcgtaccttgtctgtctccccaggattatcctgatgccacttatcaccatactactagtctatgggctgcatgtgcagttgagccaacattctaccgtggttgcccctttcattacaggttggccggtggtccaaatgtgtcgctggtaagtcggggaactcctagcctgtcctggaggggcagatcgagctctaagcctgcctcacgtccatcggttgccaccctttgcagtgatggcagcttgaccctggaacggtgcagacaaccttcctcaaaagtgggcataccagtatccacggggttggggttgccggtccagagcttaagaggac

SEQ ID NO: 617401 - DNA, 348 bp, Homo sapiens
tctctccacactggtctggcccggttgaaagtctaactacatcttagtagtccttcatataatctatgatataccaggtggtattactagggtttaatagctctgggatattttgcccttctaaaatatatttccaggctgggcacagtggctcaagcctataatcccagcactttgggaggcttcagcaggaggattgcgtgaggccagtggttcgagactggcttgggcaatgtagctagacccagtttctacgagaaatacaaaaattagctggatgtcttggtacatgcctgtagtcctagctacttgggaggctgaggtgggaagatcagggtaccgagctcg

SEQ ID NO: 617402 - DNA, 864 bp, Homo sapiens
ttgtctttctcctacaatccaaataccaacaaacccggtggtcagcactgcgaagatacagttacttggagatctcatctggaagatggtagcactgctatcagccttttttcccaaatgacctcctggatcacagctacccatggcctgaaatgttgcccttggagatgctgcataggaaagaaataaacttttttcgatctttgagccacatatcatatcaccatatctccctcaacgccacttagccccctcgcagatatctacattcacctcttacaaactgtctcaattactaccacctcaaccgattcatttgctatcttattctatctatcaacaatgccattacgaattcccaggcagcccgcctatcctaaacgagaatcaccatctcccccccgaactcccctcggaaactctagtctctcccaacaccttcccctggcacatacacaattcaaatcttacttacctaccattcccatctagacacctccactccatctacctagtcaactctctgatcatttaaccatcagagtaccacatgacccagatcttccagcctctcttctctttcctcaccctaccgctatacatataaatcctctccccacctatatcttgcttgatatacactattttcaccattccttggtgttaggcccatgtacagataaccctatcacaacttctctaccactttactaacccgacgcccatctctatctcttctatcctctcctagttgcactcccaccttttgtagaccggccgccttcaccaccccggctcactaaaccaactatacacacatacccactcacactcgtgctaccaaccatgcacacccttatctac

SEQ ID NO: 617403 - DNA, 1002 bp, Homo sapiens
ggtttgccgtcagaacacaggtgtcgtggagaaactacccctaaaagccaaaatgggaaaggaacagactcatatcaacattgtcgtcatatggacacgtagattcgggcaagtccaccactactggccatctgcatctataacatgcggtggcatcgacaacaagcaaccattgaagacatttgacgaaggtaggctgactgagcatgggtaacagggctccttcaaagtatgcctggcgttcttgagactgaaaacctgcacaagctgaactgatgaaccagtgatgtatcaaccaatctgaagtatttctcccatagttgagacaatcttgaagactcagacacatgctacatcattgacgacttcactcaatctggacttcgcaccacaagggaacaacacaaacagaccttcgagtccacaacaacgcattgactattaccagagtgaacactactcaatggacatcgaaccctagatagcacttagtcccttagacacatagtcaagactcagaccgaggataagttaagaggaatcgcaacatccacgaacaacaccaaaggagagatatctcacacaaagacaacaggacgcaagaaaaagcccgaacacacgactaatggcaacaatatccatgaacacacaaacagcacgacacactcgacacatccacgcaaccacccagacagaaaaacaaattggatcacacgaacgctaaaaacaaagacaaacatagaagaactaaagaacgatagacaacaaaaccagagagtacgatagagcaaacacaaaagccagcctgataagcagggaacaaaataagcgaaacgcgggaaatgggtaaaagacaggccataccaggcaacaaagaaggcaaaaatgagagaacgaaaacagagcactcagaaaaccaaaacaaacagatgacaaaaatgcagtggagacaaccaaagacaaaatacgataggaacagaagaaaaacaaagcaacaaacaa

SEQ ID NO: 617404 - DNA, 177 bp, Homo sapiens
ctcccctcgtcgtccatactttgtctgatgacagttacaagcatctatgtgccaagcagtgtgtgtgaatattacacaacttccgccttcacaaaaaacttatgttctggccaggggtgctggctcacgcctgtaatcccagcactttgggaggccaaggcaggtggatatcttgag

SEQ ID NO: 617405 - DNA, 485 bp, Homo sapiens
gtagatgccaaagagtacacattgtgtggttccatacattggacactttagacaaataaaatctaagctgtagttacagaagtgcgatccggattgggagggaggacgatggattggctgcaacttgaccggccgtataaagggggatgatgcaaactatacctcagtttgctgatggttaccagatgtttaggtacttatcaaactattaactgtacataccagatgtcttttagtactacgacccacaacccacaccaacaaacagccatcacaacatatcactagagactgattgctatcgtttgctaacgtgttctactcgtgtgctagtgttgtatcactctctcgcacatgtgattactttatgaccttcaccgtagtatatctactccactcctttttgtgaccatgtctcttccatctcattcatctcactgtctacactccaccatattcactacttatttattatacccttttcg

SEQ ID NO: 617406 - DNA, 322 bp, Homo sapiens
cgtgtttagtgtaacaaaatgaagtaaagataaaaaaagtgaaaaatggaaaattagagaagagcttatagaataagaatagaaataaagaaatatttttgtacagctatgcagtgtgtttgtttaaatattattacgagagaaaaaagtttacaaaattaaaaagtgtataaagtaagaaagttacagtaagctaaggttaatttattattgaagaaagaatttttttatacatttaatgtaggctaagtgtacaatgtttgtacatctgaagttgtgtacagtaatgccctaggcttcacactcactcaccattcaccta

SEQ ID NO: 617407 - DNA, 205 bp, Homo sapiens
gatagctcggcatcaggtacatatacaaagtgtagtgggaaatatattgggtgtcacttaacagtgtgtagagtttaattggttatgaaaacatatcaaagaaatatatatagtcggaaggaggtaagctgacttttggcacttacgtgcaggctcaaaattctcattataggaccatttagaaatcgacttatttatacaaaag

SEQ ID NO: 617408 - DNA, 107 bp, Homo sapiens
atttgtgccctcacaccccacattgtgagctggtgctcctctgtactgcgataagcagcctcctagaagactgcaggctattggttaaggctgaagttgcagaaact

SEQ ID NO: 617409 - DNA, 538 bp, Homo sapiens
ggtggagacgggggtctcaccatgtgcccaagcggtctcaaactccgggcctcaagcagtcctcctatcccaaagggctgaaattacaggcatgagccaccaggccgggccaccactagttttggtaaggggagcaggttccatatgagagggaggaagggatttcaggatggtcttggtaatttcttaggtccccaagaaatggatgggacatgaggaaaccactctaggtgtgaccactctaaagcattagcagtcagtcatttcactctagggagaaatcagagcggtatatggagaataggtaaagtccccaatatggatatgtattttaatatgggacggctggtattgtttggttagatgcaaatagtagggtattccgaacagacactaaaaatagcggtcatctcaaagaatccagggctggtgtcacagtatgagaaagtagatgcgggggaacagggttaaaggaaggaagcattccagccagccagggatctcttgggaccttgcattctccatcagattggatcac

SEQ ID NO: 617410 - DNA, 115 bp, Homo sapiens
aaagagacagtcttgcctcattctgtcacgcagaatggaatgactttctaaaattgcagaaagcagaagcatattccttgctgtttataatattatagtcgtatcaaagggagag

SEQ ID NO: 617411 - DNA, 1922 bp, Homo sapiens
ggtgggatggccacgcacttcctcaccccgaacccacaactgcctcagggctagcacgaccagcctcttgcgggctgaagcgacggctgactccccaagatcctgcaaaggggctgcaagcctagattccaaccctgcccggcgctgagcgcactgagctaggggcatgtacttctgcgctgccagcgcgcgcgccccacaaacgcttccacatccgcgtgcctctaaacacgaccaaacccagaccctcatcagcacaaagacatgcaccatcccaacctactgcgctactctcacactaaaccccatcctgcctgtgctcctgctcctctgccacgcacaactactctctccccctctcgcacacccctgcgctgcctccagacaagccccactcatcgacctccactcacctcctaacgacaacacctcacttgaacacgcacacacgcgaacacctacttccaaccccgcgcaaaccccgagcaggcattgcacacgcggtggccgcccgacatgcgagcggacaacgacgacacgccgcatgcgcaacgcgcgcgcccaccagcacacccaccttcaccctgccgcccgtacagcgcacacctagaatcaaggcccccaacctccgcaccccatactaccgagcccagcactgcagcccagaccacgtgcacgacgcacacacgacccactagacgcgcggaccccatgacgaccaggcagagaacgcccctgaccccagtaaccattccacagcaccagtacataccaatatcgcagcaacacatccacccagtactccaaacaccagtgacaggcgccgccaacacaccgaaacaaggcacaaacatcaccatgcggcactacgatccccattgcagcacgccccacaccggacacgcgccacaccgagaccacccacccgcttcgaatgacgaacgaccacaaatacaaaaaggaactaacacccaatatgcgacacaaggcggacctatgagccacacaacgacaacatagcggacgtagacaaacaggaaacttagcgagacacgaacaaaatgaccagcgagcgacataaccaaccaacaaatataaaagaaaccacacaactgacattacgagggcaacgacgccactaacacattgacactagagacaacccacgaaccactcggccatagcacagaatcacacagagcgcacaagacacgaatcagccaagccaactaccaaccgcagcactacaccggccgcacacatcagccttgcgtcgcccctaaccaaccatactgcacgcccgagcaaacacacaacgcacccagatcacgcccgcactcacactactgtcgagaagccccatccgcgccacaccaccccacatggagaaacacgcagaccatcaaagacaagccacaacaccgcaccccgactgatacagaccaacacacaccacaaccaggacacagacaccaaacgcacacccaagcacgcgtgcacagcgagaacacgcactacactcgcacacggaggcaacagccccggcacagactcagcaccgccacacacacaagagcgagcccaactgacggaacctcagcacatcacacaacctaacacacactacaacaacacaccaccaccaaatacaatcacacaagaaaaccaaaccaaacacacaccaccacccaacccacaccatcacaacaccagacacaaacacccacacccagacacaaccacctatacaacataacaaacatagaaaccacaaccaacaacaccacccccccctttacactcgccacacaccccactcatccatccacccacaacacacaacacaaccacacaaccccacacacacaacacccacacacaaccacaacaactattaccaactcaccacaacacaacctact

SEQ ID NO: 617412 - DNA, 91 bp, Homo sapiens
  misc_feature (1)..(1): n is a, c, g, or t
ntgcgtggtgatgtgtgtgtgtgtgtgtgtgtgtgtgtgtgtgtgagtgtgctgtgtgtgatgcgtatgtgtgtcgcgcgtgtgtgcgcgt

SEQ ID NO: 617413 - DNA, 130 bp, Homo sapiens
cggcattttgtcttcctcagcagggctggccggctgctggggtgtgcacagtggctggtgtgtggcctcctcgtgaatcctcctcctcctcctcttcttcagcctcttcttcctcctcctcctcctcctc

SEQ ID NO: 617414 - DNA, 1013 bp, Homo sapiens
  misc_feature (35)..(35): n is a, c, g, or t
  misc_feature (105)..(105): n is a, c, g, or t
  misc_feature (118)..(118): n is a, c, g, or t
  misc_feature (138)..(138): n is a, c, g, or t
  misc_feature (169)..(170): n is a, c, g, or t
  misc_feature (175)..(175): n is a, c, g, or t
  misc_feature (184)..(184): n is a, c, g, or t
  misc_feature (195)..(195): n is a, c, g, or t
  misc_feature (198)..(199): n is a, c, g, or t
  misc_feature (220)..(220): n is a, c, g, or t
  misc_feature (222)..(222): n is a, c, g, or t
  misc_feature (225)..(225): n is a, c, g, or t
  misc_feature (244)..(244): n is a, c, g, or t
  misc_feature (307)..(307): n is a, c, g, or t
  misc_feature (317)..(317): n is a, c, g, or t
  misc_feature (321)..(321): n is a, c, g, or t
  misc_feature (347)..(347): n is a, c, g, or t
  misc_feature (353)..(353): n is a, c, g, or t
  misc_feature (373)..(373): n is a, c, g, or t
  misc_feature (378)..(378): n is a, c, g, or t
  misc_feature (382)..(382): n is a, c, g, or t
  misc_feature (411)..(411): n is a, c, g, or t
  misc_feature (417)..(417): n is a, c, g, or t
  misc_feature (424)..(424): n is a, c, g, or t
  misc_feature (431)..(431): n is a, c, g, or t
  misc_feature (435)..(435): n is a, c, g, or t
agtgctgaccctcatacaatgccatacgcatcatnacagagcattgaaggaggacttggatttaagcatcgtctctgggtatattctggaagaagaggtgttcantgttggatatatnataaataagttagaaaactntcttctgcagtacgttctgggatagttgagnnttganccttgtaangggtggtcaanacnnaaaaaagaaagttcacctaantnaanaaattcacccttttatcanaaaatctataaacataataaaaaaatactttgaagaatatgccttggttaatcaagatattcncgaaaataangaangctgggataagattttagcccttgtncctganacaattcatgatgaacttcnacaangctnccaaaagtctcacaattcacttcagcgcngggggnactggangaaagtngccngcagatatcagaataacctcaaaaatgacaaatatggaccctggctggagtgggagattatgctccaggactgttttccacggctggatatcaatgtcagcaaaggaatcaatcatctactgaagagcccttttagtgttcagcctaaaacaggtcgcatatctgtgcctattgatttgcagaaagtggaccagtttgatccatttactgttccgaccataagcttcatctgccgtgaattggatgccatttccactaatgaagaggaaaaagaggagaatgaagctgaatctgatgtcaaacatagaaccagagattataagaagaccagtctagcaccttatgtgaaagtttttgaacattttcttgaaaatctggataaatcccgaaaaggagaacttcttaagaagagtgatttacaaaaagatttctgaagacagagctcctcaaaccattgtggatatcttctgccttcaaccacagatcaaatacttcaagagccatttaataaatatggcagaactatatatgtgtcttaaacctcaaagtaaattttccttgagaaataaaaaaaaaaa

SEQ ID NO: 617415 - DNA, 718 bp, Homo sapiens
  misc_feature (71)..(71): n is a, c, g, or t
  misc_feature (75)..(75): n is a, c, g, or t
  misc_feature (196)..(196): n is a, c, g, or t
ttttaaacaattgcccgggacttattggttcttgcagcaagaaaacattttggaggaaatatatccagatnaccnccccttcccctttggcaagggatatttttaaagtctctttcaggaagagcaaacaggcctttacatcttttcatccaataattccaataaaacatccccctaaaattttttctttcaaagnggggggtcttttaaatttgaattagaactggagaaagtcatagataatagtacatgtccccttagggagtaggaagaaatacaatttctttaaaccatttatccggatttttatgttttattagccttttcaaaaaagcggattatttaaagaataatcatatatatgcatacggaaaaatgggccccagtgacttatttgtaggtgttagttgccccgccacccagtttgttagggcatttgagcccccattttaattttcccctaattaaaaagggcaggattttcaggggccaaaaaatttaactatttaaagaaagatttccccccttatgttttaaaatcccaggcatccgcgggaaaaaaattttaaaaaaagtttggaatttaaaaaaaaacctggggttctaatttggaaaacccaaatctgggcaaaggaaaaaaaaaatcccaaagttgtttaaataaacgggggggtgtttttcccggaaaaaaaaaccaaaaaaaagtttggtttttcca

SEQ ID NO: 617416 - DNA, 510 bp, Homo sapiens
  misc_feature (28)..(29): n is a, c, g, or t
  misc_feature (33)..(33): n is a, c, g, or t
  misc_feature (44)..(46): n is a, c, g, or t
  misc_feature (49)..(49): n is a, c, g, or t
  misc_feature (54)..(55): n is a, c, g, or t
  misc_feature (62)..(62): n is a, c, g, or t
  misc_feature (65)..(65): n is a, c, g, or t
  misc_feature (76)..(76): n is a, c, g, or t
  misc_feature (81)..(81): n is a, c, g, or t
  misc_feature (159)..(159): n is a, c, g, or t
  misc_feature (507)..(507): n is a, c, g, or t
tctacgtttacagtatccagcaggttanncttnagataaagaannnaanaagcnnaaagganagnaaaagaagaanaaaangccaaaaaaaaaaaccaaaagggaacagcagcaagcgaaaacgcaagaaaaacgcgaaaaacaagaacgggaacaacnacaagggcgccaggggaaaagaaagaagaaaaacaaaaagagaagaacacaacaggcgaaaaaaaacaacagcgcccagcaacgcagggaaaagaggcgccaaccaaaaaaggggagcaaaaaaggccaaaaagaggggagcgcacgggcagcgaaccacagacgggaaaacaagcgcaaaaagcccgcaggaaaaaagtcgtagcgaaacagtgcaagaaacacagaagggaaccaaaaccggtgtgtagtaagcaaagcaggcaaccaagccgaggccaaacaaggaaagaagcaggaaaaagcaccggagcaacaagagaaggcgaaggggaggaaagccagtancaa

SEQ ID NO: 617417 - DNA, 796 bp, Homo sapiens
gtctcggatgaggaacacgcgggcagggcgtgttgtttgtggaaaggatctcgtgttcatagaaagctgcacccgcagcatgagagtcctctgcatcctttgggaggcgctgaccaccctgagctcgcttctgtgtctcctggaacgcaggtgtcctcccaaggtcagagttgggaaagacacgcagccagtggatctcagatcagaggatgctgcagggacagacctcacccagggcagccttctttggcccggcacagctcccgggccttccccgacccctgtgacctcgcacctatgagggctgccggcccgtccttctgtggtccatgcccccggcctgtccgcctgcaccttcctcgtgatgggacctcggttctgtgtcttcagcaggcagttttccatcttcgcctgagtcaccatctaaacacctggagacttcacgtgacgttctggattttcagagtcactgcttatacctcaggctgtgctggcccaacttggagaagctgtgcccccaggcccaggaggcagggcatcgccagcccacagccacagtcaaaaccctccgaaggaggtcagaggacccacgccaccccagtgaggggcaaggacctcttcccttcttccttccaccccaggaggtcagcctgggggcccaggctctctcttgagccacactggcgggcaaggcatgggttgcccttagcgtgaaccaggttttttgccaaaaaaaaacagcccatgggttgtaaaaaagctctcgttggagaactctcgaggcaggaaaaccttt

SEQ ID NO: 617418 - DNA, 120 bp, Homo sapiens
tggaagcagaagcagagtatttaccaagactgagttgtgtcctttataataaatgggtaatggcagaagcaggaagcagcagaacaggaagggcagaagcaggaagcggcagaagcagga

SEQ ID NO: 617419 - DNA, 1667 bp, Homo sapiens
ggctcgggtgtcaatcggccgaggcgggcttcacgggccccaaatgcacccagcaggtgtgtgcgggctactgtgccaacaacagcacctgcactgtcaaccagggcaaccagccccagtgccgatgcctacccggcttcctgggcgaccgctgccagtaccggcagtgctctggctactgtgagaactttggcacatgccagatggctgctgatggctcccgacaatgccgctgcactgcctactttgagggatcgaggtgtgaggtgaacaagtgcagccgctgtctcgaaggggcctgtgtggtcaacaagcagagtggggatgtcacctgcaactgcacggatggccgggtggcccccagctgtctgacctgcgtcggccactgcagcaatggcggctcctgtaccatgaacagcaaaatgatgcctgagtgccagtgcccaccccacatgacagggccccggtgtgaggagcacgtcttcagccagcagcagccaggacatatagcctccatcctaatccctctgctgttgctgctgctgctggttctggtggccggagtggtattctggtataagcggcgagtccaaggggctaagggcttccagcaccaacggatgaccaacggggccatgaacgtggagattggaaaccccacctacaagatgtacgaaggcggagagcctgatgatgtgggaggcctactggacgctgactttgccctggaccctgacaagcccaccaacttcaccaaccccgtgtatgccacactctacatggggggccatggcagtcgccactccctggccagcacggacgagaagcgagaactcctgggccggggccctgaggacgagataggggaccccttggcatagggccctgccccgtcggactgcccccagaaagcctcctgccccctgccggtgaagtccttcagtgagcccctccccagccagcccttccctggccccgccggatgtataaatgtaaaaatgaaggaattacattttatatgtgagcgagcaagccggcaagcgagcacagtattatttctccatcccctccctgcctgctccttggcacccccatgctgccttcagggagacaggcagggagggcttggggctgcacctcctaccctcccaccagaacgcaccccactgggagagctggtggtgcagccttcccctccctgtataagacactttgccaaggctctcccctctcgccccatccctgcttgcccgctcccacagcttcctgagggctaattctgggaagggagagttctttgctgcccctgtctggaagacgtggctctgggtgaggtaggcgggaaaggatggagtgttttagttcttgggggaggccaccccaaaccccagccccaactccaggggcacctatgagatggccatgctcaacccccctcccagacaggccctccctgtctccagggcccccaccgaggttcccagggctggagacttcctctggtaaacattcctccagcctcccctcccctggggacgccaaggaggtgggccacacccaggaagggaaagcgggcagccccgttttggggacgtgaacgttttaataatttttgctgaattcctttacaactaaataacacagatattgttataaataaaattgta

SEQ ID NO: 617420 - DNA, 710 bp, Homo sapiens
  misc_feature (251)..(251): n is a, c, g, or t
  misc_feature (258)..(258): n is a, c, g, or t
gtggacagcttcacatggctatgagctttccggacttcttcttcttgtctctgtctagttctgctgggccgcattgttcggtacctgatgcgctcgcgtgagatcatcctggtcagtgcaaccaaggataacctagattgatgtggacctgtctctggagggtccggcctggtagatatcccggtaaacaaggtgtcatcaagctgaagtacaacggtgatttcttcattgccaatgagggtcgacggccnatctacntcgatggacggccggtgctctgtggctccaaatggcgcctcagctacaactctgtggtggagatcgccagcctgcgattctgtcttccttatcaaccaggaccttctattgccctcatcagggctgaggctgccaagatcacaccacagtgatggagtggtggcaggactcagtgggccctctccggcctgtttcccctgccactccagcccccttgagctgggaactcaggctcaatggaaaaacctgggcagatgggaggctcagcatgcgggccaattgatttgagcctttagagggaggatagggcatggcatttgtgaagaccagacagaggacatgagaacatcaggccattcacatagatccagagcccctccccatattccatcatcatcataaaacaaccataccccccaattgccaccttcactcctgtgtactacattacg

SEQ ID NO: 617421 - DNA, 131 bp, Homo sapiens
atgctcttgccagtgtcttcgcctctgagtctccggtgtcctgtgctcctgagtcagggtgcagtgtcagtctggtccaagttgtgtgctgagcttgagtggcagctacgtccggtgctgggccccctgcc

SEQ ID NO: 617422 - DNA, 5210 bp, Homo sapiens
  misc_feature (229)..(229): n is a, c, g, or t
ttagaggatctcaaacaccgcaatctagaggaacgtttctgatcttcgccaacggtactacctgcgcaagtcaacctggacgggtccaactacacgttacttaagcagggcctgaacaacgccgttgccttggattttgactaccgagagcagatgatctactggacagatgtgaccacccagggcagcatgatccgaaggatgcaccttaacgggagcaatgtgcagntcctacaccgtacaggcctcagcaaccccgatgggctggctgtggactgggtgggtggcaacctgtactggtgcgacaaaggccgggacaccatcgaggtgtccaagctcaatggggcctatcggacggtgctggtcagctctggcctccgtgagcccagggctctggtggtggatgtgcagaatgggtacctgtactggacagactggggtgaccattcactgatcggccgcatcggcatggatgggtccagccgcagcgtcatcgtggacaccaagatcacatggcccaatggcctgacgctggactatgtcactgagcgcatctactgggccgacgcccgcgaggactacattgaatttgccagcctggatggctccaatcgccacgttgtgctgagccaggacatcccgcacatctttgcactgaccctgtttgaggactacgtctactggaccgactgggaaacaaagtccattaaccgagcccacaagaccacaggcaccaacaaaacgctcctcatcagcacgctgcaccggcccatggacctgcatgtcttccatgccctgcgccagccagacgtgcccaatcacccctgcaaggtcaacaatggtggctgcagcaacctgtgcctgctgtcccccgggggagggcacaaatgtgcctgccccaccaacttctacctgggcagcgatgggcgcacctgtgtgtccaactgcacggctagccagtttgtatgcaagaacgacaagtgcatccccttctggtggaagtgtgacaccgaggacgactgcggggaccactcagacgagcccccggactgccctgagttcaagtgccggcccggacagttccagtgctccacaggtatctgcacaaaccctgccttcatctgcgatggcgacaatgactgccaggacaacagtgacgaggccaactgtgacatccacgtctgcttgcccagtcagttcaaatgcaccaacaccaaccgctgtattcccggcatcttccgctgcaatgggcaggacaactgcggagatggggaggatgagagggactgccccgaggtgacctgcgcccccaaccagttccagtgctccattaccaaacggtgcatcccccgggtctgggtctgcgaccgggacaatgactgtgtggatggcagtgatgagcccgccaactgcacccagatgacctgtggtgtggacgagttccgctgcaaggattcgggccgctgcatcccagcgcgttggaagtgtgacggagaggatgactgtggggatggctcggatgagcccaaggaagagtgtgatgaacgcacctgtgagccataccagttccgctgcaagaacaaccgctgcgtgcccggccgctggcagtgcgactacgacaacgattgcggtgacaactccgatgaagagagctgcacccctcggccctgctccgagagtgagttctcctgtgccaacggccgctgcatcgcggggcgctggaaatgcgatggagaccacgactgcgcggacggctcggacgagaaagactgcaccccccgctgtgacatggaccagttccagtgcaagagcggccactgcatccccctgcgctggcgctgtgacgcagacgccgactgcatggacggcagcgacgaggaggcctgcggcactggcgtgcggacctgccccctggacgagttccagtgcaacaacaccttgtgcaagccgctggcctggaagtgcgatggcgaggatgactgtggggacaactcagatgagaaccccgaggagtgtgcccggttcgtgtgccctcccaaccggcccttccgttgcaagaatgaccgcgtctgtctgtggatcgggcgccaatgcgatggcacggacaactgtggggatgggactgatgaagaggactgtgagccccccacagcccacaccacccactgcaaagacaagaaggagtttctgtgccggaaccagcgctgcctctcctcctccctgcgctgcaacatgttcgatgactgcggggacggctctgacgaggaggactgcagcatcgaccccaagctgaccagctgcgccaccaatgccagcatctgtggggacgaggcacgctgcgtgcgcaccgagaaagcggcctactgtgcctgccgctcgggcttccacaccgtgcccggccagcccggatgccaagacatcaacgagtgcctgcgcttcggcacctgctcccagctctgcaacaacaccaagggcggccacctctgcagctgcgctcggaacttcatgaagacgcacaacacctgcaaggccgaaggctctgagtaccaggtcctgtacatcgctgatgacaatgagatccgcagcctgttccccggccacccccattcggcttacgagcaggcattccagggtgacgagagtgtccgcattgatgctatggatgtccatgtcaaggctggccgtgtctattggaccaactggcacacgggcaccatctcctaccgcagcctgccacctgctgcgcctcctaccacttccaaccgccaccggcgacagattgaccggggtgtcacccacctcaacatttcagggctgaagatgcccagaggcatcgccatcgactgggtggccggaaacgtgtactggaccgactcgggccgagatgtgattgaggtggcgcagatgaagggcgagaaccgcaagacgctcatctcgggcatgattgacgagccccacgccattgtggtggacccactgagggggaccatgtactggtcagactggggcaaccaccccaagattgagacggcagcgatggatgggacgcttcgggagacactggtgcaggacaacattcagtggcccacaggcctggccgtggattatcacaatgagcggctgtactgggcagacgccaagctttcagtcatcggcagcatccggctcaatggcacggaccccattgtggctgctgacagcaaacgaggcctaagtcaccccttcagcatcgacgtctttgaggattacatctatggtgtcacctacatcaataatcgtgtcttcaagatccataagtttggccacagccccttggtcaacctgacagggggcctgagccacgcctctgacgtggtcctttaccatcagcacaagcagcccgaagtgaccaacccatgtgaccgcaagaaatgcgagtggctctgcctgctgagccccagtgggcctgtctgcacctgtcccaatgggaagcggctggacaacggcacatgcgtgcctgtgccctctccaacgccccccccagatgctccccggcctggaacctgtaacctgcagtgcttcaacggtggcagctgtttcctcaatgcacggaggcagcccaagtgccgctgccaaccccgctacacgggtgacaagtgtgaactggaccagtgctgggagcactgtcgcaatgggggcacctgtgctgcctccccctctggcatgcccacgtgccggtgccccacgggcttcacgggccccaaatgcacccagcaggtgtgtgcgggctactgtgccaacaacagcacctgcactgtcaaccagggcaaccagccccagtgccgatgcctacccggcttcctgggcgaccgctgccagtaccggcagtgctctggctactgtgagaactttggcacatgccagatggctgctgatggctcccgacaatgccgctgcactgcctactttgagggatcgaggtgtgaggtgaacaagtgcagccgctgtctcgaaggggcctgtgtggtcaacaagcagagtggggatgtcacctgcaactgcacggatggccgggtggcccccagctgtctgacctgcgtcggccactgcagcaatggcggctcctgtaccatgaacagcaaaatgatgcctgagtgccagtgcccaccccacatgacagggccccggtgtgaggagcacgtcttcagccagcagcagccaggacatatagcctccatcctaatccctctgctgttgctgctgctgctggttctggtggccggagtggtattctggtataagcggcgagtccaaggggctaagggcttccagcaccaacggatgaccaacggggccatgaacgtggagattggaaaccccacctacaagatgtacgaaggcggagagcctgatgatgtgggaggcctactggacgctgactttgccctggaccctgacaagcccaccaacttcaccaaccccgtgtatgccacactctacatggggggccatggcagtcgccactccctggccagcacggacgagaagcgagaactcctgggccggggccctgaggacgagataggggaccccttggcatagggccctgccccgtcggactgcccccagaaagcctcctgccccctgccggtgaagtccttcagtgagcccctccccagccagcccttccctggccccgccggatgtataaatgtaaaaatgaaggaattacattttatatgtgagcgagcaagccggcaagcgagcacagtattatttctccatcccctccctgcctgctccttggcacccccatgctgccttcagggagacaggcagggagggcttggggctgcacctcctaccctcccaccagaacgcaccccactgggagagctggtggtgcagccttcccctccctgtataagacactttgccaaggctctcccctctcgccccatccctgcttgcccgctcccacagcttcctgagggctaattctgggaagggagagttctttgctgcccctgtctggaagacgtggctctgggtgaggtaggcgggaaaggatggagtgttttagttcttgccgcccgctggaacctacacctcgccattcggcagagggtcctgggacatgctgcatatgcaccggtctaccgggatagcacttcccgatatcctggaccgcccccccgtccccgtgtttggcgttacccccgtagcagaca

SEQ ID NO: 617423 - DNA, 394 bp, Homo sapiens
  misc_feature (251)..(251): n is a, c, g, or t
  misc_feature (258)..(258): n is a, c, g, or t
gtggacagcttcacatggctatgagctttccggacttcttcttcttgtctctgtctagttctgctgggccgcattgttcggtacctgatgcgctcgcgtgagatcatcctggtcagtgcaaccaaggataacctagattgatgtggacctgtctctggagggtccggcctggtagatatcccggtaaacaaggtgtcatcaagctgaagtacaacggtgatttcttcattgccaatgagggtcgacggccnatctacntcgatggacggccggtgctctgtggctccaaatggcgcctcagctacaactctgtggtggagatcgccagcctcagacctgatgagggcaatgaggtcctggttgataaggaagacgactcggggatcctctatgt

SEQ ID NO: 617424 - DNA, 1786 bp, Homo sapiens
cctgggccccaggcatgcgggagggtgacgggggaccccagagcatggggtgatgttcaacctgtgcctgggacccacaggggcaagttcaggaaagaaggccttatgcagctgagccaggcccaagctgctggcgcttccccacaaaggtgctggcacacttcccctgaggcagtgcaccccctgcaccaagattatgcaaacagaaaagctctgttcaacctatggagagccctcatgagggtggggcttgaggcacttctctccctccccaaccacagggcagtgctctggctactgtgagaactttggcacatgccagatggctgctgatggctcccgacaatgccgctgcactgcctactttgagggatcgaggtgtgaggtgaacaagtgcagccgctgtctcgaaggggcctgtgtggtcaacaagcagagtggggatgtcacctgcaactgcacggatggccgggtggcccccagctgtctgacctgcgtcggccactgcagcaatggcggctcctgtaccatgaacagcaaaatgatgcctgagtgccagtgcccaccccacatgacagggccccggtgtgaggagcacgtcttcagccagcagcagccaggacatatagcctccatcctaatccctctgctgttgctgctgctgctggttctggtggccggagtggtattctggtataagcggcgagtccaaggggctaagggcttccagcaccaacggatgaccaacggggccatgaacgtggagattggaaaccccacctacaagatgtacgaaggcggagagcctgatgatgtgggaggcctactggacgctgactttgccctggaccctgacaagcccaccaacttcaccaaccccgtgtatgccacactctacatggggggccatggcagtcgccactccctggccagcacggacgagaagcgagaactcctgggccggggccctgaggacgagataggggaccccttggcatagggccctgccccgtcggactgcccccagaaagcctcctgccccctgccggtgaagtccttcagtgagcccctccccagccagcccttccctggccccgccggatgtataaatgtaaaaatgaaggaattacattttatatgtgagcgagcaagccggcaagcgagcacagtattatttctccatcccctccctgcctgctccttggcacccccatgctgccttcagggagacaggcagggagggcttggggctgcacctcctaccctcccaccagaacgcaccccactgggagagctggtggtgcagccttcccctccctgtataagacactttgccaaggctctcccctctcgccccatccctgcttgcccgctcccacagcttcctgagggctaattctgggaagggagagttctttgctgcccctgtctggaagacgtggctctgggtgaggtaggcgggaaaggatggagtgttttagttcttgggggaggccaccccaaaccccagccccaactccaggggcacctatgagatggccatgctcaacccccctcccagacaggccctccctgtctccagggcccccaccgaggttcccagggctggagacttcctctggtaaacattcctccagcctcccctcccctggggacgccaaggaggtgggccacacccaggaagggaaagcgggcagccccgttttggggacgtgaacgttttaataatttttgctgaattcctttacaactaaataacacagatattgttataaataaaattgta

SEQ ID NO: 617425 - DNA, 626 bp, Homo sapiens
tcaccttctggaaatccgcaaagttgcaggggccgtactggagtgtctcttctctagagagaattggtgggacccccctcagtgcagtggccccaactagtggagggagagaggacttaagtcagatggactcaacacaaatgggtttgcagaagaataatgaaaagttgtgggtaggaaaatgaatcattagcactcttcaatgaaatggagtgagcccaggagagctcacacaacaaaggcactctgggaacctggtagtaaaggcaggctggccaaatgccatttgattctgaacctcggaggtgcccactcaccctctgccaggagctaagtaacgcatgagagctgacttgggactcctggctcggccccaacagggagccccctttccaccatccttcggcaagctcaccacctcatccttgtgccaaggcagctatcccttcttttgtgagcattctggggacttagaatacactcttgttctgccaccttgtggactaggaccaagtccctgaccccgtcagaaaatgatgatttttaccgtggcacaccctaaccagtccctaattttcactgtgggaagtgaatggtttaaaataaacaaaaggtttacattaaaa

SEQ ID NO: 617426 - DNA, 5044 bp, Homo sapiens
  misc_feature (229)..(229): n is a, c, g, or t
ttagaggatctcaaacaccgcaatctagaggaacgtttctgatcttcgccaacggtactacctgcgcaagtcaacctggacgggtccaactacacgttacttaagcagggcctgaacaacgccgttgccttggattttgactaccgagagcagatgatctactggacagatgtgaccacccagggcagcatgatccgaaggatgcaccttaacgggagcaatgtgcagntcctacaccgtacaggcctcagcaaccccgatgggctggctgtggactgggtgggtggcaacctgtactggtgcgacaaaggccgggacaccatcgaggtgtccaagctcaatggggcctatcggacggtgctggtcagctctggcctccgtgagcccagggctctggtggtggatgtgcagaatgggtacctgtactggacagactggggtgaccattcactgatcggccgcatcggcatggatgggtccagccgcagcgtcatcgtggacaccaagatcacatggcccaatggcctgacgctggactatgtcactgagcgcatctactgggccgacgcccgcgaggactacattgaatttgccagcctggatggctccaatcgccacgttgtgctgagccaggacatcccgcacatctttgcactgaccctgtttgaggactacgtctactggaccgactgggaaacaaagtccattaaccgagcccacaagaccacaggcaccaacaaaacgctcctcatcagcacgctgcaccggcccatggacctgcatgtcttccatgccctgcgccagccagacgtgcccaatcacccctgcaaggtcaacaatggtggctgcagcaacctgtgcctgctgtcccccgggggagggcacaaatgtgcctgccccaccaacttctacctgggcagcgatgggcgcacctgtgtgtccaactgcacggctagccagtttgtatgcaagaacgacaagtgcatccccttctggtggaagtgtgacaccgaggacgactgcggggaccactcagacgagcccccggactgccctgagttcaagtgccggcccggacagttccagtgctccacaggtatctgcacaaaccctgccttcatctgcgatggcgacaatgactgccaggacaacagtgacgaggccaactgtgacatccacgtctgcttgcccagtcagttcaaatgcaccaacaccaaccgctgtattcccggcatcttccgctgcaatgggcaggacaactgcggagatggggaggatgagagggactgccccgaggtgacctgcgcccccaaccagttccagtgctccattaccaaacggtgcatcccccgggtctgggtctgcgaccgggacaatgactgtgtggatggcagtgatgagcccgccaactgcacccagatgacctgtggtgtggacgagttccgctgcaaggattcgggccgctgcatcccagcgcgttggaagtgtgacggagaggatgactgtggggatggctcggatgagcccaaggaagagtgtgatgaacgcacctgtgagccataccagttccgctgcaagaacaaccgctgcgtgcccggccgctggcagtgcgactacgacaacgattgcggtgacaactccgatgaagagagctgcacccctcggccctgctccgagagtgagttctcctgtgccaacggccgctgcatcgcggggcgctggaaatgcgatggagaccacgactgcgcggacggctcggacgagaaagactgcaccccccgctgtgacatggaccagttccagtgcaagagcggccactgcatccccctgcgctggcgctgtgacgcagacgccgactgcatggacggcagcgacgaggaggcctgcggcactggcgtgcggacctgccccctggacgagttccagtgcaacaacaccttgtgcaagccgctggcctggaagtgcgatggcgaggatgactgtggggacaactcagatgagaaccccgaggagtgtgcccggttcgtgtgccctcccaaccggcccttccgttgcaagaatgaccgcgtctgtctgtggatcgggcgccaatgcgatggcacggacaactgtggggatgggactgatgaagaggactgtgagccccccacagcccacaccacccactgcaaagacaagaaggagtttctgtgccggaaccagcgctgcctctcctcctccctgcgctgcaacatgttcgatgactgcggggacggctctgacgaggaggactgcagcatcgaccccaagctgaccagctgcgccaccaatgccagcatctgtggggacgaggcacgctgcgtgcgcaccgagaaagcggcctactgtgcctgccgctcgggcttccacaccgtgcccggccagcccggatgccaagacatcaacgagtgcctgcgcttcggcacctgctcccagctctgcaacaacaccaagggcggccacctctgcagctgcgctcggaacttcatgaagacgcacaacacctgcaaggccgaaggctctgagtaccaggtcctgtacatcgctgatgacaatgagatccgcagcctgttccccggccacccccattcggcttacgagcaggcattccagggtgacgagagtgtccgcattgatgctatggatgtccatgtcaaggctggccgtgtctattggaccaactggcacacgggcaccatctcctaccgcagcctgccacctgctgcgcctcctaccacttccaaccgccaccggcgacagattgaccggggtgtcacccacctcaacatttcagggctgaagatgcccagaggcatcgccatcgactgggtggccggaaacgtgtactggaccgactcgggccgagatgtgattgaggtggcgcagatgaagggcgagaaccgcaagacgctcatctcgggcatgattgacgagccccacgccattgtggtggacccactgagggggaccatgtactggtcagactggggcaaccaccccaagattgagacggcagcgatggatgggacgcttcgggagacactggtgcaggacaacattcagtggcccacaggcctggccgtggattatcacaatgagcggctgtactgggcagacgccaagctttcagtcatcggcagcatccggctcaatggcacggaccccattgtggctgctgacagcaaacgaggcctaagtcaccccttcagcatcgacgtctttgaggattacatctatggtgtcacctacatcaataatcgtgtcttcaagatccataagtttggccacagccccttggtcaacctgacagggggcctgagccacgcctctgacgtggtcctttaccatcagcacaagcagcccgaagtgaccaacccatgtgaccgcaagaaatgcgagtggctctgcctgctgagccccagtgggcctgtctgcacctgtcccaatgggaagcggctggacaacggcacatgcgtgcctgtgccctctccaacgccccccccagatgctccccggcctggaacctgtaacctgcagtgcttcaacggtggcagctgtttcctcaatgcacggaggcagcccaagtgccgctgccaaccccgctacacgggtgacaagtgtgaactggaccagtgctgggagcactgtcgcaatgggggcacctgtgctgcctccccctctggcatgcccacgtgccggtgccccacgggcttcacgggccccaaatgcacccagcaggtgtgtgcgggctactgtgccaacaacagcacctgcactgtcaaccagggcaaccagccccagtgccgatgcctacccggcttcctgggcgaccgctgccagtaccggcagtgctctggctactgtgagaactttggcacatgccagatggctgctgatggctcccgacaatgccgctgcactgcctactttgagggatcgaggtgtgaggtgaacaagtgcagccgctgtctcgaaggggcctgtgtggtcaacaagcagagtggggatgtcacctgcaactgcacggatggccgggtggcccccagctgtctgacctgcgtcggccactgcagcaatggcggctcctgtaccatgaacagcaaaatgatgcctgagtgccagtgcccaccccacatgacagggccccggtgtgaggagcacgtcttcagccagcagcagccaggacatatagcctccatcctaatccctctgctgttgctgctgctgctggttctggtggccggagtggtattctggtataagcggcgagtccaaggggctaagggcttccagcaccaacggatgaccaacggggccatgaacgtggagattggaaaccccacctacaagatgtacgaaggcggagagcctgatgatgtgggaggcctactggacgctgactttgccctggaccctgacaagcccaccaacttcaccaaccccgtgtatgccacactctacatggggggccatggcagtcgccactccctggccagcacggacgagaagcgagaactcctgggccggggccctgaggacgagataggggaccccttggcatagggccctgccccgtcggactgcccccagaaagcctcctgccccctgccggtgaagtccttcagtgagcccctccccagccagcccttccctggccccgccggatgtataaatgtaaaaatgaaggaattacattttatatgtgagcgagcaagccggcaagcgagcacagtattatttctccatcccctccctgcctgctccttggcacccccatgctgccttcagggagacaggcagggagggcttggggctgcacctcctaccctcccaccagaacgcaccccactgggagagctggtggtgcagccttcccctccctgtataagacactttgccaaggaggtgggccacacccaggaagggaaagcgggcagccccgttttggggacgtgaacgttttaataatttttgctgaattcctttacaactaaataacacagatattgttataaataaaattgta

SEQ ID NO: 617427 - DNA, 5609 bp, Homo sapiens
  misc_feature (229)..(229): n is a, c, g, or t
ttagaggatctcaaacaccgcaatctagaggaacgtttctgatcttcgccaacggtactacctgcgcaagtcaacctggacgggtccaactacacgttacttaagcagggcctgaacaacgccgttgccttggattttgactaccgagagcagatgatctactggacagatgtgaccacccagggcagcatgatccgaaggatgcaccttaacgggagcaatgtgcagntcctacaccgtacaggcctcagcaaccccgatgggctggctgtggactgggtgggtggcaacctgtactggtgcgacaaaggccgggacaccatcgaggtgtccaagctcaatggggcctatcggacggtgctggtcagctctggcctccgtgagcccagggctctggtggtggatgtgcagaatgggtacctgtactggacagactggggtgaccattcactgatcggccgcatcggcatggatgggtccagccgcagcgtcatcgtggacaccaagatcacatggcccaatggcctgacgctggactatgtcactgagcgcatctactgggccgacgcccgcgaggactacattgaatttgccagcctggatggctccaatcgccacgttgtgctgagccaggacatcccgcacatctttgcactgaccctgtttgaggactacgtctactggaccgactgggaaacaaagtccattaaccgagcccacaagaccacaggcaccaacaaaacgctcctcatcagcacgctgcaccggcccatggacctgcatgtcttccatgccctgcgccagccagacgtgcccaatcacccctgcaaggtcaacaatggtggctgcagcaacctgtgcctgctgtcccccgggggagggcacaaatgtgcctgccccaccaacttctacctgggcagcgatgggcgcacctgtgtgtccaactgcacggctagccagtttgtatgcaagaacgacaagtgcatccccttctggtggaagtgtgacaccgaggacgactgcggggaccactcagacgagcccccggactgccctgagttcaagtgccggcccggacagttccagtgctccacaggtatctgcacaaaccctgccttcatctgcgatggcgacaatgactgccaggacaacagtgacgaggccaactgtgacatccacgtctgcttgcccagtcagttcaaatgcaccaacaccaaccgctgtattcccggcatcttccgctgcaatgggcaggacaactgcggagatggggaggatgagagggactgccccgaggtgacctgcgcccccaaccagttccagtgctccattaccaaacggtgcatcccccgggtctgggtctgcgaccgggacaatgactgtgtggatggcagtgatgagcccgccaactgcacccagatgacctgtggtgtggacgagttccgctgcaaggattcgggccgctgcatcccagcgcgttggaagtgtgacggagaggatgactgtggggatggctcggatgagcccaaggaagagtgtgatgaacgcacctgtgagccataccagttccgctgcaagaacaaccgctgcgtgcccggccgctggcagtgcgactacgacaacgattgcggtgacaactccgatgaagagagctgcacccctcggccctgctccgagagtgagttctcctgtgccaacggccgctgcatcgcggggcgctggaaatgcgatggagaccacgactgcgcggacggctcggacgagaaagactgcaccccccgctgtgacatggaccagttccagtgcaagagcggccactgcatccccctgcgctggcgctgtgacgcagacgccgactgcatggacggcagcgacgaggaggcctgcggcactggcgtgcggacctgccccctggacgagttccagtgcaacaacaccttgtgcaagccgctggcctggaagtgcgatggcgaggatgactgtggggacaactcagatgagaaccccgaggagtgtgcccggttcgtgtgccctcccaaccggcccttccgttgcaagaatgaccgcgtctgtctgtggatcgggcgccaatgcgatggcacggacaactgtggggatgggactgatgaagaggactgtgagccccccacagcccacaccacccactgcaaagacaagaaggagtttctgtgccggaaccagcgctgcctctcctcctccctgcgctgcaacatgttcgatgactgcggggacggctctgacgaggaggactgcagcatcgaccccaagctgaccagctgcgccaccaatgccagcatctgtggggacgaggcacgctgcgtgcgcaccgagaaagcggcctactgtgcctgccgctcgggcttccacaccgtgcccggccagcccggatgccaagacatcaacgagtgcctgcgcttcggcacctgctcccagctctgcaacaacaccaagggcggccacctctgcagctgcgctcggaacttcatgaagacgcacaacacctgcaaggccgaaggctctgagtaccaggtcctgtacatcgctgatgacaatgagatccgcagcctgttccccggccacccccattcggcttacgagcaggcattccagggtgacgagagtgtccgcattgatgctatggatgtccatgtcaaggctggccgtgtctattggaccaactggcacacgggcaccatctcctaccgcagcctgccacctgctgcgcctcctaccacttccaaccgccaccggcgacagattgaccggggtgtcacccacctcaacatttcagggctgaagatgcccagaggcatcgccatcgactgggtggccggaaacgtgtactggaccgactcgggccgagatgtgattgaggtggcgcagatgaagggcgagaaccgcaagacgctcatctcgggcatgattgacgagccccacgccattgtggtggacccactgagggggaccatgtactggtcagactggggcaaccaccccaagattgagacggcagcgatggatgggacgcttcgggagacactggtgcaggacaacattcagtggcccacaggcctggccgtggattatcacaatgagcggctgtactgggcagacgccaagctttcagtcatcggcagcatccggctcaatggcacggaccccattgtggctgctgacagcaaacgaggcctaagtcaccccttcagcatcgacgtctttgaggattacatctatggtgtcacctacatcaataatcgtgtcttcaagatccataagtttggccacagccccttggtcaacctgacagggggcctgagccacgcctctgacgtggtcctttaccatcagcacaagcagcccgaagtgaccaacccatgtgaccgcaagaaatgcgagtggctctgcctgctgagccccagtgggcctgtctgcacctgtcccaatgggaagcggctggacaacggcacatgcgtgcctgtgccctctccaacgccccccccagatgctccccggcctggaacctgtaacctgcagtgcttcaacggtggcagctgtttcctcaatgcacggaggcagcccaagtgccgctgccaaccccgctacacgggtgacaagtgtgaactggaccagtgctgggagcactgtcgcaatgggggcacctgtgctgcctccccctctggcatgcccacgtgccggtgccccacgggcttcacgggccccaaatgcacccagcaggtgtgtgcgggctactgtgccaacaacagcacctgcactgtcaaccagggcaaccagccccagtgccgatgcctacccggcttcctgggcgaccgctgccagtaccggcagtgctctggctactgtgagaactttggcacatgccagatggctgctgatggctcccgacaatgccgctgcactgcctactttgagggatcgaggtgtgaggtgaacaagtgcagccgctgtctcgaaggggcctgtgtggtcaacaagcagagtggggatgtcacctgcaactgcacggatggccgggtggcccccagctgtctgacctgcgtcggccactgcagcaatggcggctcctgtaccatgaacagcaaaatgatgcctgagtgccagtgcccaccccacatgacagggccccggtgtgaggagcacgtcttcagccagcagcagccaggacatatagcctccatcctaatccctctgctgttgctgctgctgctggttctggtggccggagtggtattctggtataagcggcgagtccaaggggctaagggcttccagcaccaacggatgaccaacggggccatgaacgtggagattggaaaccccacctacaagatgtacgaaggcggagagcctgatgatgtgggaggcctactggacgctgactttgccctggaccctgacaagcccaccaacttcaccaaccccgtgtatgccacactctacatggggggccatggcagtcgccactccctggccagcacggacgagaagcgagaactcctgggccggggccctgaggacgagataggggaccccttggcatagggccctgccccgtcggactgcccccagaaagcctcctgccccctgccggtgaagtccttcagtgagcccctccccagccagcccttccctggccccgccggatgtataaatgtaaaaatgaaggaattacattttatatgtgagcgagcaagccggcaagcgagcacagtattatttctccatcccctccctgcctgctccttggcacccccatgctgccttcagggagacaggcagggagggcttggggctgcacctcctaccctcccaccagaacgcaccccactgggagagctggtggtgcagccttcccctccctgtataagacactttgccaaggaggtgggccacacccaggaagggaaagcgggcagccccgttttggggacgtgaacgttttaataatttttgctgaattcctttacaactaaataacacagatattgttataaataaaattgtaaaaaaaaaaagaaaaaaaggccaaaaaaaaaaaaaaaaaaaaaaaaaaaaaaaaaaaaaaaaaaaaaaaaaaaaaaaaaaaaaaaaaaaaaaaaaaaaaaaaaaaaaaaaaaaaaaaaaaaaaaaaaaaaaaaaaaaaaaaaaaaaaaaaaaaaaagaggggggggggagggagaaaaccgacccgagggggagaaacggaaacgccacccaacaaacaagagacaagaacacaaagagaagggacacaaaaaaagacacacgcacagaaaaaaacaaccaaaaaaaaaaaaccagacaaacacaaacaaaaacaaaagaaaaaaaaaaaaaacaaaagaaaaagtaagaagagagaaagaaagagaaagagaaatataaaaataaaatagataagaaaaaaggaaagaataaataaaaaaataggaaagtagaaagaagagcaaaaaaacaccacagacacggaagcagaacccgacaaagcaataacgaaacagatgagaagaaatcgacgagacaaaaaaaccaaaagaccgtaagaaacgaaaggaaagaaacgacaggca

SEQ ID NO: 617428 - DNA, 172 bp, Homo sapiens
tcttagggagacacaattctgatccgttctgagtccattttgtgttgctctgacagaagacctgaggctgggtctttataaaggaagaggttgatttggctcagattctgatggctggaaggttcaagactgggcaggtgcactcacctgaggacctcacctcatccctgaa

SEQ ID NO: 617429 - DNA, 4641 bp, Homo sapiens
  misc_feature (229)..(229): n is a, c, g, or t
ttagaggatctcaaacaccgcaatctagaggaacgtttctgatcttcgccaacggtactacctgcgcaagtcaacctggacgggtccaactacacgttacttaagcagggcctgaacaacgccgttgccttggattttgactaccgagagcagatgatctactggacagatgtgaccacccagggcagcatgatccgaaggatgcaccttaacgggagcaatgtgcagntcctacaccgtacaggcctcagcaaccccgatgggctggctgtggactgggtgggtggcaacctgtactggtgcgacaaaggccgggacaccatcgaggtgtccaagctcaatggggcctatcggacggtgctggtcagctctggcctccgtgagcccagggctctggtggtggatgtgcagaatgggtacctgtactggacagactggggtgaccattcactgatcggccgcatcggcatggatgggtccagccgcagcgtcatcgtggacaccaagatcacatggcccaatggcctgacgctggactatgtcactgagcgcatctactgggccgacgcccgcgaggactacattgaatttgccagcctggatggctccaatcgccacgttgtgctgagccaggacatcccgcacatctttgcactgaccctgtttgaggactacgtctactggaccgactgggaaacaaagtccattaaccgagcccacaagaccacaggcaccaacaaaacgctcctcatcagcacgctgcaccggcccatggacctgcatgtcttccatgccctgcgccagccagacgtgcccaatcacccctgcaaggtcaacaatggtggctgcagcaacctgtgcctgctgtcccccgggggagggcacaaatgtgcctgccccaccaacttctacctgggcagcgatgggcgcacctgtgtgtccaactgcacggctagccagtttgtatgcaagaacgacaagtgcatccccttctggtggaagtgtgacaccgaggacgactgcggggaccactcagacgagcccccggactgccctgagttcaagtgccggcccggacagttccagtgctccacaggtatctgcacaaaccctgccttcatctgcgatggcgacaatgactgccaggacaacagtgacgaggccaactgtgacatccacgtctgcttgcccagtcagttcaaatgcaccaacaccaaccgctgtattcccggcatcttccgctgcaatgggcaggacaactgcggagatggggaggatgagagggactgccccgaggtgacctgcgcccccaaccagttccagtgctccattaccaaacggtgcatcccccgggtctgggtctgcgaccgggacaatgactgtgtggatggcagtgatgagcccgccaactgcacccagatgacctgtggtgtggacgagttccgctgcaaggattcgggccgctgcatcccagcgcgttggaagtgtgacggagaggatgactgtggggatggctcggatgagcccaaggaagagtgtgatgaacgcacctgtgagccataccagttccgctgcaagaacaaccgctgcgtgcccggccgctggcagtgcgactacgacaacgattgcggtgacaactccgatgaagagagctgcacccctcggccctgctccgagagtgagttctcctgtgccaacggccgctgcatcgcggggcgctggaaatgcgatggagaccacgactgcgcggacggctcggacgagaaagactgcaccccccgctgtgacatggaccagttccagtgcaagagcggccactgcatccccctgcgctggcgctgtgacgcagacgccgactgcatggacggcagcgacgaggaggcctgcggcactggcgtgcggacctgccccctggacgagttccagtgcaacaacaccttgtgcaagccgctggcctggaagtgcgatggcgaggatgactgtggggacaactcagatgagaaccccgaggagtgtgcccggttcgtgtgccctcccaaccggcccttccgttgcaagaatgaccgcgtctgtctgtggatcgggcgccaatgcgatggcacggacaactgtggggatgggactgatgaagaggactgtgagccccccacagcccacaccacccactgcaaagacaagaaggagtttctgtgccggaaccagcgctgcctctcctcctccctgcgctgcaacatgttcgatgactgcggggacggctctgacgaggaggactgcagcatcgaccccaagctgaccagctgcgccaccaatgccagcatctgtggggacgaggcacgctgcgtgcgcaccgagaaagcggcctactgtgcctgccgctcgggcttccacaccgtgcccggccagcccggatgccaagacatcaacgagtgcctgcgcttcggcacctgctcccagctctgcaacaacaccaagggcggccacctctgcagctgcgctcggaacttcatgaagacgcacaacacctgcaaggccgaaggctctgagtaccaggtcctgtacatcgctgatgacaatgagatccgcagcctgttccccggccacccccattcggcttacgagcaggcattccagggtgacgagagtgtccgcattgatgctatggatgtccatgtcaaggctggccgtgtctattggaccaactggcacacgggcaccatctcctaccgcagcctgccacctgctgcgcctcctaccacttccaaccgccaccggcgacagattgaccggggtgtcacccacctcaacatttcagggctgaagatgcccagaggcatcgccatcgactgggtggccggaaacgtgtactggaccgactcgggccgagatgtgattgaggtggcgcagatgaagggcgagaaccgcaagacgctcatctcgggcatgattgacgagccccacgccattgtggtggacccactgagggggaccatgtactggtcagactggggcaaccaccccaagattgagacggcagcgatggatgggacgcttcgggagacactggtgcaggacaacattcagtggcccacaggcctggccgtggattatcacaatgagcggctgtactgggcagacgccaagctttcagtcatcggcagcatccggctcaatggcacggaccccattgtggctgctgacagcaaacgaggcctaagtcaccccttcagcatcgacgtctttgaggattacatctatggtgtcacctacatcaataatcgtgtcttcaagatccataagtttggccacagccccttggtcaacctgacagggggcctgagccacgcctctgacgtggtcctttaccatcagcacaagcagcccgaagtgaccaacccatgtgaccgcaagaaatgcgagtggctctgcctgctgagccccagtgggcctgtctgcacctgtcccaatgggaagcggctggacaacggcacatgcgtgcctgtgccctctccaacgccccccccagatgctccccggcctggaacctgtaacctgcagtgcttcaacggtggcagctgtttcctcaatgcacggaggcagcccaagtgccgctgccaaccccgctacacgggtgacaagtgtgaactggaccagtgctgggagcactgtcgcaatgggggcacctgtgctgcctccccctctggcatgcccacgtgccggtgccccacgggcttcacgggccccaaatgcacccagcaggtgtgtgcgggctactgtgccaacaacagcacctgcactgtcaaccagggcaaccagccccagtgccgatgcctacccggcttcctgggcgaccgctgccagtaccggcagtgctctggctactgtgagaactttggcacatgccagatggctgctgatggctcccgacaatgccgctgcactgcctactttgagggatcgaggtgtgaggtgaacaagtgcagccgctgtctcgaaggggcctgtgtggtcaacaagcagagtggggatgtcacctgcaactgcacggatggccgggtggcccccagctgtctgacctgcgtcggccactgcagcaatggcggctcctgtaccatgaacagcaaaatgatgcctgagtgccagtgcccaccccacatgacagggccccggtgtgaggagcacgtcttcagccagcagcagccaggacatatagcctccatcctaatccctctgctgttgctgctgctgctggttctggtggccggagtggtattctggtataagcggcgagtccaaggggctaagggcttccagcaccaacggatgaccaacggggccatgaacgtggagattggaaaccccacctagccccaactccaggggcacctatgagatggccatgctcaacccccctcccagacaggccctccctgtctccagggcccccaccgaggttcccagggctggagacttcctctggtaaacattcctccagcctcccctcccctggggacgccaaggaggtgggccacacccaggaagggaaagcgggcagccccgttttggggacgtgaacgttttaataatttttgctgaattcctttacaactaaataacacagatattgttataaataaaattgta

SEQ ID NO: 617430 - DNA, 321 bp, Homo sapiens
ggctgcaaatgcatctgacgattttactagtcttaatctcctacgttactaagaactatttatttatttatttatttttgagacagaggctcactctgttagcccaggctggagtgcagtggcagtatctcagctcagctcagctcactgcaacctccacctcccaggtttaagcagttctcgctgcctcagcctcctgcgtagttgggattacaggcacacgccaccacacctggctaatttttgtatttgtagtagagatggggtttccccatatttgtcaggctggtcttgaactcctgacctcaggtgatcctcctg

SEQ ID NO: 617431 - DNA, 4250 bp, Homo sapiens
  misc_feature (229)..(229): n is a, c, g, or t
ttagaggatctcaaacaccgcaatctagaggaacgtttctgatcttcgccaacggtactacctgcgcaagtcaacctggacgggtccaactacacgttacttaagcagggcctgaacaacgccgttgccttggattttgactaccgagagcagatgatctactggacagatgtgaccacccagggcagcatgatccgaaggatgcaccttaacgggagcaatgtgcagntcctacaccgtacaggcctcagcaaccccgatgggctggctgtggactgggtgggtggcaacctgtactggtgcgacaaaggccgggacaccatcgaggtgtccaagctcaatggggcctatcggacggtgctggtcagctctggcctccgtgagcccagggctctggtggtggatgtgcagaatgggtacctgtactggacagactggggtgaccattcactgatcggccgcatcggcatggatgggtccagccgcagcgtcatcgtggacaccaagatcacatggcccaatggcctgacgctggactatgtcactgagcgcatctactgggccgacgcccgcgaggactacattgaatttgccagcctggatggctccaatcgccacgttgtgctgagccaggacatcccgcacatctttgcactgaccctgtttgaggactacgtctactggaccgactgggaaacaaagtccattaaccgagcccacaagaccacaggcaccaacaaaacgctcctcatcagcacgctgcaccggcccatggacctgcatgtcttccatgccctgcgccagccagacgtgcccaatcacccctgcaaggtcaacaatggtggctgcagcaacctgtgcctgctgtcccccgggggagggcacaaatgtgcctgccccaccaacttctacctgggcagcgatgggcgcacctgtgtgtccaactgcacggctagccagtttgtatgcaagaacgacaagtgcatccccttctggtggaagtgtgacaccgaggacgactgcggggaccactcagacgagcccccggactgccctgagttcaagtgccggcccggacagttccagtgctccacaggtatctgcacaaaccctgccttcatctgcgatggcgacaatgactgccaggacaacagtgacgaggccaactgtgacatccacgtctgcttgcccagtcagttcaaatgcaccaacaccaaccgctgtattcccggcatcttccgctgcaatgggcaggacaactgcggagatggggaggatgagagggactgccccgaggtgacctgcgcccccaaccagttccagtgctccattaccaaacggtgcatcccccgggtctgggtctgcgaccgggacaatgactgtgtggatggcagtgatgagcccgccaactgcacccagatgacctgtggtgtggacgagttccgctgcaaggattcgggccgctgcatcccagcgcgttggaagtgtgacggagaggatgactgtggggatggctcggatgagcccaaggaagagtgtgatgaacgcacctgtgagccataccagttccgctgcaagaacaaccgctgcgtgcccggccgctggcagtgcgactacgacaacgattgcggtgacaactccgatgaagagagctgcacccctcggccctgctccgagagtgagttctcctgtgccaacggccgctgcatcgcggggcgctggaaatgcgatggagaccacgactgcgcggacggctcggacgagaaagactgcaccccccgctgtgacatggaccagttccagtgcaagagcggccactgcatccccctgcgctggcgctgtgacgcagacgccgactgcatggacggcagcgacgaggaggcctgcggcactggcgtgcggacctgccccctggacgagttccagtgcaacaacaccttgtgcaagccgctggcctggaagtgcgatggcgaggatgactgtggggacaactcagatgagaaccccgaggagtgtgcccggttcgtgtgccctcccaaccggcccttccgttgcaagaatgaccgcgtctgtctgtggatcgggcgccaatgcgatggcacggacaactgtggggatgggactgatgaagaggactgtgagccccccacagcccacaccacccactgcaaagacaagaaggagtttctgtgccggaaccagcgctgcctctcctcctccctgcgctgcaacatgttcgatgactgcggggacggctctgacgaggaggactgcagcatcgaccccaagctgaccagctgcgccaccaatgccagcatctgtggggacgaggcacgctgcgtgcgcaccgagaaagcggcctactgtgcctgccgctcgggcttccacaccgtgcccggccagcccggatgccaagacatcaacgagtgcctgcgcttcggcacctgctcccagctctgcaacaacaccaagggcggccacctctgcagctgcgctcggaacttcatgaagacgcacaacacctgcaaggccgaaggctctgagtaccaggtcctgtacatcgctgatgacaatgagatccgcagcctgttccccggccacccccattcggcttacgagcaggcattccagggtgacgagagtgtccgcattgatgctatggatgtccatgtcaaggctggccgtgtctattggaccaactggcacacgggcaccatctcctaccgcagcctgccacctgctgcgcctcctaccacttccaaccgccaccggcgacagattgaccggggtgtcacccacctcaacatttcagggctgaagatgcccagaggcatcgccatcgactgggtggccggaaacgtgtactggaccgactcgggccgagatgtgattgaggtggcgcagatgaagggcgagaaccgcaagacgctcatctcgggcatgattgacgagccccacgccattgtggtggacccactgagggggaccatgtactggtcagactggggcaaccaccccaagattgagacggcagcgatggatgggacgcttcgggagacactggtgcaggacaacattcagtggcccacaggcctggccgtggattatcacaatgagcggctgtactgggcagacgccaagctttcagtcatcggcagcatccggctcaatggcacggaccccattgtggctgctgacagcaaacgaggcctaagtcaccccttcagcatcgacgtctttgaggattacatctatggtgtcacctacatcaataatcgtgtcttcaagatccataagtttggccacagccccttggtcaacctgacagggggcctgagccacgcctctgacgtggtcctttaccatcagcacaagcagcccgaagtgaccaacccatgtgaccgcaagaaatgcgagtggctctgcctgctgagccccagtgggcctgtctgcacctgtcccaatgggaagcggctggacaacggcacatgcgtgcctgtgccctctccaacgccccccccagatgctccccggcctggaacctgtaacctgcagtgcttcaacggtggcagctgtttcctcaatgcacggaggcagcccaagtgccgctgccaaccccgctacacgggtgacaagtgtgaactggaccagtgctgggagcactgtcgcaatgggggcacctgtgctgcctccccctctggcatgcccacgtgccggtgccccacgggcttcacgggccccaaatgcacccagcaggtgtgtgcgggctactgtgccaacaacagcacctgcactgtcaaccagggcaaccagccccagtgccgatgcctacccggcttcctgggcgaccgctgccagtaccggcagtgctctggctactgtgagaactttggcacatgccagatggctgctgatggctcccgacaatgccgctgcactgcctactttgagggatcgaggtgtgaggtgaacaagtgcagccgctgtctcgaaggggcctgtgtggtcaacaagcagagtggggatgtcacctgcaactgcacggatggccgggtggcccccagctgtctgacctgcgtcggccactgcagcaatggcggctcctgtaccatgaacagcaaaatgatgcctgagtgccagtgcccaacccaatgaaaggggcccggtgtgaggagcacgtcttcagccaggaagcagccaggaatatagctcatctctaatttcataataaacaaacactttattttgta

SEQ ID NO: 617432 - DNA, 1130 bp, Homo sapiens
ccgccgccgccgacgccggcgacgacgccaggggaagggttcgtggtccagggatcgggctcggcgggcgcggggtgcgggacggaccagggacacggcgtgctgcagcgggagcacactgagcgcccagcccgccatgtccaggaagaagacccccaagagcaaaggggccagcacccccgctgcctccacgctgcccaccgccaacggggcccagaccggcagcgcatccgggacatgcgcttatccaggccccagacgcgccgacccaacgggcccattgcagcacctggcacggccctcgcattggacgagactggtgtcagcacttctacgacagtcgaccttcaaggtcaatgctggtggagagactcgaggtgatggggaagacctgatctgctggattgacgcatccaaggatggatgacatatcctggacggggacacttcatcatccaccgataggcattgacttccggaacaaagttctggacagtggatggtgtgaaggtgcagcctgcagactgtgggacacagcatggtcaggagcggttccgcagtgttacccatgccatactaacgggatgctcatgctctgctgctgttctacgatggtcaccaacgaggcctcctttgaacaacatccaggcctggctgacacgagaataccaagagtaagccccagcagacgtgcacgctcatgatgctgggggacccaggtggaatcctgacaatgaacgatgtggaagaagacggaggcacgcgcaaacaaggccacaagagaaggcaggccacacatgacacccgcacacaacgcggacacaacgggacacgacacacaagcccacagacagagcaagacaaacacacgaagggaacacacaacaacagtacggtgagcacagtacagggcgatgagaggccacgaacgcgataacgcggaacaccgactagtggacacgacaacaaagagcagaaaggctcaaaccaaaaaggccgaaaacacgaagatatggccacgagcaggaatacacaaaaaaaagagagaggaagcagaacactaaggcgcgaagaagagccagcagaggaaacacagtcacagcgccttgctgtaaaaccaacccagggaa

SEQ ID NO: 617433 - DNA, 1653 bp, Homo sapiens
  misc_feature (229)..(229): n is a, c, g, or t
ttagaggatctcaaacaccgcaatctagaggaacgtttctgatcttcgccaacggtactacctgcgcaagtcaacctggacgggtccaactacacgttacttaagcagggcctgaacaacgccgttgccttggattttgactaccgagagcagatgatctactggacagatgtgaccacccagggcagcatgatccgaaggatgcaccttaacgggagcaatgtgcagntcctacaccgtacaggcctcagcaaccccgatgggctggctgtggactgggtgggtggcaacctgtactggtgcgacaaaggccgggacaccatcgaggtgtccaagctcaatggggcctatcggacggtgctggtcagctctggcctccgtgagcccagggctctggtggtggatgtgcagaatgggtacctgtactggacagactggggtgaccattcactgatcggccgcatcggcatggatgggtccagccgcagcgtcatcgtggacaccaagatcacatggcccaatggcctgacgctggactatgtcactgagcgcatctactgggccgacgcccgcgaggactacattgaatttgccagcctggatggctccaatcgccacgttgtgctgagccaggacatcccgcacatctttgcactgaccctgtttgaggactacgtctactggaccgactgggaaacaaagtccattaaccgagcccacaagaccacaggcaccaacaaaacgctcctcatcagcacgctgcaccggcccatggacctgcatgtcttccatgccctgcgccagccagacgtgcccaatcacccctgcaaggtcaacaatggtggctgcagcaacctgtgcctgctgtcccccgggggagggcacaaatgtgcctgccccaccaacttctacctgggcagcgatgggcgcacctgtgtgtccaactgcacggctagccagtttgtatgcaagaacgacaagtgcatccccttctggtggaagtgtgacaccgaggacgactgcggggaccactcagacgagcccccggactgccctgagttcaagtgccggcccggacagttccagtgctccacaggtatctgcacaaaccctgccttcatctgcgatggcgacaatgactgccaggacaacagtgacgaggccaactgtgacatccacgtctgcttgcccagtcagttcaaatgcaccaacaccaaccgctgtattcccggcatcttccgctgcaatgggcaggacaactgcggagatggggaggatgagagggactgccccgaggtgacctgcgcccccaaccagttccagtgctccattaccaaacggtgcatcccccgggtctgggtctgcgaccgggacaatgactgtgtggatggcagtgatgagcccgccaactgcacccagatgacctgtggtgtggacgagttccgctgcaaggattcgggccgctgcatcccagcgcgttggaagtgtgacggagaggatgactgtggggatggctcggatgagcccaaggaagagtgtgatgaacgcacctgtgagccataccagttccgctgcaagaacaaccgctgcatcgcggggcgctgaaatgcgatggagaccatcgactgcccacatcgtcatacggtaccgaca

SEQ ID NO: 617434 - DNA, 230 bp, Homo sapiens
catcaagacggagaagctggaggagcccgccgaagacagcccccctgtggaagaagtcaggactgtgatcaggtttgtgaacaataaaaccgacaagcacgtcaacaggccggtggtgtccctgccttccacgtcagaggctgcgtcggcgttcgccttccttggcctcgtccgtctcgggcaagatcttctctttaatgttgccaaacgcttgcctacagcacatgccg

SEQ ID NO: 617435 - DNA, 430 bp, Homo sapiens
caatataagtggaccagttcctcataaactgtcaaatgttcttaaatgtgtaatgatctatagatgctcatgaagaaagatctgctacaagtacgtgataaattcctatccctgggtgcatgtgcattcagaaatagctgtgagctttacagctctcatctaacttcttttatggaattcatgaagcaagtggtatgtgacaaggactccacttataaatataactgtttttatgttccactgaatccctgaaaatggtgaggagggtggggggaagtgaaggaaagacaagcagggctaattccaaaaagcaaggctagaaaatagccctgtgaggtcaagacaatttaatttatttacatgctgtctgttatcttcaagcagcacaaaatatgcatataaaagtgatggaattaatgtgaaataaaac

SEQ ID NO: 617436 - DNA, 2198 bp, Homo sapiens
gcagagagctagtacttcacttttcactggatacattttcagcactcatgagcttgtcacagccctcgtgagcccctgaatctgcacagccagacagggctgacgctgtacttgctacaaccttatttccttgccattgttgcctgctcctgcggcacactggcaccaccacctaccagccacggctacctccctgcggcgcgccgactacttgtccgcaaagtgccccgtacacacactgctactcccctggccttgccacacttgcacggcaacccttgcggcactgcctactctaacctccccgctcactctctcagcctacaccttgctcacccatttcatagcgtaatttccccaaaaagcgcaccccaactctaaactggcccccttcttgcactttcaaggccactactacccccagctacttccccgcactgcaaccactttcccccacacacgcaccttggcgcacgggcccaaaaccctccgaggaccccttgacagctctctcacacatcttcccagccaacacagaacttctaactggctcccaacttgcccctgcgccgccgcccatcttggcacgcgccttgtggcacggccccttcttgcgcgcgcccctctctacggccggccccttactggccgcggcccctctcccacgcgcccttactcgtcctggtcaccccctccggttccccaacgctgtgcccatgcttcccgttcccgccgttctgtctcggccctgtttcttcccccttggcgctaccgtctctccccgcgttcccatatccccccctcttctttccgttcaccccgattccccatgtgtctccttctgtccccaaccggctcccacacgctatgctcaccttccctctctctcccgcctgcttcacagacccttcccattcattcccaacggccaacacccacgctgttcctccaacccctataacgttgtcctctctcccacgctggcacaaatcccgcacggcctccttcaacccccccatttcccttgggatctcccacccatccaaacccaaaaatgcgccccaacaacatagtgaaaacccaaaacactcactttccacactctgcggcgcccccccatcaccccccatatctcaattggcggcccaccccccccactcccggccgcgagccttataaacacccgcacccgttctctgtgccccgcacacaccaatgcctcccccattgtgccggtcggcgccccctttctccgtggcgcccgcacaccacacaaagcctcgggcttataaccccccccgaaacggaggacttccacaacccaaacagcgggagggcaggacacaccctttcccgcaccacacccacgcacccagcagcccgctcctcaacccgcgccacaccacgcccgagcaccaactacacttccccccccgaggtggcacccccccgcagcccagcgcaggccccccaacccaccctcacacgcaccaccagacacaacgcgccactctctgatcactacagcaccccccccgcgccaccacccccccccgccctcaagcgacacacgcgctctctacccacactaccaccccccctcacaccaacacacgcgcgtcccaaaccaaccgcacacgaccccacactttcagcgccacccaccaaacacgcccctcggtccgacaacaccacccaccccaccaccacagtcgaccactccacacacatcatccggccgacctctcgacgccggcccccccccaacgacccacgtcaccccatccgccaacgcgggcaagccccccatcactgtgcgggcgcccaccccccacagccacgccgctcgacaccccacgctcaacgcaacaacagtcttcccacacacaccacacccgtgtggcgccacacgcaaccacacaccactacacacaccacaccacccccagccgccacacacccgccaacccaccaccactgccgactgcacctcgccgcccaccccccaccctgccccaccaccaccacccagcagcaaccacacgcctacctcgctcaccacaaacacacaacccacaccccgccatcgacacaaacccgcccacagccggcaccgccacacaacactgccacgaccagcacccacgcaccagacgccaacactacaagccacacacacagcccgcacctccctcccg

SEQ ID NO: 617437 - DNA, 284 bp, Homo sapiens
cccctttcggggaaccccctttgggggtcccataaagattttccggggatttggggtccattgatgggtataatggcccacgtttaaaaagagggggattgggttttaaatttgggccttttttcccccaaatggtgggttaagggggttggtaatttttaggtcctaattcctttgggttttttccagaaaatttttgtttttaaatttttttgcccttttaaatttggggggcaaattaaaaattttggaaacccccctttttaataaaaatccttttaata

SEQ ID NO: 617438 - DNA, 950 bp, Homo sapiens
ggtgctgtcctgggaggttggtgttggaggcccatgaagagcgccctgggactgctgagggtgggccacagtccagagctcaggacacttggctttggggggaaggaaactgaggcccagagaggggcaaccactggccaagggtcacccagcaagtttgggctaagagcctggctccagcgcccagcatgtgtgtgccagagcatgggccgactgccaaagtaaccatcatccatatgggccgtgtggtgatgctggcccggaaggcagaaagaggcagcatgggcactgccaggacagtccacatcctgctggtctgcatgcgtggtccaccccgcactctgcccagagctgtctacagccgtgtgagctgaatcgtgattgcttcccacctcctttctctgtcctctcctgtaggttctgctgcgagccccaggaggtggtggctgcccagtccctagcgtggagctcatgtgttcctaacagtcaccacgctcacgaatgctcgtgctaggacttaccccatgcactgagtggcagtgcgcaatgatgatttgtgggtgttcctgaatgctagttggcagcaacagtgcttatctgtgtaaatacatgactggcatcaggatagcaagggaacagcaactaaaccaaaaacggcggagtattccggggcgacaacctgctgagcaggggccatgtgaatggtgtagtctgacaactattgtggaaggtgatgccttagtgtccgatagaggatatttatgggaaccgggtacggttaatacgggaaggaccgtatgatgggctgtaggatggcgagctagactcgaatacaagtgatgtgagaatgtcgactagagacagaagggatataagggtgggagcagacaaagaggaagtagggattagagcagcaacggaagaagtcaaaatcaataattaagcgtaca

SEQ ID NO: 617439 - DNA, 732 bp, Homo sapiens
ggggcgttgatgaaggaacagggagcatgctatttagagcaagtgcagcatggatatcaccttttaaaccaattagttcagccagtggctcaggtattttctcgcatttagagcactatagcatcacccatgtctacactcaggaaagcgtcatcatgaaaatccagacttcatcaacagacattcaacagcaagtcagattagcgattttcacaacaggcattctgccattgttccagccaggcattcagtccatcaacaactccatgtttaaacagcagtctgcacaacatgtcggttaacatcatcacacacagcacagcatagtatattcaccaaacacacattatgggaattcagacagtgcacgatccatatgtagaaacattgcacaatataatcaggaggaacaatcatgcaattgtcgacaaaatacaatacccgtggtcatgacatagagggcttaacacacagaagtgcacaatatggggacacaacacagtcatgcgcgaaacaaccaaacaacattggttcgactgccacgataagaggaaaacacctttttgtgccaaaacagaagagggacacaccacgctatcacgaattgtgtctcaagacataacaccacaacatgtgtataccgattacataacccccctggatggcaccgagataacattaataactttccacattcacagttaagataaaagacctaataacctacataaa

SEQ ID NO: 617440 - DNA, 236 bp, Homo sapiens
gacttacaaatgtgttatgagatggtccattcatctagactcagagtgtttagtgctgttctcctgagaacatcttctgtagccttgctttttcctcctgtaggctggcagaggacagtggagccagcacacacaaaactaacgtttgtgcatgggtaaagaccgtggtgattttataagcatcctggggcatatcacattccatgaaagtaggaaatagggtgctcctgcaacca

SEQ ID NO: 617441 - DNA, 123 bp, Homo sapiens
gctgcggctgcgaaagtaccgcctgcgagtaactgcaaagatgctgtccgtgcgcgttgctgcggccgtagtccggcccctttcctcggcgggccggtactggttctccagaaaatgctttgg

SEQ ID NO: 617442 - DNA, 145 bp, Homo sapiens
  misc_feature (5)..(5): n is a, c, g, or t
agtancaggcccccgacacaggccagcagctagacctactgggccgtaaactaataggctagggaggcgacagcccacatacgagctactagtagtaggggcataagggctaccctactaggacctaggcggggcagacagacgg

SEQ ID NO: 617443 - DNA, 501 bp, Homo sapiens
taaattgtttcttttcatttattttttttttagagacagagtctcactcattgtcgccggtgtgagtgcagtggcactatgtcagctcaccacaacttctgcctcccaggttcaagtggttctcctgcctcagcctcctgagtagctggaactacaggcacacgccaccacgcccagctgattttaatattttaagtagagatggggtttcgccatgttggctaggctcctctcgagctcctgacctcaggtgatctacctgccttggcctcccaaagtgctgggattatgagcatgagccaccatgcctagccccaaattttttcttttgataaaggatacccaatcatattctatcaggggctcactctactccagtattacctcatcttaactaactattatatctgcaacaactgtatttccaattagagtcacattttgaggcactggggttaggatttcaaaacataaattggggtcatgagaccatcaatggtc

SEQ ID NO: 617444 - DNA, 205 bp, Homo sapiens
tgcagagggtaattgaaatgaaatgctaattgctttcatacaattatgatattttgagttcaagtcacgtatgtacttcattggtggtggggtgggaaagaggaacaggaaggggtagggtgaaaagaggagctgaaattgctaaccaaatttgctccaaggagaaaaggaaagaaagaagccacatgtcagttgtttggaagtt

SEQ ID NO: 617445 - DNA, 151 bp, Homo sapiens
tggggggggggaccatgttttgaatgcattacattaccaaaaaaatgaatattgaaatgcaaaagtcaaaatataaaaacacggacatttgctctttacctagactagatatggctagtcctggtcaatcttaggaaggctgacgctgtgg

SEQ ID NO: 617446 - DNA, 356 bp, Homo sapiens
  misc_feature (258)..(258): n is a, c, g, or t
  misc_feature (336)..(336): n is a, c, g, or t
tagagtacccccgccaacgctgggatccactgggccacccatacaccagaagacatatgaggaaattgttaagcgaagtcagcacttacattaagaacaatatggctacaaccccgcacacagctagcatttgtagccaactctctgggttggaactggtgactcacatgctgcgagccaatgtgctaacatgtccttgcgttcaaggtgatggacaatgtcacccgctaaggatggcacatgccagtaggaaccacngctgcttgagcgctctggactgcattctaccaccaagctcgtccaactgatcaagcccttgtcgcctgccgtctccangtgatatcccacgtttagcg

SEQ ID NO: 617447 - DNA, 449 bp, Homo sapiens
tggcccgaggaggtttaagtggtttccctcgggctgaaaaagggcccccctttttagagtagttttcataagttttaaaactggtagctcggtcgtttcgccccctagggggcaaacaggcaccagcaggggttcaaatccttgattttgagaatttccccccaagtatgtggcagtaaatacaccaagcccctttaggtattaatgtttccattgttttaaccctgttccaaaacaaaattccccccctttttttatgggaaggtattttccataaaattccagtatttaaaaagcagtttactgttttggactttttgttgtatcccaaccaggtaaaagtccctttaaattgaggaaacggcaaattgtgttttaaagctttttgtatttttccagtttttgcccttgtaaatttgtaaatatgccctaaaaaagcttttttttta

SEQ ID NO: 617448 - DNA, 333 bp, Homo sapiens
tagagctggatgctggtgattgcagataaggaacaatatgtatatccagcatctgctcaccatttccacatccttaacttaatcacacctgcaaacctcctattttccatataaggaacattacaggtcccaaggataagaatcaatttggggggcctcatacagcctaccacagacatggactatgatctcatccttcctcctgccagatatatcaactccactttttctccagattggtaggaagcttgtgagcagaaaacacttcacctacaaaagtctctgagctgtgtccagagtagcagattatttaagagtaaataatttatatat

SEQ ID NO: 617449 - DNA, 871 bp, Homo sapiens
gctgctggcatcactatactactaacagaccgcaacctcaacaccaccttcttcgaccccgcggaggaggagaccccattctataccaacacctattctgatttgcggtcaccctgaagtttatattcttatcctaccaggcttcggaataatctcccatatggtaacttactactccggaacaacaagaaccattggataccataggtctggtctgcgctatgatatcaatgggcttcctagggttatcgtgtgagcaccaccaattatatttacccagcaggcatagccgtagacacacgagcatatttacacctccgtaccataatcatcgctatccccacggcgtcaaacgtattcacgctgactcgccacactccagggaagcacatatgaaatgatctgctgcagttgctctgagccctaggatccatctttcttcacaccgtaggtggccctgactggcattgtattagcaaatcatcactagacatcgtactacacgacacgtactacattgtagcccacttccactatgtccttatcaatcgggagctgtcttgcccatcataggaggctcattcaactggatttcccctattctaggtacaccctagaccaaaagcatacgcaaaaatcactgtcactattaatatgcatcgggtaaatctacctttcttcccacaaacttctcggctatcggaaaggccggcgttacttggatacccgatgttacccgtgaaccttctaccactggggccatcatcttaccgcggaactaacattccgattggtagctcgtcagcacagtctagttaaaacccaacgggtattggcccccccattgaccttaattacagggcccggtccg

SEQ ID NO: 617450 - DNA, 265 bp, Homo sapiens
aggcggaccttcctctcctcccacctcccaagtagctgagactacaggtgcgtgccacatgcccgctaattttgtattttttagtagagacagggttcaccatgtggccaggatggtctcgatttctgacctcgtgatccgcccacctaggctcccaaagtgctgggattacaggtgtgagccaccgcacccggccaactctttcttttttttaaacatgattttctttctttttctttctttttttgaggtgggaggagaggaa

SEQ ID NO: 617451 - DNA, 188 bp, Homo sapiens
gtaaagcgtataccaatgtggtggtgcgggtcccacagtgacgagtgagtgagtgtcccatggcggtgagtgggtcccacatgggcatggtgtgagtgaggtcccatggtcagtgagtgggtcccacagggcatgatgtgaggtcccattggcagtgggaggctcccatacgcgcgtgagtgaggtcc

SEQ ID NO: 617452 - DNA, 126 bp, Homo sapiens
aacaactccatcttcgcctaagagccgcaggacccacgctgtctggctggtccaccttccgcaccacctccatgccctctagaacttttgtaacaaactcctaccaacactgaccaataaaaaaaa

SEQ ID NO: 617453 - DNA, 321 bp, Homo sapiens
ggagtaaacataggctgggatggtggctcacacctgtaatctcagcactttgggaggccaaggtggaaggactggtatatgccaggaggtcgagaccagccggggcaacatagcaagaccctgtctcttaaaaaaaatagcaggttgccaatgcacacagccctacagtcccagctgcttccggggctgaggcctgaggttcacttgagcccaggagttccgggttgcagtgagctatgattgtgccactgcactccagcccaggcaacagagtgagaccctgtctttaaaaaaaatgaaacacacacacaacgggatgga

SEQ ID NO: 617454 - DNA, 777 bp, Homo sapiens
  misc_feature (270)..(270): n is a, c, g, or t
  misc_feature (777)..(777): n is a, c, g, or t
gaaaccagcgtacaggtgacaggcagctcacgccaggtcctgtgaggggtgtggcatatacagaggacctgggcactactttatgtaccttcgttacactaattgctgtgaggcaggctgttggtgagctctgctcgggacggtgaagtaagctagggcgcaggtctggggtacggtgttgtgtcagaagctagagacgaggctgggtgggcatgagctagagtcaggctgggattcagtctcagacgagtccttaattagacatcgagngctactcgcaacgttctagctgtgtgttcgtgggtgtggccattaggacaaatgaggctgggaaacagcggtaggagaaccactggtagagaagcatactcagatggggtgctcattcattactgtatcagcaggtagatcacgttactctgtaggtgcccaacccgcatttaagtggcctatccaagtgggcagatgataagccctgcctttgcctaattcaaggtaacagtgaagatcactaaggtaataggagtctccgtaagggactctctcaggcccaagagccaggcgttgcttcaagataaggagctaggcattgtgcactgtgcactacaggagacctagagttgaacgagtttcacaggcctggcgtctgctctccaattcaggccttgccctcagaacgaggcagctctcagcatcgcagtccatctgagtcctggccgagagcatttgatgctgcacatctggttcatgaaagctgggcagtaaggggggcagctn

SEQ ID NO: 617455 - DNA, 1053 bp, Homo sapiens
gggagcaggctgcacggcaccaagcagcggcaggcctggcagcacaatcaacttttccagtcacatggtccagtatgtggattatcttgtgaaagcaacagggagtgaagacacatttttgtgcaatggccacaaccaggcagacaggcctgtccctgcagcgtctccagcagcgtcgcccaggttgccagaggagtgggtgacaaacagggcacaggacaagctggcatcaggtgatcaattcacagtaggagcactgcagcttgacaggagtcacaggcacactggccccaacatgcagcagcaacataggagctgcatggccatcgctgtcatttgcaccgttcttcctcaagccatggaccaaagatatcctgattaactttcctaaaggaagtggcctgctgacgcccctgccctgccatatacattactatcacattcctgccttgacaggggtaaacgatttcgtgctgaggagtagtcggactgggactctggataagatcccccaccttccaagggctgaacaatttcagtgctacagcatctcttagacacttcggggccaagcggtcgatccacacatcgacaggcacacagactggcatacctatcaggaggtggctgagccaccgcatgcacgtggcactggccgaatgcgacacaactggacgcagcggcgcagacacatactaattaccctgggaaacacacgcacccaaccagacatgttgagaggcccacacaggacaccaacaacgggaacacaccatgacgccatgcaacgtaatcacgaagcgcactcgcagaaggactttaaacaaaaaataggccagaccaacacacaggggatagggagaagtatgacagcgaaaccaaagacgcagccaagcaacaaccaggagcccagtggaacctccccaagggggcacacgcggggctcaccaagtagtacaagagcaccaggggagatagccggactcgctagcaacaccacacagcaacacaccgagggcatcaccatcaaccagcgacataacgaagaagaaa

SEQ ID NO: 617456 - DNA, 203 bp, Homo sapiens
tagcttattgcataggatctttcacgtgtaaccatgcaaagaccaggtgcctctctctattggttgatcacaccaattcttcctaggttagcaccgtccagtcaccatacacaggttaccagtgtcgaacttaatgaaatcagtaatcttgccagtctctaaatcgaatctgaatagtatcattcaccttgatgaggggatcg

SEQ ID NO: 617457 - DNA, 367 bp, Homo sapiens
gtctacaggatcttcttacgccgaactctgagcagaacacattaaatcaactgagaaagactacgtttacaataagagaacaacaatggatgtgaacacaccaatgagcagggtaaatggtccattagagagtcactttcactatcattcctacaaatggctagggaatgacagacatgggtggaggagagggggggcaacctggaggggggagatgggaggaatggagggggtctgtttggggagggagtgatggaaggtgtgtgtggtgtggaggggtgcagtgtgtgtgtgtgtgtgtgtgtgtgtgtgtagtgtgtgtgtgtgtgtagtgtgtgtgtgtgtgtgtgtgtgtgtgtgtgtgtgt

SEQ ID NO: 617458 - DNA, 746 bp, Homo sapiens
  misc_feature (446)..(446): n is a, c, g, or t
  misc_feature (539)..(539): n is a, c, g, or t
  misc_feature (621)..(621): n is a, c, g, or t
gctgtcggaattcggctttagggctcacgtctgacctcccaacactttgggaggccgaggcttggggatcgtttgagaccagcctggacaacattgtgagaccctgttccttgaattgccctgggagatttcctcagcttgtactggaggtgtgtggccccatgaagcccatagtcaccgttcaccctgagagacgctggctttggggctgacacacctgctgcggggcagccccaggagatggccaccctgtttctcctggagctggagctgcgcgtcttctcagaaactgtggtggctgtcctgttttgtttgcatcttataaacctttacctgattacattttcctcttcaatttagctgctagcttaaagtcagattggtggctcaccagtaatgagagtttagagtagaggtaaactttatgacatagtcttagactcttnactttctcctcagccaacatgattcacatttactttattttgctgtactgtgaagtgctttgggggttcctgatttcttctggaataaggcangtttgtagtaagcacaggtttctggtccatctcatagccctaggcaatgggcggtgcttgccgtgctccctttctgggtacntgtggtaactttgaattgcaaggctgcgatttgaggctgattagtccaacgggttctggtgggtccgtggggtttgttcttaatgtgacaattccctgggccctgtgttttcccctttggctggg

SEQ ID NO: 617459 - DNA, 565 bp, Homo sapiens
  misc_feature (446)..(446): n is a, c, g, or t
gctgtcggaattcggctttagggctcacgtctgacctcccaacactttgggaggccgaggcttggggatcgtttgagaccagcctggacaacattgtgagaccctgttccttgaattgccctgggagatttcctcagcttgtactggaggtgtgtggccccatgaagcccatagtcaccgttcaccctgagagacgctggctttggggctgacacacctgctgcggggcagccccaggagatggccaccctgtttctcctggagctggagctgcgcgtcttctcagaaactgtggtggctgtcctgttttgtttgcatcttataaacctttacctgattacattttcctcttcaatttagctgctagcttaaagtcagattggtggctcaccagtaatgagagtttagagtagaggtaaactttatgacatagtcttagactcttnactttctcctcagccaacatgattcacatttactttattgtggcggtacggggagcgtccttgacaggttggagaaggggcaaggaggtggggggggcgggaggtagagagccgggcaa

SEQ ID NO: 617460 - DNA, 120 bp, Homo sapiens
cctgggtggtactcaatccaactctgactgtcggtgagcgccgggctatgggcccgatgctccgagcgccgatccattttcaaggactagattgattcggcacagtgagttgttatcaca

SEQ ID NO: 617461 - DNA, 243 bp, Homo sapiens
cgcttctgcgtcttaacgaggtggtaccagatgcagggagttatactgagctttttcgtctcattttcctgaatagactattacttcttccctctacatccctcctgtgttcaaaagcacgaattgtcgaacccctgactaatgtgacttggacccggatatgtcaccgacttcatccagtgccaagcatatgaaccttctgtgagtcatcttcccttccgtcccccttggcacgcattaact

SEQ ID NO: 617462 - DNA, 191 bp, Homo sapiens
aaggtccggcccaggtttttcctttttttttaaagccctcaggtttggtttccaatttttgggccctagttttgggtttgaccccccgatggggcccaaaagtttctttttttggtttggccaaaatcctggttttccgccctgggggttttttggtttttgttaataattaaagccctggtccgggggga

SEQ ID NO: 617463 - DNA, 251 bp, Homo sapiens
  misc_feature (176)..(177): n is a, c, g, or t
  misc_feature (215)..(215): n is a, c, g, or t
  misc_feature (227)..(227): n is a, c, g, or t
ctgggccggcaacagctacctgactactctgaggtaggacacactggggcatgacccctttgacagaagaggaacatgagactagctgtgactaaaggattcacccagatctcctagcccaactctgccccagagcccaaagtgctcaagaggtgacactccatttgacgaagganngactgccccgccttttaactgtgaaaacgcaggcctgngaggcccagggntggacgtggtcctcagccagacca

SEQ ID NO: 617464 - DNA, 180 bp, Homo sapiens
  misc_feature (100)..(100): n is a, c, g, or t
tccgatccgcgaagacgttgcgccgcatagcgaaaacttgtctctactaaaaatacaaaaattagtcaggcatgggtggcgcacgtcgtgtaataccagncttctcagagaggctgaggcacgacggatcactatgcacccagagagagaggaggttgcacgtgagctgatgatcatgcc

SEQ ID NO: 617465 - DNA, 321 bp, Homo sapiens
acctcagcctgggtgacagagtaggactttatatttgtactgccataacattttaattcaaatagaatataactgaatttgtaagggtaatccctaatatttagctttaatttgtttgtagaaatataaaatggtagagctgaaaaggtttttgtagtctaataacctcctgtttctattgaagcagaaattgggccaggcgcagtggctttgtaccttgtaatcccagcaatttcggaggccgagttgggtgcattgttctaggccaggagttcgagactagcctagccaaacgcagtgaaacccgtctattaaaaatac

SEQ ID NO: 617466 - DNA, 365 bp, Homo sapiens
actttattttacacaagtggtggccccagaaccacagggacatgacctggagagtaggcacagtgcctgaggctgcaagagccaaatacagggattcatgccttctccttggtccccatgaccaaattaaaaaaaaaaaaacaacaaatcacacagcacacatcgccacacccatcccctccttcctttcagcaacagccaattcagctttctagccaaagacagtggctacaactgaatttacagagaaccatgcagccaagaaaccagagccacggaggggagaggcttgcgttgacttcccacatgtgctgtcccataagcagctgagtgaccccaccaagccaccgtgtggtttggacact

SEQ ID NO: 617467 - DNA, 375 bp, Homo sapiens
aatccattttattccattgggaggccgagccaggctgatcttgaactcctgacctcaagtgatctgcccacctcagcctcccaaagtgctgggattacaggcgtgagccttctagctcggcctgtcctgcgctcttacaggattatactgtgttatcggcttgtcagggcgttttccgggattcctaccctttgcagcgcataatgagattattatctatggctagttccgattttcctgcttctctctaacttttttatatctattcttaatattcttatcttctattttctaatctttcctcacatttcttcttatatctttatctattatatcttacttacctgtgtttctgttgttatctcttcacattcg

SEQ ID NO: 617468 - DNA, 141 bp, Homo sapiens
  misc_feature (76)..(76): n is a, c, g, or t
tgctggtattataggtgtgagccaccacacccagcttgacaaagattattggccctccctgccctatatcttctgngagtcgaagatgttcctctccctagatggcaagattggcattcctccttcacctcttttccagtc

SEQ ID NO: 617469 - DNA, 246 bp, Homo sapiens
tgtggttctgtgctggcttgcaggaattttaagacaatccatcaccatcaaggtttgcctttctccactttcgtgtatcttacagttatactcaccggaggtcattggcagcaaggctctggaagaatgaaactggtgcccggtaatggcattggcattcaatctaggttggccttcaggctttaaatgcggccggtatgaaggtcaagtctttttcttcagtccctaccagcaaagaaccacacg

SEQ ID NO: 617470 - DNA, 199 bp, Homo sapiens
tcatactactaaggacacacctacctgccttatccccatcctactctattacggtgagcgtctagagtcgccctgcgtgctttcatatttgttcatgatcgtcatttctcaagttcatgggtgtcaaatgcctggtggtatatcttaaaatagttgatatctgacacaatggtaaatatcaactaacactggctttttt

SEQ ID NO: 617471 - DNA, 748 bp, Homo sapiens
  misc_feature (65)..(65): n is a, c, g, or t
  misc_feature (100)..(100): n is a, c, g, or t
  misc_feature (115)..(115): n is a, c, g, or t
aagtaggcggtggtcttactagagtctatcgtcctgccatctaggagaccagagtatatcagcanagcatatcacgtgaatctgttgtcatggaccacanatgccaccggtatgntagagagacagtccatccatttcccactcagtcagttacacagtagcactacatcagagcgtcagcatatagaggtttaatatagtatagcccgctgtgtcaagctcccatataggcgctgtcctagctctctttcacagtggcatcatgtgtacgcgcagagtcagtcaaggttgcatcactcagagcatcatgccatgcaaatataggatacaccagtcatgtgctatatctgagtataccatatgcatactgtctttccacaagctcatgtgtgtcaacgtatcagcgttaatcagtcttggtttagagtattcgacaggattacacagtgagactcatggacaggatcatgtgggagagaatccatgcattgggtggcttttggcatgcgatgtcttgcaccgactgtagtgcgtggtgttctaagggctcaccagtacatagatcatgccatataggtcgtgtagttgtgctagaagatcagaatcttttatgcaccatccatcagtcgtataaggtgctagcatatgcgccatcaggatggtagtaggatcatagagtataggaccactcatctctggtctggtcgaacacctcccaatatattatgtctgggggcccgtagtcacg

SEQ ID NO: 617472 - DNA, 175 bp, Homo sapiens
tcgatctagagcatcccccttataattcattgaatctaggtctgtcccaatatgtattggatggcggatagtaagtatgtacattactgtgggccctcagaatgatatttggactcacgggaggacatagcctatgaagggctgttgctatagttcgcccgtgtacactgcaagg

SEQ ID NO: 617473 - DNA, 265 bp, Homo sapiens
aggacactgcatcatcatattctgccatctccttcggaactccatacgtcctgctgtctcgctcacgccgtacctctgcagactccaagtccttgcttgtcacgattagggaggaaccctcatggcctcgacagacatgttgtggatctctaggcacgaaggagatgcgctggtggaaggctagctggagctctcgggtggaatcgatgtcagtcatctccttggataggacatagcccttctcgtagattagatgctggacaga

SEQ ID NO: 617474 - DNA, 804 bp, Homo sapiens
gtccttggtcagagctacatgtgcaaatattagtatctcctctttggtagcatgtcttctgatttctttatggtatcctttaatgaacagtcttaatttcaatgtagttgagtttatgaatctttatcttttatgggatattaggtttcatcctatttttaaaatatttatgactcccaaatcataaagccattcttctgtattcttctgtaaaaacatgtgtaacttggcttttatatctaggtctataatctacctgacattgatagttatgtatgggtgaggtatagaaagctcaatcccactttttccataaggacactcaatttgcccagcagcattatgtgaaaagaccgttctttctccatgtgttctgcagtctcgtcttgtgttatacataaatctgtgttttcaaatgtggtctgtctatctctgctctaattccacactgtcttaaataatgtagctttatgataaatcttcacatctggtacaattttccttttgatcctatttgttcattttcttcacaagtcgtgagggtattttcaagtcaaatttggctttctcacgtaaagtcggcgtagtggtggtgctgttctgagagggggggcctcactctgttggccaggggtgggaggtggcaggggggtactcctgggcctggcggcctcgggcttccacggtcagagaaactctggttccaaggtgagcgaggaaagtgctgaacctgggcgggggttgagagcgagaattggccatgccccagcgggcaagagggactcttcccacaacaaacgcaac

SEQ ID NO: 617475 - DNA, 149 bp, Homo sapiens
agaatacaagaccagcctgggcaacatagtgaaacctaatctttgtttgtttgtttgtttctattcttttccttgagacagggtcatgcactgtcacccaggctggagcgcaacggtgcaatcatggctcactgcagccttaacctccc

SEQ ID NO: 617476 - DNA, 425 bp, Homo sapiens
atacggcacgctttatgaagtaccttatagtatcagaaaaataaaaatcttataattgtctaggacagcataagtatattgactctcagtggcttgggccagtcgtacgttgagggccctaaatcataaacaatctaggggttaatattccccaccaatggactatataggtccctatgagtgccctacatctacatgacaaaagagcgcaggaacatgagccaataccagactatatcgataatttgtcatccttaggtgggggtccttacaaacagtacacgcggcgaatctatgtacgatgcctgggcgaaatgagttgcagtgtacccggggagaacctacaacatacatgcatgggggacattcgtgcatatctgacacagacggcagggtagaggatcaggaggcactacggaccatag

SEQ ID NO: 617477 - DNA, 442 bp, Homo sapiens
tgcctgttagtagctgctgcactcaggccctggtcaacatagtgagacatcatccaaccaaaaaaaaaaaaaaaagaaagaaaaacagcttggataagtaaagacaagacatagaaagcaaagcaataacttttttttgtgtgtgtgtggagacgggtctcactctggcacccagattggagtgcagtggctcaatcttggctcactgcaacccccacctcagcctcctgagtagctgggaccacaggtactcaccaccatgcctggctaattttttgtattttttgtagaaatggggtttcaccatgttgcccaggctgtggtgggaggatcacttgaggccagcagtttgaggttgtatagtatactatggttgattttgcctgttagtagctgctgcactccagcctggtcaacatagtgagacatcatccaacaaaaa

SEQ ID NO: 617478 - DNA, 127 bp, Homo sapiens
tacacatgtcggctcctacacataggctccctcagcttcacacttactccggcagtcccctgcgatggcaacactcgtaggtgtcttgaaatcccaaacttgtctggactcccccgtactccctgcg

SEQ ID NO: 617479 - DNA, 462 bp, Homo sapiens
  misc_feature (12)..(12): n is a, c, g, or t
ctagtctcgagngctatcatttattctatattggtagcttattctgccagcgcccaagctgggggagatttttattaaaaataactttggttttaagaattccaccctcaatttttaaatactttccgttaagaacatttttccaagggcaagtacagaaaatcttaagtttggaaacccaatccattaaggctccttttctatttattatatcccctcaaacaggtcaagatttttcagattacaaaaataaagtcatgtgttatcgctcagaaggcaacgcttttactatgagactctaaacacattacctattttaagaaacacccgctgtggaaaattggatccattttttgtcaaagtgtgctttaaagaacttaattcttttcgacaccgccaaccctcgggggggggcccgcaccccaattttgccctaatggggaggcgattcacaattcaccg

SEQ ID NO: 617480 - DNA, 180 bp, Homo sapiens
aagtagagatggggtttcaccatattggccaggctggtcttgaactcctgacctcaagtgatccacccacctcagccttacaaagtgctagggttacaggtgtgagccactgcgcctggccccttccctcttctttaacaccaccttccatcccttatgtcgtcttctcgcaaacgtata

SEQ ID NO: 617481 - DNA, 453 bp, Homo sapiens
aaaaagaataggagaggaaagagataagagaagagagaaaggggaaaggaaaaggtaagagagggagagaaaaagaagaaagcggacaaagaagaaaggaagggaaacaaaaggagagcaagaaaggaaggaagggaaagaaagagagagagagagaaagagaggaagagagatagtaaagaggaaacgaaggaatgaagaaaagcaaagaaggacgaagaggggcaagggcaatctgaagagagaaagaagaacagaggaggagaaaagtcaggaagaataaggaagaggagagcagacagagtggtgaaacaggagaggacaagagagaagggaacaacatgacacaggtggcatgaagagaaggaagggatcagagtaggaaactctctctctctctctctctctctctctctctctctctctctatctctctctctctctctccgcgtg

SEQ ID NO: 617482 - DNA, 378 bp, Homo sapiens
tatccgaaaagctgcatgactaaaggaagcaacttctaataacagtggtgagctgagctgtatttttgttttttttttggtttttctctcaataaagaatttcatttcgtagtgtggaagcataacaagtgcctcggggtccccagtctgggtgctgtgaatggggttagtggtatctctaacattatgtcgggggctagatttcaaaacccaggtaatgaaaaagtcagtttacaagcctaatttggtggtctttttttttaatatatattaaaggtaaaaatgtggcttcaactatttattcacaggaggattcttcatataaaattaaccctataaaattcaacggcaagggtgctttataagggaaacatttta

SEQ ID NO: 617483 - DNA, 393 bp, Homo sapiens
  misc_feature (31)..(31): n is a, c, g, or t
  misc_feature (144)..(144): n is a, c, g, or t
gcagaagatccaccagatgctatggttgggntccaagcagaatggatgcagatgagttcacttgggactgttgatgctccaagtacgaacactcactctttgttatgcccttgaatcaggacaggagcatggggaaagctgtcncatgaaagaaacccacagtgggacttgaatgtcactgagtagaacagatgtcagtgagttcagatgaaacttgcataatgcatcacaatggagtaacagtagcatacttgaagggcaaatcaattttaattttagaaggtatcaaaataactactgttggaagagggaattagaattggacagcctactacgtgccaggcttttaatctaatactattatattttacattttacagaagtaaactgagg

SEQ ID NO: 617484 - DNA, 337 bp, Homo sapiens
gaggtatgctgcaccagggtagcgagttagaagcaagatatatttaaatatatattcatacacacatgtgcaagtatgctgcactgataaagaatgtaggctctggccaggtgtggtgactcatgtctgtaatcccagcactttgggaagccgaggcgggcggatcacgaggtcaggaaatagagaccatcctgggcaacacggtgaagacccatctctacttaaaaatacaaaaattagccgggcgttggtgtgcttggaccttgttaattccccagcttaaacttttggggagggcttaaagggccaggagaaatacgctttgaaaccctggggg

SEQ ID NO: 617485 - DNA, 349 bp, Homo sapiens
caggctctctaccggggctaacacacttagcgcagggttggttattagtacttgcctacatcattctgtatagcatatagtcttctcgatcattgggatccgggggtactggggggtcacatctgataggtcgtcacgattttaacttggtaatagggctgagtgacatggtaagaccccctgagaagggtcggcatggcgtaaataactggatggctagagatgatgggactagtgtcatttggcatccacagtttctgggcaggagcttaaaagagccacctctccatggggtgtgggttagtcacccccagaatacttaattaaaaaatccagtaaacccagccct

SEQ ID NO: 617486 - DNA, 214 bp, Homo sapiens
ccgggaaatcaataaactgagtcatattggaaacccctagagaagatcggagaaaatgggttcagaacgagcatttaatttaagtcagcaaagtcagaatttaaaatggggcaataccttgtctaacattttcttaaccctcaatttgaccctggacaacggtagtctagtctcctggaaaacatggtgcaaccagacatgagatgttggaagg

SEQ ID NO: 617487 - DNA, 447 bp, Homo sapiens
  misc_feature (7)..(7): n is a, c, g, or t
  misc_feature (134)..(134): n is a, c, g, or t
  misc_feature (207)..(207): n is a, c, g, or t
  misc_feature (387)..(387): n is a, c, g, or t
  misc_feature (391)..(391): n is a, c, g, or t
  misc_feature (398)..(398): n is a, c, g, or t
  misc_feature (436)..(437): n is a, c, g, or t
aaagganatgctcatcaggatttcagacagataagtctgataatcaaagtagtagaactcctagccacttggctaaaagtttcaaaaggcattcccagtccccagggaatggggaattgaaaggagcaggaaanacgttcatttggccgggcgcagttgctcatatctgtaatcctagctttttgggaggctgaggtgggcagatcnccagaggtcaggaattcgagaccagcctggcccacatggcgaaaccttgtctctactaaaaatacacaaattagccgggtgtggtggcacacgcctgtaatatcagctactcgggaggctgaggcaggagaattccttgaacccgggagacagaggttgcagtgagccaagatctcgccnccanactccancctgggcaacagagcgaagtgagactctgtctcaaaanncaaaaaaaaa

SEQ ID NO: 617488 - DNA, 333 bp, Homo sapiens
tgcatttcttttaatggcttctctagtttcaatgcatattgcataacaaacacaggaagtcctatatctttcagctcaaggaggctttctcttgtgtcctatattgctgaaagtttttattaccttcttttgtgtgtgtgtgtgtgtgtgttttgtgctttttggggtttttttttgaaacagagtttcgctcttgttgcctaggctggagtgcaatggcatgatcttggctcaccacaatctccgcctagtgggttcaagtgattctcttgcctcagcctcccgagtagctgggattacagacatgcaccaccaggcctggctaattttgtc

SEQ ID NO: 617489 - DNA, 467 bp, Homo sapiens
gtaatggccggaggcgtcaatggccttgatttattacagtgaaaggatacaaaacaaaatcagcaaaggaaaaaagacacatggggtgaagtcaggcgaaactaagtgcaagcttccaagaatcctccgccagtggaatcacagaggatgagcttaattctcccagcaaccagttgtaacagcacttgtgaaacactgtcaaccagaaaagcttgttagagactgagtgcctggggtttttactgggagctggtcacaaaggtagtctctgcctggcacataccaaaattccagactcccagaaggaaagcaggtgttcaggagaaactatattgttttacagtttacgatatagtaagctactttgatcagttctgggaatggtggaagccccctgaactccaagttcccagatgccaatcaagggccaaccttgtaaagcaggtctctaaggttaagtagtcagg

SEQ ID NO: 617490 - DNA, 144 bp, Homo sapiens
gcagacttggcattaaggcttttggatagctttgtgccaattggtcgtggtcagcgtgaccttattattggtgacccacagaacttggaaaaccttaattgctttttgacacaatcattaaccagaaacggtttcaattatggg

SEQ ID NO: 617491 - DNA, 175 bp, Homo sapiens
tgtaaatgtaagcctattagaagctacacagaaggacctaatttccggaacaattacaactatgtcatcgggctaaagttaaagagattaagactaagtgccatgatgtgaccgcagtagtggaggtgaaggagatctaagtcctctctggtaacatccacggacactgtcacct

SEQ ID NO: 617492 - DNA, 256 bp, Homo sapiens
acactcacagccagtccagcgacttagagagctcgagcgctatgtgcttgccggcctacgtaagaaaccccggaagccctacaccattaagaagcctgtaggcgagacaaaggaggaactggcttgggagaaagaagcgggacttagaaaagcgggtacaagatgtcagcggcacagctcaatgctactaaaaagccccccgaagaaagcgaatgagaaaaccagagtcatcctctgcacaacttgttcgcagatt

SEQ ID NO: 617493 - DNA, 892 bp, Homo sapiens
  misc_feature (8)..(8): n is a, c, g, or t
  misc_feature (77)..(77): n is a, c, g, or t
  misc_feature (139)..(140): n is a, c, g, or t
  misc_feature (142)..(142): n is a, c, g, or t
  misc_feature (145)..(146): n is a, c, g, or t
  misc_feature (151)..(151): n is a, c, g, or t
  misc_feature (153)..(153): n is a, c, g, or t
  misc_feature (161)..(161): n is a, c, g, or t
  misc_feature (219)..(219): n is a, c, g, or t
  misc_feature (222)..(222): n is a, c, g, or t
  misc_feature (225)..(225): n is a, c, g, or t
  misc_feature (229)..(229): n is a, c, g, or t
  misc_feature (232)..(234): n is a, c, g, or t
  misc_feature (245)..(246): n is a, c, g, or t
  misc_feature (248)..(248): n is a, c, g, or t
  misc_feature (268)..(268): n is a, c, g, or t
  misc_feature (276)..(276): n is a, c, g, or t
  misc_feature (279)..(279): n is a, c, g, or t
  misc_feature (282)..(282): n is a, c, g, or t
  misc_feature (287)..(287): n is a, c, g, or t
  misc_feature (292)..(292): n is a, c, g, or t
  misc_feature (295)..(295): n is a, c, g, or t
  misc_feature (297)..(297): n is a, c, g, or t
  misc_feature (302)..(302): n is a, c, g, or t
  misc_feature (308)..(308): n is a, c, g, or t
  misc_feature (380)..(380): n is a, c, g, or t
  misc_feature (472)..(472): n is a, c, g, or t
  misc_feature (480)..(480): n is a, c, g, or t
  misc_feature (512)..(512): n is a, c, g, or t
  misc_feature (533)..(533): n is a, c, g, or t
  misc_feature (552)..(552): n is a, c, g, or t
  misc_feature (577)..(577): n is a, c, g, or t
  misc_feature (582)..(582): n is a, c, g, or t
  misc_feature (584)..(584): n is a, c, g, or t
  misc_feature (596)..(596): n is a, c, g, or t
  misc_feature (599)..(599): n is a, c, g, or t
  misc_feature (604)..(604): n is a, c, g, or t
  misc_feature (607)..(607): n is a, c, g, or t
  misc_feature (609)..(609): n is a, c, g, or t
  misc_feature (611)..(611): n is a, c, g, or t
  misc_feature (617)..(617): n is a, c, g, or t
  misc_feature (619)..(619): n is a, c, g, or t
  misc_feature (645)..(645): n is a, c, g, or t
  misc_feature (647)..(647): n is a, c, g, or t
  misc_feature (656)..(656): n is a, c, g, or t
  misc_feature (658)..(658): n is a, c, g, or t
  misc_feature (663)..(663): n is a, c, g, or t
  misc_feature (690)..(690): n is a, c, g, or t
  misc_feature (708)..(708): n is a, c, g, or t
  misc_feature (760)..(760): n is a, c, g, or t
gcgggttnccgcccctttccccctggcctccacccggggggggtgcccgtcctccgcccgcccccgccccggtctcntctggcccctccctgctgtccctctgtggccggctcgttcccgccctccccgtgcgctctgnncngcnnggccngngccccggncgccccggcgcccgtgctcccccgtcctgcccggggccccgctcgccgcccccggttngcngcncccntgnnnctcgggtcccnncngcgtcttggcggggtggggngggcggcnggntgnccggngctgnccngnggcgnggcgcncggggggaggcgcggccgtgtcccgttttcgttggccgactgtggggggggattgcctgcgtccctctgtgnccgggtggcccagccagcccgtcgtccccacccagaaccgtgttttgggccgaagccgggagaggcagggggggggggggggggcagggggnccccccgngctctccgcgcccacccgctcctccgcacacngcggctcgcacaggcctcccncctctgcctgttgattganggagggagaagcccgtccccccctntcccntntcccctcccctntcntgcangcnangngccctntnggccctccctgtccccctcctttgtntngtctccccntntggtntggaacctgtttgcaagtgaagcaatntctccgtgttttgtatanacaaccgctcttgtagcctttggtttttgttaatgtagagaaacacagattntttatacactttgtaagatttacgccaaaccccagctttcgatttttttttttccctgtggcccctggggtgttgccccgtccccgtccccccgcccgttattgaaatgtataatttgacttcctgtacaga

SEQ ID NO: 617494 - DNA, 115 bp, Homo sapiens
gtactctcaggattatgtgctcaccaccctggcaggtggtactctctcctcctaattcggtttactatttattgttcggggtgttttttaatgtgtgttgggtggagagcgggga

SEQ ID NO: 617495 - DNA, 202 bp, Homo sapiens
cgctatttccttcgcgggaaggcgtggtgctgatgggcaagaacatcatgatgcgcaaggccatccgagggcaccgtggaaaacaatcccggctctgaagaaactgctgtcctcatatccgggggaatgtgggctttgtgttcaccagggaggacctcactgagatcagggacatgttgctggtcaataaggtgccagctgc

SEQ ID NO: 617496 - DNA, 88 bp, Homo sapiens
gctggtaaatagcagttaaattgcaactgatcaagaggtattcaggatggtgagtttggactgcatggctcccttctgtcgtcttctc

SEQ ID NO: 617497 - DNA, 395 bp, Homo sapiens
agctctgatgtatgtaagcatctgtgatcaccgttaggctgagtgtcaatccctccatcattacatagggtctggagtcattagcaccatgtgttagatgctcggctacagaatgatcgctccataaggcgtgcccactaatagtacacacttccgtgggccacatccaccctacagagtaatcccaccataacagggcagctgtcatcatgtaaggactgctcacgtgcagatgggcccaagaaagtggtcttgttcttcaaagcagcatgacatgaggatcctgtgtcatccaacagatacagcttagacagatgaatagcggcttccctgggcgcaggcagtcctacaattcataatagcaaacaggccctcgtgccgaattcttgcagccc

SEQ ID NO: 617498 - DNA, 142 bp, Homo sapiens
cccacccggctcaccttctttttctcactgcgactgttccttgacactctcttaactggcttctaaaaaatatgctggtgtcgccacttgaggagttatcagtctagggcattttctatggacttcccagttgctccgacgt

SEQ ID NO: 617499 - DNA, 560 bp, Homo sapiens
gtacagtatacgaatcgagccggtaccgacatctgtatgccgtgggtctctctctacgagctgagccggccgggatgttatgcccggctgtggcggggtacctactaattgtctgttccatgcggtcccctctttgtccctttttctacagtcttgggcataaaaacacagacacaaacagcttctctgtttgtattactaaggtttatttggtgcttctccaccatcctgaaacgatgcgatggtttataagcacatgtttgggggaacgcgtaggctgtccacctctgcctctcccttgtcggccttaggccgactgtgttcttgggattttgaataagtttcgcctaaggatttactcatttgctccaccatacgctatcgcacagtggcatactcatacaggccctagattttgacatgcagaccaaatggggtctggtgaaatgctccgagtttcttgtgggtacatgggttgtgctccgcgggctctggtacagttcttagtcgatcgggcctgcacttgactagagctgttcctatctccgggctagcatcta

SEQ ID NO: 617500 - DNA, 580 bp, Homo sapiens
gctaagcggcggatgcccgataaagcgcacctgtggaaactgcgtcagggccgctgggcgcggtggcacccggagctttttggaccgggcatgcagcaccgcttcggaggtagaggtacaactgaacagggcacgtggatcgaggcagatgcgctcgacaccgcgatcgcgcaacaggcggttgagcatgcgctcagcatcacccttggcgaagaactgttcatgacgcacctccacggccagcggccgatcaatgccatcgagaaatccagccagctccgccaggcgtggcggcgtaaagctcttcgagagctgcagccacagcggtgaaacgcgctcacccaaagggctcatcaagccgacaaaactttctgccgccggcaactgttcacgcaaatcgccagcatggctgatatcgccggggaatttggcggggaagcgaaaatcatcaggcatgatttcggcccagcgctgcacagtggcggccgaggggcgagcataaaaagtggtattgccctcaacggcgttgaagacctgggaatagagcccgaggtaatcgctggaacgtgccttaacggga

SEQ ID NO: 617501 - DNA, 1244 bp, Homo sapiens
aggggaacgcagagaaaggcacaggcgagaaatccaggtcgtccgagatgaaaagtcggaaaatgtttccagagcgcgccacaaacaggcgcgcgcgcgcgctatgcagggcgcatagtctctctgtctctctctcgcacacacacaaacacactcttacatgctcacacgtcattccacgacatggagcccacgcacgcggattcctagatcgtgcagggatcgacatgcctgggcacccaaagtgaacgcagagtagagcgggagccaacggagacacaaaaactaaaaatataaaaaaatgcgacaaaacaaaaacagacacacaacaccagagtacagacaaagcaaaaacagagaaaacacgacaacaaggcagccgagacgagaaaaagcgcgaacagagcgagccccaaacgccgcagcgagcgacgaaggaaagaaagccaaagaaaagaagagaaacgaaaaacagagaaaacaagaaagacgacagcaggaagcaaacacaaacacagaaaacaaagcagacgaccacaaccaaagaccacaatccaaaaacacgcaccacacacgaaaaacaagaacaacagaacaacgaccgaaacaaacgcgcaggagagccgcgaagaaagaaaacacaagacaggcaggacagacagcagagagcaacagaacagaaacgaagcacacaaaaggaagcaaagaagagagacgaagcgaccaccaagagcagaacagaaagagagcgaagcgaacgagagagaacagaggagcaagaagcacagaagcaagaggacgcgaacagaccaagaacaagccaagcggagcacgagcgagaaagacgaaagagaacggaaacagcgacaagcgagagcaaacagaaaagcgcaacggacgagacggagaggcaacaacagaccaggcgcaccaggcagagcaggacgaacaggagacaacgggaggcgccccagaacaaaggaaagaaagaacaaaagaaagaagaaaacagaagacagcaaggaggagaagagacaaggagaaagaaaagagaaaaaaaaagaaaagacagcgagaacgagagacacagcaggacagagaaagacgaaacgagacaagggcgagacaccagaaagacgaacgagaaagcggaggaagcgaaacaacaaggagaaaaggagagaaacaaaagaaaagaaagaaacagaaagggagacaaaaaagaggagaaaagacaaacaaaa

SEQ ID NO: 617502 - DNA, 455 bp, Homo sapiens
catccccggtatgtgtggtgttctggaaagcgttgttcgaaaatgatgacctatgctaaacatcgatctcgaaggtgaagttttgcaggcagccgatgaacgctgagacgtagcatttcttacagcgcgtcgaagtaggttggagagcgcatctcgactccgtccaaattgatgaataatcgtattttcggcgttattgagtttgtttccaattaaaacaatttatggctcttcttgtgaatataggttaacctcaattaaaaaaaaacacaaaaaaatccttagacatcctaggccgaactacgcttggttagatctctttacgaagagtacgtaggcagccctcatcgggttcaaccatactcagaactacgtctgacttgattccctggtgggatacgtaggaagcctcatcggctcagtcgctacattcacatgcataacaccacacaatt

SEQ ID NO: 617503 - DNA, 148 bp, Homo sapiens
gatgcgagttacagagaggtacccctttatcacaaggagtgacctgctgacagagaggggcaggatcacaagcatgaacatcacacactatagcagcagccatgattcagaaaaattatggctgcagccacggttctttcagggtaca

SEQ ID NO: 617504 - DNA, 1192 bp, Homo sapiens
  misc_feature (524)..(524): n is a, c, g, or t
  misc_feature (560)..(561): n is a, c, g, or t
cgcggtggctcacgcctgtaatcccagcactttgggaggccgaggcaggaaaattgcttgaaccaggaggcagaggttgtagtgagccaagatcttgctactgcactccagcctgggtgacagagggagactccatttccaaaaaaaaaaagaaattaattatctcatttcgatgtagtaaaaaaaaaattttctttaacattcttcataaaatgtgattaaggctattaaatataaagcttggatgagggtgcagataattttacaaaacagctgtattttggcaaatattttattattataaatgaaaatacagagttttaaaacggcacttaatctgttctctctctcagagtctgccaaataaatcagatttcttggaaaatattcaaacttgatacaatggaggcaaaattaactcttgtcaggtaagtcatttgccataaacgaaaggacccataactgcattaagcagagagggactgactgtcaatgaagcttctctatttgcaattaatcagcanaagccgacaattttcaaaagtctctatgcaaaattnnagtcaagttcaaagtctgatcaatttaaaaagcattagtttatttttaataaatggactgccctagattgaagatatagtctgttcaccatatttatcataattaccgagaattgaaaatcctgttgcctttgtaacacttgcaatttgggaaatcttacctaaattaaaggaaagggaaggtaatttgactcttgacttccaggagaaggtaaggccccatttaaaattttcccacgaagggggaaaaaactttttcaagttggagggtcccaagaggtttacgtggcctaaccccacttattttccggatttgaaaccgtgaattggccggcccggggggttaccctcggaatccaacattttggagcgccggccaggggacccctgggctcgggattgggacacactggcacaatgggaaaggctttttctcaaaaccaaattttccgcgccatgggggcactctataacacctccttggggtttgcgggaaatattttaccccgaggcaagtttttgggcccatatatcctttactcaaccggtggtaagggaaatctcttctaaacatataaccgctcttgtgaccgtcctatagggtgggtatcgcggcggcttactaccgtcgt

SEQ ID NO: 617505 - DNA, 189 bp, Homo sapiens
cgcgtccccgaagacgactccccccgtccgcctgaactcctttggcgtctattcaaaaaaagagaaactttctatctctaattatgttgatgaattttttatatcagttatccaatgattctataacgaatcgcaattcaaaattgcattaaaattatcgaattctaaaattctctcttatactcctga

SEQ ID NO: 617506 - DNA, 177 bp, Homo sapiens
atcacttaagccaggagatcaaggctgcagtagacatcgctgcactccagcctgggcaacagagcaagatcctgcctctaaaatatatatatatatgttggtaaaagggcaaaacctgatacacatattaatgacatgggtggattcccaaaggcattatgctgaaggtcttgaaac

SEQ ID NO: 617507 - DNA, 167 bp, Homo sapiens
attgaagatctcgggacaagatctgaccgccaccattgaaaacaacctgggtcatcctgtgagattgacaatgccatgggctggctgtgtgacgacttcagtgctcaatgtatagagatatgagcgtggcccttgcgcctagagctgtgtgaggcctgtacatcaac

SEQ ID NO: 617508 - DNA, 312 bp, Homo sapiens
ctccattcatggcagaagagatgggggacgggcaacgcaaagatgacccggggaatgatctgggaccatcatccttaggttcgccatccaggacatctccggggaagagacctcggccagggaagggctccttctcgggtgccagagaaagacagccccgtataagaaggtcaaggtgcagaacttccacatcagcgggaaggatggtctggcctttcaaggccctgtgatccaccgggcacagaaccagaagcgtgatggacgtatgacaaggctgaggcaaggacgacccgtgtcaccaaccgtgaacaa

SEQ ID NO: 617509 - DNA, 488 bp, Homo sapiens
tcctaaaataacttttaaatggccctttggtgtctggggtaatctggggggtgaaaaacctcctcatttccaatcccagtttttctgggtacaccctggttttggggccggctgccgccaagggttaaaggtggttccagaactggcccccaattttgacgcgacctctagaggggcagggcacttcacacccagtgctaggctccttcgcacggattaacgaggggccactcgtttaaaagccctttcacaagagggaacgaggctcatccctgaagtggggggaaaacagcccaggaaacggccgtgaactcctcattaggcgcgagggcccacttctattaagggggcgtggggggccacaggggggaagggagcccgtgcgtcgacacacagaggcgctgtggaaggcgtccccgaatatccccccccgggtgtaaaagagcaccgcgcgataagggcctcgcccacatgaactatgaccacaa

SEQ ID NO: 617510 - DNA, 264 bp, Homo sapiens
gatttttgataagaacatctgaggccaggcgcattggctcattcctgtaatcctagcactttgggaggccgagatggtgtatcgcttgagctcaagagtttgagaccagcctgggcaacatggtgaaaccccatctctacaaaatataaaaaaattagacatagtggcttgtacctgtagtcccagctacttgggaggctgaggcagcccagctacttgagctcaggaggtgaaggttgcagtgtgagattgtgcccctgcact

SEQ ID NO: 617511 - DNA, 1338 bp, Homo sapiens
  misc_feature (266)..(266): n is a, c, g, or t
gaaatcaatagtacttccgaactcctctcgagttaactcgcaaagacctatcgctagcaacatgtagcactgcagcgcagactgcgtactaagacacgctctcgagcacatgccagggacgacgcggttttgccgaagagctctcacggaccagcactacgcgagaagcacgtggcctcgcctgcccgtatacgtcgctataccgctaatccgagggaaaagcggagtggcacgtattgtggcgcatctgatcatagaggctaatncatgcaaggaattttttgggggcgtagcattcgtccacgacgcaccagtgcagaggacatggaatacctctacacgtgttgtgagctccttcgctgagggtgaactgcgcatagacataggggtcatgaaggcagacgcatatacatgtggtgtgccacgtatgtagctgtgcttgagagacgactcgtaagggggatacacatgtactatgaaagcggtgggggttccttggcactgttttccgccatcgagcaaaaggcaaggtgctttcattccaatttaacccaaagtttcaattggacgcactttctcctgaaccaaacacgatacagcggttgaagaaggactcccgtggagcgaagttaccaagttattccacccctaagtaatctttaatcaaggcacgcccaccttccctcaatacttagtcgaaatttgggacggggaaggaaggggaaaggggattccgatttgcccaggggggcaaggcggctatgaggagttagccggaccgtactgtgcgaaggacgcgcaacagcatataatatggagttcggacgaatggaaacaccctggtctgaatttgaaagcgggggtttgcactcctttggagcttgaggacgagggtggccatatgtctggaccacaaacttgtgcctgtggagctccgtaagccgataattcgtattctcattgaagttaggtaatttgggatggaaaaaggtttgaaccccctttgccaatttcgggcgtaccaccttcgtgtactaacacaatgccggaaatgcccttcgaactttacggacttttggcatcacttttggctaaatcccagggtggcgaacattgccaaggcctagggtgcgactaacccggggggggcgcatggcagaaagagggtaacccttttgaagcttcgaactatccgcagacaggttaactgggcatggggaacccctaggcttcataagtctcgtttgagacctttcttcacgcgaagatcgacaccgcagagacgttggagagtggtacccccgaattaggacagccaggcttgaacagcacgccacg

SEQ ID NO: 617512 - DNA, 85 bp, Homo sapiens
ctcaatgctttccccaaacttcacttcgattaaaacgtctctgtggaaaccatctttcaaaacttcttgcctcaaaataatttca

SEQ ID NO: 617513 - DNA, 745 bp, Homo sapiens
  misc_feature (5)..(5): n is a, c, g, or t
  misc_feature (85)..(85): n is a, c, g, or t
  misc_feature (96)..(96): n is a, c, g, or t
  misc_feature (112)..(112): n is a, c, g, or t
  misc_feature (139)..(140): n is a, c, g, or t
  misc_feature (145)..(145): n is a, c, g, or t
  misc_feature (156)..(156): n is a, c, g, or t
  misc_feature (166)..(167): n is a, c, g, or t
  misc_feature (182)..(182): n is a, c, g, or t
  misc_feature (192)..(192): n is a, c, g, or t
  misc_feature (217)..(217): n is a, c, g, or t
  misc_feature (231)..(231): n is a, c, g, or t
  misc_feature (243)..(243): n is a, c, g, or t
  misc_feature (246)..(246): n is a, c, g, or t
  misc_feature (251)..(251): n is a, c, g, or t
  misc_feature (262)..(262): n is a, c, g, or t
  misc_feature (298)..(298): n is a, c, g, or t
  misc_feature (305)..(305): n is a, c, g, or t
  misc_feature (329)..(329): n is a, c, g, or t
  misc_feature (331)..(331): n is a, c, g, or t
  misc_feature (394)..(394): n is a, c, g, or t
  misc_feature (399)..(399): n is a, c, g, or t
  misc_feature (403)..(403): n is a, c, g, or t
  misc_feature (416)..(416): n is a, c, g, or t
  misc_feature (428)..(428): n is a, c, g, or t
  misc_feature (430)..(437): n is a, c, g, or t
  misc_feature (440)..(440): n is a, c, g, or t
  misc_feature (457)..(457): n is a, c, g, or t
  misc_feature (477)..(477): n is a, c, g, or t
  misc_feature (611)..(611): n is a, c, g, or t
  misc_feature (634)..(634): n is a, c, g, or t
  misc_feature (741)..(741): n is a, c, g, or t
ggggntataggcaaggctgtagttgggggtgtgttttgccccactctgtacaatatagaagattctcatatagatactttgtatntaagccacgtntcctcatttgtgtccncttattggctggctgggcaggggaaannggggnaaaaagaagcnggggtgtttnncccggccccggggcncccccctggnccccttcctctggctgtcccctggnggggtcgctttggntccttggtgggngcntggcncggctccagtngccgggccaccttcccggttttctctttcccccgcncccgggncggcgggcctttcaacgtcgtgcncnccccgcctcccggtgcgttgttgttggtgtgctgcttttcactggcgccctccgggctgggcntggcnggcncctcaggtccgtnttctcctccggngnnnnnnnnctncccgccaaaaccatcangtcctccggtgtcaaacgcnccccctccaggccctcctggctcccctgcttcctgctgttgcctccgctcgagggcaatgcgcagggccaagtacttggagaggtggtccactgtggcattcccagttgtcttcacatacctcgtctggcagtnttctcccttctccacgagccccnggtggggccggaacacgagctcaatttctccacctggctctggggggctgggggcccaggagggcttggggggccagcgttccccctcccagagtccctccccggtnacca

SEQ ID NO: 617514 - DNA, 626 bp, Homo sapiens
taataacattattaaaaggagcactaaaggaaaactgtgtgcccagcatcatatcctaaggcatacggaatttggggaagcccccatgccatcccgtgaggcttccgtgtacagccacccaaatggtagggaggtcttgaagcccatgagggatttatagcatcttgaatagagagctgccaaccccccgggggcagagttgcacttttcccggctttttaggaagctctgccacagatgtgatctgatcataggccattagaactggaagaaacttcccaaaatatctaggtttgtcctcattttaccaatgaggaaactaaactctgtggaagggaaggggttgcctccaaagtcaccgcttagctgggccccagtggctcatgccgataatccccagccattcagaaagctgaggccggaggattacttgaggcccagactgggccaatatagccagacccccatctctaaaaaattaggcctggtggtgcatgcctgtattcccagctactcaggaggttgaggtgggaggatcacttgagccccgaagttcaaggctgccatgagccatgattacaccccggcactaccaccttggtggcaccgtgagaacctgactctta

SEQ ID NO: 617515 - DNA, 2037 bp, Homo sapiens
  misc_feature (284)..(284): n is a, c, g, or t
  misc_feature (1920)..(1920): n is a, c, g, or t
atgttgtccgtctctctgggtgtgttctctcttctggctgctcgctgctcctcttgtgtgtgtgttagtttgcttctactcgtgtgtcggttcactcctctgcttggtgtctgtttctcccgtctttccttgggtgcggtcccacgttgtgttctttcctctctcgcatctgttctgctgtaggtgtctctctcgtgatatcatgtgttgctcttgtggtttgcctccttaggttctttggggatgtgtctgtctccccccttacagagcgctgtttgatatgngcgttgtgtgtgttttcgtcacatctttgttgtcgtgcagagtcggttgtcgctttggagctcgtgtctcccatgttatgattggggggttgttccccaccttcactcttcggggttccttggttgtgactgatcgaggcgtggctttgttcggtcgggggtattgttgttctcctgctgttgtcatcaatgagtgttgctatccccccccattggtggtggatgtaaaagagggtttcctgttgagtgtactccctcattagtgggtgtgttccctactcatggttgttgtgatgttgtcgtccctcgtcgtgttcacgtctggtgtcccccctcttgttggtggggctcctccctctggtgtgtttgttgttcagagttatattgggagtcttccccctgcttcgttgtatgttgagtaattgctgtttgttgctcttttgtggggggggggtcttcttgatgtttgttccttcctcctgctgtgtgccccccccccctggtggtgcgggactatcttcagttggcttcacacctagcggaggtgggtttcccttgtgtttgttggactgagtagtggtgttttcgtggtggggacgggagattgtttttgttgaggcggccccccactgttggatgatggtggtggtcccaaccacctgttgggatgaggtcctctcctccacaggcttgttgtggaccctccaccaagtagtggtatgtagctgcagacgcgtggtggtggtgtttgtcgtggcgtggtgtgaagtcatccctaccctgcttgtggtattaggatgaattggtgtatatgatgagctacctctccccgctggtgatatgagtaaaaggagggtgttgttgtggtgatgtgagatataatacatttagggtgttcgtccacagcaagatccggttgttgttctactacagttggtgagtaaaagcccacacagcggtggtggtggtgatgagtagcttcccacgagggtgttgtctcccacgctcccccctcacatgaagaagtgtgtggtgatgtggcgctactcacgctctcgccccgcggttatgtgtgccgttcgtgtgcggggccctcgcgtgggtgaattccctcctcccactctcgcgcgtgggtgtctcctgcgcggctcactctcgcgcggtgtcgtgtgtgtgttgtgtgtggggtgtgtggggatgtgctctcgcagatgtctctacgacgacgttttgttgtgatgtcttcacgagcggtgctctttcggcgcgctctactactctctcctcgtggtagaacacccccgacggggtgtctccgcgcgctgtgtctccactcccacgcggtgctcttctcgcgcgctctctcgcgtgcttcttttggcgcgcgcgcgtttctcgcgctctctactgtctcccacgcatgtgtggcgtatgtgtgtacgcggcgtatcgcgatccccagcgcgcgtgtcgcgccgtaccaccgcgtccacgcggggtatgagtactcaccatacgtctcgcgcccacaaagtccacaccgcaaccgtggtgtggcccacaccacgaaagatataacctacacacacatccacgtatacgtgtaggcgcgcccccaccgcgagggcgccacccncgtgggtctgccacacacacacgacctgtgtgtgtgtgtggaagaagtgggagaggtgcacacacccaatgtagtgggccccaaagtgtgacggggcccaaccgtgctccccaagaa

SEQ ID NO: 617516 - DNA, 268 bp, Homo sapiens
  misc_feature (178)..(178): n is a, c, g, or t
cggcaacagcagcaattgttggcaaaaacgggcagggggagccttgcccagggtccgttgctcgcaccttgcttggtgaagcacagccagtcacggcggcccttcggtcttggcgggcaggagaagatcacccggaccaaggaggaggcccttggagcttgatcaacggctacatccnagaagatcaagtctgggagaggaggactttgagtctctggcctcacagttcagcagagccgccccgtgtccccccaggtgctggaggcag

SEQ ID NO: 617517 - DNA, 362 bp, Homo sapiens
cgcaaggaagtgaccccccgcaccgccctgctcactaggacagaacccccagtccggcccgcagactacctagctacagcttccacacccctggtggaccgacgggggagatcctagctcccaggagggatcacatctcacgcagctccttggcctcaaaccctaccagctcctacaaatgcacggataccaggcccatgtggggccagagcctcctgccgcccgtgtccacctctaatcaccacgggtgggctgcggataccccttccccaggaactgcggggaggagatacagaacggagccggtgcctccaggaccaggaacatcttcctcaacggcaaccgagagcggtccctgatcg

SEQ ID NO: 617518 - DNA, 117 bp, Homo sapiens
ccccccttccccccctttcccccccttttccttccttccttcctttccttggggccctgagccccctttggaaggtttagagaaacccaaatttaaaaaagaaaaaaagagggggga

SEQ ID NO: 617519 - DNA, 431 bp, Homo sapiens
  misc_feature (280)..(280): n is a, c, g, or t
  misc_feature (404)..(404): n is a, c, g, or t
ctacatattaaaaacggtttgccgtcagaaacctatattacttgcgcagaagccaacgaaatggcaaaaactgacagcgcacaggttgcagaaattgttgcggtaatgggtaatgccagcgttgccagccgtgatttaaaaattgagcaatctccggaactgagcgccaaagtggtagaaaaactgaatcaggtttgcgctaaagacccgcaaatgctgttgatcacggcaattgatgacaccatgcgtgctatcggcaaaaaataatatttcatatgtnccgcgtcgatgaatacgacgcggttttttagctaacggcgggatcagaacttatatttcaggcccaccatcactgcggtgtcattgtagcattatcacccagctgcacgcccacattcccaganggtggccgctggattcaggttccattt

SEQ ID NO: 617520 - DNA, 269 bp, Homo sapiens
ctgactctagcaggatctcacccgactagcccgacaggaccccattcatgcccaggtgtttcggaagtccacggcttgtggtgcccaggagaagggttgaagcgtggtggggcccactccccccacctggagtggcattgggcccacagctgcccatctctgggcctcaggtggaccagtggatctctaagggtctgctgtgccctttctatgcgtcctccacatcctatgatgtgcctgcttgttggctgctgtcgggctagtcgggg

SEQ ID NO: 617521 - DNA, 410 bp, Homo sapiens
tggcttggacccggcccagggctggcctctgtggcatggagtcactccagaggatcggaccttctccaggcatgagccaggaaagaaaccagccccggtacgggagaaccccaggattgacacctcctaggatggagacaccactaaaatgaagactctccaactgcggatactctaggatggggagttacaaggatccctaaaattcaaagcctcagctgggaaatcttcaggacaggactttcagagtgaagacaccacgggatgggaatcccagtaagaggctctctaggatagaagccctctggacatgaaccctaaaaatggcttcctctaggatgaggacgctaccccagaagggacctccagaatggtgactcccaaaataaaatctccagtgggacaccccg

SEQ ID NO: 617522 - DNA, 463 bp, Homo sapiens
  misc_feature (181)..(181): n is a, c, g, or t
  misc_feature (268)..(268): n is a, c, g, or t
  misc_feature (307)..(307): n is a, c, g, or t
  misc_feature (404)..(404): n is a, c, g, or t
  misc_feature (453)..(453): n is a, c, g, or t
aagcgcattcttcttccagggggcctattcttggactgcttttccttaatagagaaatctctctgagccaaaaatcgggcctcccccaaattccaatcttgtcggccccaactttttctgctccggagatttccaaagccaagtccccacttccttcctttcaagccaagttcgggcccgnacccggcgcccggcagggccagccctctcctccttcctgcgtggcgcagcacaggccctgagcgcgcgaccccaggccctggcgccnccgcgcatgctcgcggctggaagccccagtttgcgtggncttcgggttattccgctcaagagccgccgcgtcgccccatctcggcgcgaatctgaaagcgctttcgggggagaagatgttgggggcactggtatgnatgctggtagccggcttcctgctggcgtgccgccgaagcttggccgcgnagccccgaag

SEQ ID NO: 617523 - DNA, 263 bp, Homo sapiens
tgagccggcaccgctctcgtgagactcatccagataggaaatttctccttggcttttctgttctgggcccaggccacctgccgttgcagtggattttagccatatcattattttctgctgctcttagggtcaacagcaccctcagcactagacgcaaacatacaaccacacagctctcgcctgccccggaagattgctgggtaagttaaacagacgataaaatgcagacttcaaatatgtcagggtggaagcatttataattc

SEQ ID NO: 617524 - DNA, 348 bp, Homo sapiens
tgccagcagtggaattccacccttatttcacaggtataaacccccatttggcttccatatgggataccctctggttggcgggtaagatatagaatgtcccaaactggtaaactggtcagccatgtcaagttgtaaagcatcttgtaaatgacctgtaagatagccactgtggtgttccaagcatagagagtaaagtctcaggagaaatttaagaatggaaggcatacatgggtgataaaagtttcatctgttctgacgaattataaggtaaagaagtgtagatatcaatgaacgccagtgtggaaaacttacgcatcatatgtagagccatgataaggtggttctcag

SEQ ID NO: 617525 - DNA, 130 bp, Homo sapiens
  misc_feature (62)..(62): n is a, c, g, or t
ccggtgctgggagcgggatctcacttatctctgtgcagcttgtcctttcctttgtctgcgcnccttcggtctctgcatcgtccacactcctctttgctcctcagctctccctttccaacgactatctctt

SEQ ID NO: 617526 - DNA, 216 bp, Homo sapiens
gtgtatatattgtattgagattgctcggggaaataggttatgtgatcagagagtagaggtataggatgagtgggaagaagaaagaggagggaagttcgcctacaccgggtccatctgcggggtcagctgggggctgctgtatgtcttggctgcctgagacgaagaaaggtgacataggacttcatagccaaaccaggcacgtagacgattaggccc

SEQ ID NO: 617527 - DNA, 163 bp, Homo sapiens
gagccggtaccggcatgtgctgtaggcagcgagtaggtgaagtagggcaggcctcccgaagtgctgggattacaggtgtgagccaccgggcctggccattgcttgttattttctttttcttttctttcttttttttttgagatgcgctggcctacagcacatg

SEQ ID NO: 617528 - DNA, 724 bp, Homo sapiens
gccgacggacggagcgccccgcccccgaccggacagccgcccgccgcgccatgccctggggcagcagccacaacgcactgaagctgcgcttcccggccgaggacgagttccccagactgagcgcccacaacaacacatggccaaggtgctgaccccacgagactgtacgcggagctgcgcgccaagagcacgccgagctggctcgggctgtgacgacgtcatccagacaggcgtggacaacccgggccaccgtacatcatgaccgtgggctgcgtggcgggcgacgaggagtcctacgaagtgttcaaggatctcgttcgagcccatcatcgaggaccggcacggcgggtacaagcccagcgatgagcacaagaacgagcatcaaccccgacaacctgcagggcgggaaagacctggagcccaatacgtgctgagctcgcgggtgcagcacgggccggagacatccgtgggcttcatgcctaccccaccggactagcagcccgggggagaagccagagcaattcgaagaaagctcgcaggatggaaaggccacctgtacaagactgggacgggggacacatggggtggacgaatactacgatgcacaagaaccatgaagtgagtgggaaagaaacagatcagtcgaagacaaatacctcattaagaaaaggcggttttgccattttgtggacctaggaattgccaggagttggcgaagccgaga

SEQ ID NO: 617529 - DNA, 156 bp, Homo sapiens
acgtccatcactgtggtatcagtagttcttgtcacagtcatatatattcaccaacaacagtaaaaacccaggaaaaaaaatagaaacctagcggttgctgacactggagaggctactctcttgtcttccgtgcaggaattcccagcgttctcagca

SEQ ID NO: 617530 - DNA, 204 bp, Homo sapiens
acctctgagcgagtccacaaacacattaaacagctctcctcgtcctactctccaatttccaaagccagtgagtctcagttcccagtaacgttacctagaaatacacatacttcgttactcgtcttcatgttcacaaggtttacttaacagttaatttaggatacctgtcaaagctgtccaggcttatagacgtatggggaaaca

SEQ ID NO: 617531 - DNA, 298 bp, Homo sapiens
ggctagttttagaagtttgaatatcaaattacaggaacaggcagagaagacagaacaacattaagaacatgtacttgcatgtaggacaactcagttagaaaagtatagtgaactggatggaatctactggtatgataaaacctgctacaaacaccagtttagttgccatcaagtaagaaatttactggttttaagaaaaatccaaatgctggcatagtccacgaaaaatttaacaggtttactttactaattattataaggttgaaccgctgatgctattgaaacttctaaaactagg

SEQ ID NO: 617532 - DNA, 181 bp, Homo sapiens
  misc_feature (34)..(34): n is a, c, g, or t
catcctgggccctggccgatgtgcatatcaacanaaaaaagggactgaagaacatcggccatatcatccacacaagccaaatctcacacctttactttaaaccgcttaatgaatttcatgaccttgagggctaaagatcgttcttcgggcaagagcttttggactgtttttagaacagaat

SEQ ID NO: 617533 - DNA, 142 bp, Homo sapiens
gacatggtacggcatgtgcaagtggtttgctggggacgacgtccccgagccgtgttccttcctactgcgggcgcccagacacagggctgctaagtaggctaaggccagaggatctcactggggcgacgagcccagagcaagt

SEQ ID NO: 617534 - DNA, 151 bp, Homo sapiens
tagtgcaagtacctatggcaagagcattgacctagtacaataacacttgatcagaatgtcatgaacatcaaccaccaaggaagggatgggcacactggatacactctgcttgctaccacggtaaccttcgactggtacggtcaactggata

SEQ ID NO: 617535 - DNA, 848 bp, Homo sapiens
taggggatagtgtggggttttatcacgctactcagaacagtgtgcaatttaaaacaagaatcgtttatttctggaattttccatttaatattttccaaccacaattgaccggaggtaactggaactgcagaaaacaaaactattgttaaggggagactacctgtaatgtacttttcaaaggtacatacagaaacagtgtagtggggctggcaacaagagcaccagtataatctaccttagcctgtggaggccaaaaggaaggtcccccacacagttcacgcctcactccccaacaacatgggtagttccgggtcacacaaggcaccaaggtccctcggagcaccataaactgggagcctgacctaacacaattctgggcactgcaggggcctaacacattccctaagccctgtggtgaaaccttggcccaacttgggcaggcaagcaacacggcccggctcgaaggaatggcacaggcaactctaactcctggacacccctgggccaccggcggccgtccacacaggaccccagggacccctccggcaacacaggggacaccaacaacgacaacctcacaacagggcaaacgcaactcaaaaacggaacaaaattggccaccaggaacaaaggtcggcatatggacaatccacaggaaaaaaacgaatggatctccaaacggcgacagagccaataccccccaagtgccacacacaggaactacggacggaacacatgtcgaaagacattaccccacaccacacacacccaccccataatacaccgtactacaacgaaaggcacacccaggacacaccgcataatcaacacatcaacaaaacatccca

SEQ ID NO: 617536 - DNA, 91 bp, Homo sapiens
tggcccgagcctcaaaagcaggggcaatgttttttgtatgttttattgggcctaggaccctgtaaatggtcaataaatatttattggggga

SEQ ID NO: 617537 - DNA, 357 bp, Homo sapiens
aacggcatgttactacccagtgacaaacgcttcgcgcagttcatccacgtgaacaaactgctggagcagatgagcctgaatgtcatcggcaaatcagcgctctgagtgcaactacaaggaaccctcatgcccaagaccaccctgttcgacctcgatggcaagattgcgtttgtttccggcgccagccgtggcatcggtgaagccatcgccaagttgctggcccagcaaggcgcccatgtgatttgtctccatgccgcaatgctggatgggttgccagcatgtggccgatgcgatcatcgccgagggcggcaaagccacggccattgcctgccatattggagaaatggagcagatcac

SEQ ID NO: 617538 - DNA, 199 bp, Homo sapiens
acgtaccgagccgtcgtcgcggtgcttgagcttgaaggcgagatagccgatgccgccgaggcggtggaccgcatcacggtggcgctgacgaacgcgagattcagcagcagcgatgccatcaatagcagcctgatcggacgcatgaccgactctccctgtgagcggaggttggggggccgatctcccgccggtgccgggc

SEQ ID NO: 617539 - DNA, 172 bp, Homo sapiens
cgactctacaggatccttcaaacaccgcaatctcgggaggatcacttgagctcaggagtttgagaccatcctgggcaacatagtgagactggtctcttgaaaaaaaaaagtggctggcacttgtagcagagaattttatctacttctcaacctggttcagaatacccatttg

SEQ ID NO: 617540 - DNA, 148 bp, Homo sapiens
gtctccatgttggtaaggctggtatcgaactcccgacctcaggtgatccacccacctcagtctcccaaggtactaggttacaggggttacacccgacgcccggcggaggaaaaatttatgtgttaaatgtggctgggttgccaccatg

SEQ ID NO: 617541 - DNA, 176 bp, Homo sapiens
acgcgacgcataaaaattgatacgtaatgaaaaaaaccactttcagtggggcactgcagcttcccacaatctgagttgggatcctggcccccaacctgaacatcgtcttgaagacatggaacaggctctcagcccttctgttttcaaggccatcatggagaaactggagatgttca

SEQ ID NO: 617542 - DNA, 1514 bp, Homo sapiens
tcccttctaacactgttatttgggaggcttctttcgtggtggatttgtgagaaagttatacttcttgagtgtgtttatattaaagtttttttctccaaaagttaaaaaaaaaaaaaaaaaaaaaaaaaaaaaaaaaaaaagaaaaaaaaaaaaaaaaaaaaaaaaaaaaaaaaaaaaaaaaaagaagaagaaagagagagaaaaagagaaagaaaagaagaagataacaaggaggagaggcagaggacaaagaacacgggccccacaaaggagagcgaggacgcaacaaacgcggaagacgcgggaacacaaacatcaataacaacaaaacaaaacgcacaaccaaaaaacaccaaaataataaaaaatacatataatcactttacacaaacactaaaaacacaaatttataatcaccacaaaacatcatcaaacaaaaaaaaaacaatcatcatatacataacaacatcgccgcaaagacatacaaagatgaacagaagctaagaaaatgaagaaaaataagaggcaacagtaagaaacagacacacaaaaaagagacaaaaaacaaaagacacagcaagaaaaaaaacataggaacgaagaacaaagatacacaaacaagagcgcaagaaaaacacctgaccagctggcagcccaagcagcaaacgaggaaaccaaccgcaaaaaaacagaagatgagagagaacaaagaaaaaccgaagcaaagaaagaaaagagaaacgaaaaaacacaaaagcagacagacagcaggaagacaaaaaacgcggacacctacgagagcagaatgagaggaggagaccaagagaggagaagcacaagcagagcaggagagcacacggagagcaaaaggagacaaaaaagagaccgaagacatcgcgaagcgcaagcaagacagggaggagcaagcagggaacgcagggcaagaacgagccgagcagcagaaggaagcagagaatacaactaggacgacgacacacacgccgcacgaggaacaaacaacagaagaagaaagcgaacagacgaaatccagaagaagaagacaaaccagaccacgagccagaagcgcggaaccacagagagcaggagacacacaaagacggagacagcgcaccagccaacaggagaaaaacagaggaggaagacgagcgcaaacaagaagaacacaggacgacgaaaaaccaacgagagaacggcgacgtaacacaacaagaacaacagaagaagacacaaaaccagaacaagacccagcacagaaaagacgacacaaagagaagaccacgaaacaaaaagcgacgagcgcaagagagaaaagagaacaacagccaagcgaaaagcgataaaaaagaagcacagacgaaacaacacaaaggacaagacagcaaagagagcgccgaaccaacagacggaaccagaatgagcgagacagaagacaaacgaaagcagtcacagagcaaacaaagaacacaagagacacacaaagcacacagaacacg

SEQ ID NO: 617543 - DNA, 321 bp, Homo sapiens
acctccataatgtgtgcccaggctaaatattttcaaacagagcattaaaacttttatttagtggccaatacttacttagagagatacatcttatatggatacatagttctatatagggaatacttatttaaaaaactcatagatcaataatgaaagtgtaatggcacctggatgcggtgtctcaagcttgcaatcccagcactttgggaggccgaggcggatggatcagttgagctcaggaatgtgagaccagcctgggcaatgtggcaaaaccccgcctctacaaaaaatacaaaaactaggtgggcacacattatggag

SEQ ID NO: 617544 - DNA, 124 bp, Homo sapiens
gataatacaacattttttaactctcatttgataacctactactaatcactagtaccacatatgggtaatgaccacaatttactgtgtgtttattgcacatccaatatcttgatctatagtctcc

SEQ ID NO: 617545 - DNA, 592 bp, Homo sapiens
cattgatctatctaaacccggtggggagaattatccccacattgtctcatggaaagactcaacttgcaactgtgccctccacactatccttacttctgtctccactctgataccagagtgcagccatgcagacggttattccagctctggtcacccgactcctttcaccaaattgctcctaactggaagatctcactttccccttgtggggtaggaaccgaatgccagtgggagggatgtgcccctgaccacttaacgactgttttttttttttttttttttaaaaaagtggagtttgtctggggcggaacatgcacccaatgtgtgaaacagacaaaatttgctttacaccttgttaggtgtaaaggtggccactagtgaactccctagtgttttgaaaggagggaggcaggcgttgcgtttcagccacaaaatgtggggccttatggaagacagcaggagctcatttcctctgcactatttgggctgttagcacctgtgttgtgtgtttaaaaaaagagaagtcagtgctccacttttggtatttaacatattaacaaatgattccactgcaacaaaaaaacacaaaaag

SEQ ID NO: 617546 - DNA, 357 bp, Homo sapiens
cggggtgaaatgtactgtatgtgcaggatacttttattgggaatgaaaaaaaataagagaactattccaaccctttgtaattttgcttttaaaaggtagtttatttctgtggtctgtgagagcaacagtgttgaggaaagttacttctgaaagctactaaagtttcttcctctttttcttcttcttctttttcttttcttttcagatagagattttttataaacatcacactgcagaacctttatttaccttttgaaaaacacataaaaactattgttggataatgttatcttttgagaactttctgaccccaaagctatacatgccatatatacagattaataaaagtttaaagca

SEQ ID NO: 617547 - DNA, 371 bp, Homo sapiens
  misc_feature (101)..(101): n is a, c, g, or t
ctgatcaccaccgggactgggctgctggcacgtgctggccatatatcttcacatgcacaggtgctccccgtctcttgggcacgaatgaaatccccacgtgnccattacgcagccgcttcagcaaacagggctcctcccgggccgatgtgcgggaccaccagtggccgtcagcaggctgaagatccgtctctgaagatgttgatggggattgtcgggagcaggagccgacctatagggtggggacatacgcattggcagtcgtcaccgtgtaacccgaagcagtgaacgggctggctgggaccgtgctggtccattgtaccttgactacgactgctggtagtcccccgggcagcacaaggcaaggtagggac

SEQ ID NO: 617548 - DNA, 208 bp, Homo sapiens
atgtgacatggcttgagatgattgacaagcaactgttctgagtatctgatacagcaggatgttcagcagtaaggacagagtagcagacttcaacaggcctgaggcatccttgctccttcagtcctgggacaatcagggccgctgacctgctttatgaagggtccagagctaaaggttggtccccggtggtgggccagaatccaagccg

SEQ ID NO: 617549 - DNA, 697 bp, Homo sapiens
  misc_feature (567)..(568): n is a, c, g, or t
  misc_feature (690)..(690): n is a, c, g, or t
ccaatgacgcaggcctgattttggcgcggtttgcgagaattagccgatcaccgcacagcgagctggaccgattgcacaatgtcatgaagatcaagatactcttggatcaactagatctggtccgtgtctatgaataaatcaacgtgcatcggtatctttctagtaccctctgtaaagcatagccgactggtgatcatgcgagagcatgagcagacacgtgtccatgagcgaaccaggatcctgctatcagttggtatcagctacaacagtgttcacgtgaatgagggtaacaatggcaacttgcaggtggacacatcatctgctaggacagtgaccttggcatgctgtacaacgatctgtgcgcatggtatacttgagtcaacagatcgtccatgctgacgcgaggccctgtagggagacgggccactacggttctggggtgcgaggcttcagcagttctatcaaaggcagctgcaatcgtttcaccgaatttcgactaatatgcttatcagactgtcacggatcgaagatgcggttaacctcagcaatggaatgatacttgagatnnagggcaagtgttggcacggatcaagtttggaagaattagatcaaggccattaatgtgaacaatttccctggccacctatgtagcgacaaggcttgtaacccaaatggttgcttcgatcggcncccctcc

SEQ ID NO: 617550 - DNA, 342 bp, Homo sapiens
  misc_feature (43)..(43): n is a, c, g, or t
  misc_feature (107)..(107): n is a, c, g, or t
  misc_feature (130)..(130): n is a, c, g, or t
  misc_feature (148)..(148): n is a, c, g, or t
ggcacgcaatcactagcaagctctcaggcctggcatcatggtncattttactgctgaggagaaggcctgccgtcactagccttggagcaagatgaatttggaagagnctggaggtaaagccttggccaanactcctcgttttaccctnacccagagattttttgacagctttgaaacctgtcgtctcctctgccatcctgggcaacccaaggtcaaggccatgcaagaaggtgctgacttcctttgagatgctattaaaacatgacacctaagccgctttgctagctgagtagctgcactgtgcagctgcatgtgatctgagactcagctctggtacgtatg

SEQ ID NO: 617551 - DNA, 802 bp, Homo sapiens
  misc_feature (268)..(268): n is a, c, g, or t
agcgggggcggggggcgccagggcgcgcagcggtgaggaccgtgggcacgagctcggcgccaaccaccgcgggactgcccagccagccccgcggcggggcaaccgcaggagcccctgggcctgtggtgcggggcgtgtcatgctgggcacatgcctggggcgcagtaggaaggccctcaggtggaaagctaggcggaggacagttatgagacatctaacggacattccgcatgatggttctgggacacggagggccgttcgtcggcangtagatccttggacagaagataagaggacgcagaacgcggatggccatcaaagtgctttgccacaggaggccctgtgagggcaaggacaggcgaagcatggatgaactgacgatggctgatcctggactgagaatcgagtcactcactaacattgttggccctggatgacattctattgagagtgggggcctactctctactcgtcatctgtagcacggtaggtagtcgtcatggggagctcttaggactcgtcttgtggaagaaggctactgacactggagcgggactgcctagccaggctcatcgttccaggtgcgtggatgctgtgaccataccgtgcatgacctgggacattgtatcaccgggagtctcagaggccatgagaatctagcgtgtacgtacgagccctggtatgaaagaactccacagacatcaattgatctctcgacgtttggccctcttccacgattgggagggaccctgggcaggtgtgctctccaacggcgtgtggaaactccgggatacgtggccct

SEQ ID NO: 617552 - DNA, 126 bp, Homo sapiens
gattgctgcaaccttggaaaataagcaaccaacacagaccatttaaccacggtactctacctccagcttgctatttgttcaaggtttcagaccttggggaaaccaattttctgcctgcagaactga

SEQ ID NO: 617553 - DNA, 337 bp, Homo sapiens
gggcccttggcgctgacgatacccccccccaccgaatggtcgaagccgaacggcgaaccgatggccagtacccactcacccaccttgagcttctcgcaatcacccagcttcacgatcggcaggttcttgccctcgaccttcagcagggccacgtcggtacgcgggtcggtgccgaccaatttggcctgcagctcgctgcggaccgacaggcagacgatgatctcgtcggcgtccgcgaccatcgggttgttggtcagcacgtagccttcactggcaaatgataagcccgagcccagggactgcgcctcgcgctggacgacaccgtgtggggagctct

SEQ ID NO: 617554 - DNA, 340 bp, Homo sapiens
ccactggtgccaggagtcgtaacagcctgggcaagtgaggatataccgtctctgcacaaatttagaaaggtgggtcgggcatggtggcttgtccatgtggtctcggctgctggggaggctgaggtgggaggatcgcttgagcctgggaatctgaggcaacagtgggctataatggtgccactgaatcctagcctgggtgacagtgagaccctgtctctaaaatgaaataaaataaaaatccagctataagagagacatctgaaatatatgaagatgttgaaagtaaaacaatatgaagccacttatgcacctatgcaaattcttggatgtcgggaggcga

SEQ ID NO: 617555 - DNA, 868 bp, Homo sapiens
agcggagtcgcctgcgctcctcagcctgacggtccgcctttcggggctcctcagccttgtcacccgctcttggttttccttttctcttcatctttggctcctttgaccactcgaagccgcgcagcgggttccagcggacctcacagcagccccagaagtggtgcgccaagcacagcctttgctcctcctggagccggtcgggaactgctgcctgccgccatcatgtctactgcaaatcctgaaactccaaactcaaccatctccagagaggccagcacccagtcctcatcagctgcaaccagccaaggctatattttaccagaaggcaaaatcatgccaaacactgttttcgttggaggaacttgatgttaggatggatgaaactgagattagaagcttctttgctagatatggttcagtgaaagaagtgaagataatcactgatcgaactggtgtgtccaaaggctactggatccgtcttcatttcctaatgaccgtggcatgctgcccgaagatacgtagaatcacagatacacatttccatggtacaaagcctgaacgctgggccctgcaatcaggaaacaaacattcatgtgccttatcatgtgcagccacgtcctttggctcctaattcatcctcctccaccacagtcccagaatgtctggactaatccaaacactgaaacttatatgcaagccacaacacgatgcaatcctataactcagcactgtccaggcctatcctactttacccaaattcacagttcaggtcatcactggatatccagttgcctgtatataaatgatccagaaagccaccacagctggcctgtaggggacccaacgaccagctcgccccccgcccaca

SEQ ID NO: 617556 - DNA, 186 bp, Homo sapiens
ggcgttcatgttgccatcctaaaagcaccccagttctctctaaggagactggcccagtcctctcccaagtccacacagggtagatgatagcatgcttccgtgtcacacttatgtaatgcaaaatttttttactcttcgccttaatacttttttttttttttttttttttccctggggggtgggctt

SEQ ID NO: 617557 - DNA, 122 bp, Homo sapiens
tcggtctgagtaactggttgatagagcgagactccatctcaataaaaaaaatgaaactacagttgattttttcggcgttcactgggtaccagtgaacacaaaaattcaactgtatattccct

SEQ ID NO: 617558 - DNA, 287 bp, Homo sapiens
atactatcatgggatagacctccctgtacttctagtacccattatcctgatgtctacctgacttgggaaatctttgtcaaagctaggagtatattactacgggtactcacctccctataaaaggggagcataccctgtggtacttcctccctcaaagaggtgacattatagggtaataccttgggagaccccaggaaatgagatgcaattagccgtgggctagtggagagacaggggctcttggacttactatagattgaacttgtaggtctgagccatcatgggca

SEQ ID NO: 617559 - DNA, 989 bp, Homo sapiens
ggccgcacccgccgcggacggagcccatgctgcggggcgaacctgcgcgcccccgccccctgccccggcccggcctcggccccggccctggacccggggcagtcgcgcctgtgaacggctggggcaggagacccgtgataggaggaccccgggaacgcaggacccatgaacgagcgaaagacggacatatcacgctggctggctggtggatgcgcacggaaggatagtgtagcacagagatgagatgtagcataacaaatagaataagagaaaaaataaagaaggagagaatgaagaacacaaacatataggaggcaataacatacagagaaaaacaagatgtgtcatatgatgagagaagaagatgaatgagtcggagcaacaataccatggaaataagacagcacgagacacaacgccaatggaagcatacaatgaaacgcactgacgagacaaacacaagataacgaaagacgacaaacacagaaacaaagagagacctatactactaagcatgatggactagatacgaggcacaatacacagacaagcacaagcacaacgatcaatctaagcgacagagaacacaacaaaacaacagccacaacaaccacgccgaaacaacaaagcaccacccacaacacagcacaaccaagcagaaaggacacaagactacagcaacaactagccccacaactgagatgaacatcgcacggatgagaaacacgacaagactgatacaccgaactagaaacaacaacacggccaaggatgcaacgacaaaaacaatacaaaaaacaggaatccaaaggagaaacaccacaacatacacaacccatagacacgacaacacccacaataacacgcaaaatagacacacacaaaaaagcaaaataaagcaaggcacaacaaggacaacgacgacacagcgccagaaacaacaccccaaaccccagatatagagagagggcaaaggaaataaaagctcg

SEQ ID NO: 617560 - DNA, 316 bp, Homo sapiens
ttttttttttttcagtaaaaacgggttttctccaccttggtcaggctgttctcaaacttcccacctcaggtgatccgcccgcctcgtcctcccaaagcgctgggattacaggtgtaagccagcatgcccggccttttttcaaatcatttgtaaagttaaggtctccctgttgcccaggctgatcttgaattcctgggctcaagcaatcctcctgcattggcctcccaaagtgttggaagtacaggcataacccactgtgccccggcattagcctgttattattaagaggaatcttatgctgtcaactaaacatatt

SEQ ID NO: 617561 - DNA, 325 bp, Homo sapiens
  misc_feature (38)..(38): n is a, c, g, or t
  misc_feature (71)..(71): n is a, c, g, or t
  misc_feature (96)..(96): n is a, c, g, or t
  misc_feature (198)..(198): n is a, c, g, or t
  misc_feature (223)..(223): n is a, c, g, or t
  misc_feature (227)..(227): n is a, c, g, or t
tcgatctagaggatcccgttggtcgatcactgtactangcgcgacggcgcgcgtgggggggattgagggantgcatcggacgcgcattgtagcggngcgatgtcgcagccacatcggcgataatgcgccaccgctccggttcgcgtgccccgccgatggccaaactgtatttctactattcggcgatgaacgccggcnagaccacgaccttgctgcagtcggngcanaactatcgcgagcgcggcatgcgggtggtcatcctgacgccgaagctggaccaccgcgccggcagtggagtacagtgatcgaccagggtacctgagct

SEQ ID NO: 617562 - DNA, 161 bp, Homo sapiens
agacaaacctcatatgcagacttatgaagttgaccttaataaatgtggccccatggttattgggatgctttaatcaagattaagaatgaggttgactctactttgaccttccgaggatcatgcagagagggcatctgtggctcttgtgcaatgaacatcaa

SEQ ID NO: 617563 - DNA, 402 bp, Homo sapiens
ccgctcgacatagagtttagctcttactgcacaggctggagtgccgcctcccaggttcaagcgattctcctgcctcagcctcccgagtagctgggattacaggcacccgccaccacacccagctaattttgtacctttagtagagacggggtttcttcatgttggtcaggcttgtctcgaactcccaacctcaggtggtccacccaccttggcctcccaaagtgctgggattacaggcgtgacgaccacacctggccacactggtttaaaacttaacacagtctgggagcagtggctcacgtctgtaatcctaatactttcagaggctgaagtgagtgaatcacctgcggtcgggagttggagaccagcctgaccaacatggagaaaccccatctgtcgacg

SEQ ID NO: 617564 - DNA, 372 bp, Homo sapiens
cgcgtcgaccccgtcctgtggtctgcctcagtttgcctctgtctctctctgtctctgcctctgcctctctctgtctctgtctctgtctctctctgcctctgtctctgtctctgcttctgtctctgcctctgtctctctgtctgtctctgcctctgtctctgcctctgtctctctctgcctctgtctctgtctctgtctgactctgcctgtctctctctgcctctgtctctctctgtctctctctgcctgtctctgtctctctgcctctgtctctctgtatctctctgcctgtctctgtctctctgtctctgtctctgcctgtgtctctctctgccgtcgacccggccgcgaatttagtagtagtagtcgacc

SEQ ID NO: 617565 - DNA, 352 bp, Homo sapiens
tcctgtaccctctctctcggaatctgaagagccagatttaggccgggcaaaggggctcacccctataatcccaggactttgggaggccaaggcaggaggatcacttgagtccagaaattcaagacccgcctgggcatcataatgagaccccatctctacaacaaaatttaataaattagctgggcacagtgttcacacctgtagtcccggccactcggggctgaggcaggaggatcactggaacctgggaggttgccactgcagtgaactgtgtttgcaccactgcactccagcctgggcaacagagtaagactctgtctcaacacaactatgaaaaagaagagagaaacag

SEQ ID NO: 617566 - DNA, 313 bp, Homo sapiens
  misc_feature (7)..(7): n is a, c, g, or t
  misc_feature (87)..(87): n is a, c, g, or t
  misc_feature (100)..(100): n is a, c, g, or t
  misc_feature (114)..(114): n is a, c, g, or t
  misc_feature (168)..(168): n is a, c, g, or t
  misc_feature (191)..(191): n is a, c, g, or t
acacagnggccctactgaataaataagataaaggacggccgacacggtgctcacgcctgtaatcccgcatttgggaggccaggcagncggatccacaagntcaggagatcaagnccatcctggctaacatggtgaaaccctgtctctactaaatatagaaaaaatcanccaggggtggtggcaggtgcctntagtcccagctactcgggaggctgaggcacgagaatggcgtgaacgtgggaggcggagcttgcagtgagccaagatcgtgcaaccgcactccagcctgggcaacaaagcgagactctgtctc

SEQ ID NO: 617567 - DNA, 809 bp, Homo sapiens
  misc_feature (156)..(156): n is a, c, g, or t
ttcaattcttggaggctccctcgggcacctccggtaccgctgctgccaccgtggcccccgctgggtgggttgaggaggatttgggacaagctatctacaactgcaggttctgctattcagctatattctgccccaagcgcaacacagtgcactacntggacttcttggtgtgcgtactttcagtacacgaaatggcttgttggattctatggatacctggatgttgggtcacaacgaatccgggtgaagctactcacgtgggttgtagcgctacgtgcctcctgtggaacgtggcacgtgccggatctggcagcgcatttaactacacacgcacgcgaggcatgtcatacaccttagcgattagaggcttggtacctcctctcagggtcgagacccctcacaccacaagtcgtacctgagcccgagtccgagacccacgtcgtgagtcaacaattactgcagaggtcgcctctcttgcttggctccaaacgccctgtctggagtacgtattgagaagagtatgcctatttttaggcgaaagagtcggagaatctaacgtggcttggccatttgctgtgtggcacaccacgtgtaaaacacgcggtcattgtccaagcaactaaatattcccagccagtgggaattcacacaagaaaaatccccttttgccgatcttagggctagtaaggtctatagttgcattgccctagttaatcacatgatgtacctgatggggctcgtggtgaccaagtttttcaacgaaagaaaggaatgcagagattgcgaagcccaataacaacggttgggta

SEQ ID NO: 617568 - DNA, 1116 bp, Homo sapiens
agcgggcttcccattcgccatgcgccggggggtgagtgcccgaaggttgcatgatggaattgaacatgacttcaagaggttgggtatacgggatgagttaatcgggtgatgtcctctgctgactgtgttcttcggatgcattgttaggtgtgctacttgagggattaatatgcacaagagatcacaccatggactacaaggaaaggtgccccaagatgtaagaattccccagctccagatgaacacagagagaatagaagaagaggttgactgtgttataaagttcatggttgtcagtgggaagaagtgaagtggcttgtcttcaggagatatgcagagttggataaactttataagaatttgaaaacaaacagattatcctgctatggcccgtgcaagactatcctgccacagacgacaatacactccggtgctacatcttgatccagatgtcgatttacacgaaagacgagccagcgactaaaaactgaaatagcattccagcaagctacggttaggtatcacaggaacgtctgcattaatcccatcccagaatgctcacgaggcactaccctgtcaacaagtgggcacaaggtcgcacagagagcagcccacgttacagaaataccagtcctgaacggattgcacggcactggagcacgcgtaacggtaccctcaagccacaggcgtcacaacctcacttaaacatctagacagcaaacacttcgaaccacttggtggcaccctgttcctggcaaactccagctccagtggccccaacacacccccaaaccaatcgccccgccgcatggacatcccccgcaacaaaaacgatcaaatcagggaacagcacagggcacgcccatcacggcgcaaagggactccctccccactgggccaaacaacgggccaccacaggcgacatgggaccgccagacagacaagccaaggaccgaaaaaggggaacgcaggaaaacacaacaagatacctacaaaccacacaagacacgccacgaaccatacgataacaagggccacagaacgacaatcaggagcaccaacgcacacaaacaaccacaacccactcccgcagaaggtgaggagaccgacacacca

SEQ ID NO: 617569 - DNA, 443 bp, Homo sapiens
  misc_feature (15)..(15): n is a, c, g, or t
  misc_feature (95)..(95): n is a, c, g, or t
  misc_feature (162)..(162): n is a, c, g, or t
  misc_feature (165)..(165): n is a, c, g, or t
  misc_feature (177)..(177): n is a, c, g, or t
  misc_feature (182)..(182): n is a, c, g, or t
  misc_feature (200)..(200): n is a, c, g, or t
  misc_feature (217)..(217): n is a, c, g, or t
  misc_feature (230)..(230): n is a, c, g, or t
  misc_feature (242)..(242): n is a, c, g, or t
  misc_feature (282)..(282): n is a, c, g, or t
  misc_feature (287)..(287): n is a, c, g, or t
  misc_feature (300)..(300): n is a, c, g, or t
  misc_feature (310)..(310): n is a, c, g, or t
  misc_feature (330)..(330): n is a, c, g, or t
  misc_feature (345)..(345): n is a, c, g, or t
  misc_feature (356)..(356): n is a, c, g, or t
  misc_feature (427)..(427): n is a, c, g, or t
aatcagggcctgcantcgaaactacaggttatttcaggctccttacttgtaagttaacaatgttaacagcatatttttactctgctttgtcaagncccccatggtgggaatgtcgtcatggatgaagaaagcagttaaatgcaccttacacttgcttaaaanatnatacagctaganttccnactgcaatattagtcttngaggccaataccaaatntgagagatttgcngctttgataagngatgttatctccagattcttccctgttccatctttttggngttcntgccagattttgngttttctttngctttgttttttcttctttnagaataccatgtttnccactagggancagctctctcctcccccagtccaacagatttttttttgctgctattgctttgggaaaacagaattttttgngcttagggggaatgtg

SEQ ID NO: 617570 - DNA, 219 bp, Homo sapiens
  misc_feature (5)..(5): n is a, c, g, or t
cgtancgacaggcacatcttaatgcacagccacaagttacaatgcaacagacatgctgtacatgtacgaggtcaggaacctttgactgcttccatgttggcactctgcccctcctcaagagcaaacgccaatgttgggtgaacggctgtttcctcttatacaagccgtgcaccctactcttgctgataaaatcactggcatgttgcctttcggagaaga

SEQ ID NO: 617571 - DNA, 216 bp, Homo sapiens
ttccccgcccggtgcgctgcccctcagcaatcttaggtggttgattttactctgtgaaggttctgatttttttctgcgtgctggccttcttagaagtgccttgttaatgcctatctgtgtgcttttaacgtatttcatggaccactttatactagattcgatgggctcttctggattttttcctcttttgtcacatgtgtcttgtgatttatcatc

SEQ ID NO: 617572 - DNA, 737 bp, Homo sapiens
  misc_feature (2)..(2): n is a, c, g, or t
  misc_feature (72)..(72): n is a, c, g, or t
  misc_feature (74)..(74): n is a, c, g, or t
  misc_feature (87)..(87): n is a, c, g, or t
  misc_feature (97)..(97): n is a, c, g, or t
  misc_feature (104)..(104): n is a, c, g, or t
  misc_feature (120)..(120): n is a, c, g, or t
  misc_feature (130)..(130): n is a, c, g, or t
  misc_feature (140)..(140): n is a, c, g, or t
  misc_feature (148)..(148): n is a, c, g, or t
  misc_feature (196)..(196): n is a, c, g, or t
  misc_feature (240)..(240): n is a, c, g, or t
  misc_feature (288)..(289): n is a, c, g, or t
  misc_feature (297)..(297): n is a, c, g, or t
  misc_feature (301)..(301): n is a, c, g, or t
  misc_feature (360)..(360): n is a, c, g, or t
  misc_feature (373)..(373): n is a, c, g, or t
  misc_feature (389)..(389): n is a, c, g, or t
  misc_feature (396)..(396): n is a, c, g, or t
  misc_feature (555)..(555): n is a, c, g, or t
  misc_feature (572)..(572): n is a, c, g, or t
  misc_feature (584)..(584): n is a, c, g, or t
  misc_feature (699)..(699): n is a, c, g, or t
  misc_feature (721)..(721): n is a, c, g, or t
gnaggggccccggccccaagttagcagcagggacgatgcaatcctgtgagttgcaagctccagttaggaganancaggactgaaggntccagcaggntggagtnccctgccgctggcccnaaaaaaagcntgcgccaaanccaaaggnctgtataaagccctcaaagaagtaccgctgccagcactgtagcgtccnccctcccccaggagcagggatgcctcgaccttccatgcacagcncagtctctccgtccttgtcgatgaaggtcaaggtgatggtggcaaagnntccccccnaacncagacgggacggaggtttcatatctaggtttccatctgagtctaagactggggcaaccnggctgggcgtggnggctcacacctgtcanctcagcnacttgggaagctgaagcaggaggatcgtttgggtctgggaggttaaggctgcagtctgctgtaattatgccactccactctagcctgagtaacaataagacccctctcgccaagatttaaacctccactccatcacaatatgtatctcagggaccagancagtaaattccccaganacgttgccatcnaccaagtggaactttccacctctgtttgcttctaatgttgcaggagcatgggtaaaggcctgcaccagcccttgggtggtaaacactctatagagctcctctggtgacgtcaggnaggtttccttaagagttatctnacaagttgggattttg

SEQ ID NO: 617573 - DNA, 177 bp, Homo sapiens
tttcttaagtctgttctagcacctttgccagaagcaactggacgatatctgcataacccttccaggcagcagcatgcaaagctgtatctcccaactggttctgcggttcagttcaatattgggttgagtaaatagcatttccaccacagtactcgtcaatgggctcggtcatatata

SEQ ID NO: 617574 - DNA, 245 bp, Homo sapiens
gttgaatgcgtgcgagttacatcccatcagaatctctggaaatgcttcattgtatgtcggcaacctggtgactttaccgacgtgaaacgcactgtctagctctagaggctcggcattctcccactgtgacgatatcatcgatctggacgatccttaagcagggggacaggtgtacagacatgttctagtggcgcctctcgaatcggttgtacttgcggatgtagtgcacatagtacagcgtctga

SEQ ID NO: 617575 - DNA, 743 bp, Homo sapiens
tggcacgaggagaacctggttgtagaattagccaagcatgtagcccagtctaacaatgtcacttcatgttatgtatgtggagaagctgtaataagagatcaaggccatgggaagcctgagaattagtacctacagtacctgatgaattcctggctcaaaagaatcaccctgataatttctgatcctaaaagcctcaattattaaacaatattgcatagctagagaaggaaaagaattctttcaccgcgtaggatgacttagttgtcggagacagaaactgtataatggtaccacaaaaacaatcactggtggagttcaaatcacacagagagaaaatttagtaaattctcaaagttgcaaactggacccacctggagtcccaccgggactggacagcccccactggattatactggatatgtaggcatagagcttatgacagattactgaccagtaggcaggtagttgtgttattggcactattaaaccatctttcttcctactgcccataaaaacaggcaaactccttggcttccctgtctacgcttcccgcgaaaagagaatcatagctataagaaattgaaaaaatgataaatggccccctgagagaatcatacaatattataggctgctacttaggcacaagatggctcatggggatacggaccccattactgatcaacgatcaatggttacagctgtctaaaatatcctataaacaggagctgatatctgctggagaa

SEQ ID NO: 617576 - DNA, 944 bp, Homo sapiens
tagacgaccccgtactgcgactcctacctgggaggaggacgaggagtgatgctgtgaggactgcggatggactgaggactgcgaggacggcgaggccgcgtcgcgagggacgcggacgcaggggacgaggacgaggagtcggaggatgcctgcgggcggagcggtccagttcgttccagtccagaatgatagggtccagaatactggcgagccacgagggacatgtgtaggtatcggctgcaactatccgggactctgtgttggaacgacgactgcaattgtgtggacacgccaaacctgagtttctacagaaagtgatgatccgcttcctgcccaacgtgtgtgtttcattgaggacattcgttcagaactggactggatcaactatgacctccttgagtgacaagtcactcctacatccagtggctgtttcctctgcgagaaccaggattgaactggcatgccaagcccctcacgctcagggaggtcgaggtgtttaaaatgctcccaggagatccaggatgctggcattgtcctgggcctatcgagctcatgctgggcttctactgggatccggttggagtgaccgatgtgcatcgggtcacggtggggccgagcactagaactaccagaatgcgcttcctagaaccctgtactggggctgtgctcggacaacgctccggagtcatcacgcgattcttcaagtcggtgggtgagctggtgtctcgaagcacttccaggctgcctgctggtccggttcttccgtgggggacgacgctgtgcggtgggagctgcgcgtggttctggacctttgccctgggtctacttcatgtttcgccgttcgctgcggctcgggcgcctgttggtggcttcgcttggagcttccgccccgtgcggttctttgggggccagaaggtgggagttacgccctttttgcccgtcgg

SEQ ID NO: 617577 - DNA, 951 bp, Homo sapiens
agaagccacataccacacacgacgccggctcgcggtcacatcgacgtacttctcggggaggggtcatcatattggcgtcacctctacaatgcgaggcctctcctcatcgacaagaagcaacaccaatcagcgtggtggcaaacccccaggggggacacacgaccgggagaagatccactttcgctggacaagcccgtgtgttcccccgaagaacccccgtcggctcccccgggggaagcgcagcagccgccgcagctaattacacagagcaaaagggggggaacacaccagcgaccggcccccgtgacagcgtcggcccccacggaggaaagcccaaagggttgggtccgccccgttcgggaagatacgccagagccgggtgtcaggacacacacaaagaatggctgcggcggtcgatatacagtaacaaccgtttactgagggagtaattcaaatcgaaagccccgtctttcccccacgggacatggggtgcggcaaccctccggtgtcagaggtgcccgctcgtgaagaagcaactgcccctctcgagtaagccaacgcccccaatcgcagggaagtaggtctacggtcaacacgacaggtggcacaaccaaggccggacctagagccgcacgggcctgcattatggtcctaactatgggcagcaaagacagccacgcggactaatgaattatctacacagtctgagcattgcttgcacggcgcatgccacatttagagctgggcaacacctctttcctcgggtcaagtgaaggtccacgttgttctccacacgtccctcgtcgaccccgcaaggaagattccaatagcgcttgacacagtgggaacactcgggtcattataacatttcttcggcgaatataaaccccgatggtccatttgcctgggatggaacagatggttgttgaaaaaacaccattccaaaggaac

SEQ ID NO: 617578 - DNA, 772 bp, Homo sapiens
attccgaactggagtgaaggtcactcttggctgtgctttagcaaagagagtggtggcatgtgcccctgctctagagatctgtgaactctgaactcgagagggtatctggcagaaaaaatttctaagcagcaaagtgttcaagatgtggcctgatgcttctaaaagcctatgctcatttgcatgaacaaagtggaacttatatttaaaacagaagctgagcttttataaaagttggagaatttgcagcccaaccatgtggtgaaaaagaaaaatccattttctggggaggaattcaaggctgcagaaatttgcataagaagagcctcatgttaacagccaagagagtgaggaaaatgcctctagagcatttcagagaccttcacagcagctcctcccatcacaggcatggaagcccaggaggaagaaatgctttgtgggccagcccaggccccactgttctgtgcagccttgggacatggtgccctgcatcccagcactccagctccagctgtgactaaaaggggccaaggtacagcttgggctgctgcttcagagggtgcaagccccaaagccttggtggcttccatgtggtgttaggcaggtgtgcagaaagagttgaggtttaggaacctctacctagatttcagaggatgtctggaatgcccggatgttccggcagaagttgctggagagggcgaagcctcataattaactctgggagggcgtgtggcgggggacatgtgggttgggagccacacaaaattcccactgg

SEQ ID NO: 617579 - DNA, 247 bp, Homo sapiens
  misc_feature (233)..(233): n is a, c, g, or t
tagacagagtgacagtgagagaaaaagagaggaaggaaaagggaaaaggagtagggaaggatgagggagataggaaagcacctacaggaggcagagagtttcctgaaggtcatgcgatcctttaccctcagaaactttcaggctgaaatcaccatctccgttatcccaacaaacgcactctcctacctctacaagcacttcaagtaaagcagaaatcacaccaatactgacgngcttcaagcgcaac

SEQ ID NO: 617580 - DNA, 537 bp, Homo sapiens
gtccgaaggaagagctaacctcactgcttgtagatagaaggaaaaaaggcactaaggtagcaaaactttctcatttcagagagatgccagtgatcctaatgtgcctgcacaacttaccaattctaaggaataagtggatggatggcattactgattcctacattactgattgattctgcatccgcacctggtattattaaaaacattctacgtcatgtgtggggagataaggaggatcacatgaagagaaagaatatcatggaggggaagttctactgaatagaaaaggtgttgaacgtttataaataagttttactattcacagggttcaaactatttgaagtaaagagattatatttaatgaatccatccctcaatttacccaggtgaccactttacttttactgtgtgtatctgcccagtattcattcctgctgatatcagtccataactgaatgatacgtgccgtcttcactatatttcattctagtcaggtagcagaccgtgtagactttactgcactggccctgttcataa

SEQ ID NO: 617581 - DNA, 305 bp, Homo sapiens
accccctctgaattgcacgcttgtgccttttccccctaatggacagtggaaacccccgctttcatgttactgcacgtgtgatcatacagaagttgtgttggggaataactaagtcggggggttgacaaaaggtccatgctcgtaacgttgttccttacggaaataatggaaagtatcagaaaacctgttataaattgtgtccgctcgacaaatagcatgtagtgacaacctaatctgtatgtcccaaggccagcccactggcttctacggccgtgtcaatcctcaagcaacgtcttcgttgatgg

SEQ ID NO: 617582 - DNA, 189 bp, Homo sapiens
gaaagcaatctgtttctagcatgatatgtattggtaaagtgcctactaagtggtatttttgtctagataccatgtcttaggcacacaacagaaaaaagaaaaagtgcagccaggcacggtgggcagattgcttgagttcaggagttcaagaccagcctggcaacatggtgaaatcctgtgtctacaaaa

SEQ ID NO: 617583 - DNA, 167 bp, Homo sapiens
tggtcgatggacttgacattcagtaaggagacaggacatgcatttcaagctgcatgcagctcactgatttcatacctcaagttatccgaacagtgcccaccagaagtatgtaccgacaatgccctggacagaaggcagactatcaatactcacatgtaacatgcccg

SEQ ID NO: 617584 - DNA, 217 bp, Homo sapiens
  misc_feature (35)..(35): n is a, c, g, or t
  misc_feature (134)..(134): n is a, c, g, or t
aggatcacttgagaccagcctggacaacatagtanggccccatctctataaaacaatgtttttaaaaaattagccacacgaggtggtaagtgcctatagtccagctactcaggaggctgaagtgggaggatcanttgagcctggaagctcaaggctgcaatgagcagtgattgcaacactgcagtccagcctgggcaatgaagcaagaccctgtctc

SEQ ID NO: 617585 - DNA, 227 bp, Homo sapiens
cagcgtctcgtcactgtttttttattcaaacacaaatctttcatactattcttattactggtatatagattttttaaaatttgtctatctctggaatgtaccttattactccatttaatgacttctgataatttttccgttgatttattaaaatgctgtacataatgacaatctttttactatggtcaacacatgtatcacatacagacttcacgatgtgacataat

SEQ ID NO: 617586 - DNA, 231 bp, Homo sapiens
taaaacccagcccatgacccctaacaagggcccctctcagccctcctaatgacctcccggcctagccatcgtcgatttcacttcccactcccataaccgctcctcatactacggcctactaaccaacacaccaactcgttcaaaaacggcttcgtaccgggtaatcctatttattacctacgccgttttttcttccgacggtttttttcgagcttttaacttacgtacggg

SEQ ID NO: 617587 - DNA, 190 bp, Homo sapiens
caatgggcgggttctgactcttatgctgaagcccttttcctaccacccagtgccccagcctcgatccttcaggccacagatcaccccacacaatgtgcccctgactctcccacattgcgatcagcctgatgcccacactaggagctcgctccctcccacttacctcagacctttctctacattgccccgg

SEQ ID NO: 617588 - DNA, 136 bp, Homo sapiens
aaattttttttccccccccccccccccccgtttggggcccccaaaaggggggtttgggggcgggccctttttccgggtttttttttttgcccccttttaaagggggggaaaaaaaaccttttttccggggctttta

SEQ ID NO: 617589 - DNA, 169 bp, Homo sapiens
gtaacatgttgaatataaaagaatctctgaaaatgtactggtgccaaaaaaaatacccatatttgttttctgaattaaaatatgtatcaataaatagattatttgaaagggaagggcaacagggcaaacattagtacataggtaccattctttaacaagaaaattcagg

SEQ ID NO: 617590 - DNA, 281 bp, Homo sapiens
acaatcacggcttcctccaacctccgcttcccagggtcaagcaatcctgcctcagcctccctagcagctgggactttgctcagcgctccggacgcctcccaccagcaaagaggaagaaatttcagtccaggggcaacagccagctgctgctattttaaatggttgaaaactaaacgggtggctccctgccattgtcaccaggttggaactcttgcctctgtgaggaagccttttttactgggcaaacccatgaaatttaatacccattttaaaacctctga

SEQ ID NO: 617591 - DNA, 130 bp, Homo sapiens
cacgaggagatttatgatttcatacgcttgattctatgtgaaacatctttttacttttatgcattttaataagatttaaaaatatttatattaaagctcccttgaacgagtacatgaaaaactcctggct

SEQ ID NO: 617592 - DNA, 229 bp, Homo sapiens
ttaatgggacttactaggagggatgctggaccaacctgctttcgctgactgctcgcatctaggcagccatggtgaatgtgttcagctccgaggccgcctggcagatgtgtgagtgaggcgctgcagaatcctcgcggggcttgtggctacacaaggggactatctcgtacgatacgcatactgcgatgacagccggtatcctcctcattcttcgatgggaaccagtgaa

SEQ ID NO: 617593 - DNA, 182 bp, Homo sapiens
agacagccagcactttaacggatgttttcaaagtataactaccttcaggtcgagctggcgcatggtgattcccatatttgtcccagctgtttgccgaggctgaaagcaggtggatcaagggctgcagtgagctaggatcaagccactgcattccaacctgggtgacacagtactgggccttt

SEQ ID NO: 617594 - DNA, 731 bp, Homo sapiens
gggccaattgtgtatttctagtttagatggggtttcgccatgttgaacaggttgggttttgaactcctaacggcaggtgatccacctggctcagcctcccgtgctgcgattgattacaggcatgagccaccgtgcacaggctctgacacgagtttttgatgatgcacggcttcaccctcactatccttcagctatactgggtagctgcatattttcatctccatcagcctactaagcgacaatgcctatcttgctatcattggtactgtctaacctgttagccaagcatctcctacctgaagtaattcgatcgctttttctatggactgcctgtctatctacccctttttcttaacgagctgccccagtccagcaccattactgccagccagccctcggccacctaccttgctgcatcctcatgtcgcctcgcctcatacaattcctagcactgtcactcgcgccgcggctacgccttctgcgcccagtcccactccgtccccacactgatctcctcccggcctacgtctccgccttcgcccctccccctccccgcccccttcccccctccactccccgctccctctcccctcagcccccatcccgccctcctctgcccctccactccgccctcctcacgccccgcctttcatctcctctcctccacgccatctcccccttcctcccatcctcccctccccctctctccctcctccctcctcgcccgctcc

SEQ ID NO: 617595 - DNA, 121 bp, Homo sapiens
  misc_feature (72)..(72): n is a, c, g, or t
  misc_feature (85)..(85): n is a, c, g, or t
  misc_feature (100)..(100): n is a, c, g, or t
gccaagttgggacccggacggcctcaccatgatgaaacgggcagctgctgctcagatgggaggagccctggnagtgggggctgtnccgtggtgctcagtnccatgggcttcattggggcag

SEQ ID NO: 617596 - DNA, 897 bp, Homo sapiens
cttccaagtaaagctgctgtgaaaatttgtgaacaagcttgtatagacgatatgccttcatttctcttgaataaattcctaggaataggaatggtaggtcagatagtaggtttttcctttttttttggtggagggggtggtatcttattctgtgatccaggctggaatgtggtggtgtaatgttggtcactataacctccactcccaggctcaagtgatcatcccaccttagccttttgagtagctgggactacaggtgcagtcctaccatgcctggctactttttgtatttgagtggagacggggtttcactctgttgtccaggctggtctcaaagctcctggagtcaagcagtctgcctgcctcggctcccagagtgctggaattacaggtggagctactggacccagcaaggtatatgcatttctaagaaactgccaaactgttggcaagacggtcgtatcatctcgcattcccatcaacagtgtgtggtgttccagagcttccacatccttaccaacaattggtacggtcagtgatttcattctgatttattgcattcatgcatcactcgagatggagtctcactctgtctccaggtaacagtgcagtagtggcgatctcggtccacgtgaactccgagtcactggtttcaaggcgaattcttcctgctctagcttcccgagttaatggagattaccaggacctggcaccatggcccaggtgaatttgggtataaaacgtggaagaagggagttacaccattgttggcaagacatggtgctcagaatctcctggacttcaagaattcgaacaaagttaggtctccaagatgctggataaaagcatgagcacacaacttggctggccagcattaatttgtgaatttaataaatg

SEQ ID NO: 617597 - DNA, 575 bp, Homo sapiens
gatcccaacttaattattgcgggcatgcagcccttgaggtctggaaatcaacgcaggtgattgttataaaaaggtcttggcgggttggcttatgcgcaagtggacaatccaattttttccaaacctaaccgcgccatgcttttaggtgatgccaaaaaaacatgtgacgcgctccaggcgaaagttagagaatcctatcagaagtaaatattaaggatcaagctgttagctaataacgccccctctgcagttttgggaacaggcaaaaaaagtatcagtaaacatggtgatgtacatttgtagcaaagcttttggagaaaatgaagcctgaagaaagcaaagcaaaaactgtataaagagatttttcaaaaccaggaatccccccattttaaaaaaggattgaaaattctaaatgtctttctgggcaaattttttgggttaggaatcaaaagttttttataaaaggaaaaaaaccacccccattttaaaggaagccctgttggattttttaagcccccccaggaaccaaaaatgttttaaaaaactaagggtttaggatttcaagcccccccata

SEQ ID NO: 617598 - DNA, 847 bp, Homo sapiens
ccaatttttccatgggttgccctgagagtttgcccccccccccagtttctctgcaaggcctcctggcccccccctgctttgcccacccctgcgcaagggtatccatggacaacttggttatctgtggaggactcatgaccacatccacgcatcactgccacccaggagacttgtggatgcccccctccgcggaagctttggcctgatggccgccggggctctccagaacatcatccccgcctcttactggcgcctgcccaggctgtgggcaagagtcatccctgggctgtacggggagctcactggcatgccttccgtgtcccccctgcccacgtgtccagtggtggacctgacctgccgtctaggaacctcccatatgaggacctccagaaggtggtgaacaccggcctcgcgagggccccctcacagggcctcctgggctaccactgagcccccggtggtctcctctgacttcaccagcgacacccaccttcctccaccctttgacgctggggctggcactttgccctcaacgaccacctttgtcaagctcatttcctggtatgaccacgaatattggctacagcaaacacagggtggtggacctcaatggcccaccacttggcctcccaggagtaagacccctggagcccccccgcccccgccagagcacccagaggaagagacgagaccctcactgctggggagtccctgccacactcagtcccccccccccctgaatctcccctcctcaccgttgcccagtagaccccctgaagaggggaggggcctagggaaccgccccttgtcaagtaccaatccataaactaccctgtgctccaaccca

SEQ ID NO: 617599 - DNA, 133 bp, Homo sapiens
ataaggtatgaacaccaagagcttattagtaggcaaatacacattaataaaatgcctaaaaggatgattcttcaacccggacccatggttgctgttgggcctgttagctctgcataggtaaatttatgtactc

SEQ ID NO: 617600 - DNA, 268 bp, Homo sapiens
  misc_feature (49)..(49): n is a, c, g, or t
taggcatggattgggtctggaggatctctagaggtgaccaggctccatntacgagtattggaggtcagcacggtgctcacgtgtcgacggaacttgtacagtgaggcatgcaccgcagtggtgaatacacgtcgaccaggctccatgttagcgagattgggaggtcagcgcggtgctcacgtgtcgaaggagcttgtccagggaggcatgcaccgcagtggtgaatacacgtcgagctggaggcatgaatgcatgctcgggtactgga

SEQ ID NO: 617601 - DNA, 483 bp, Homo sapiens
taggaattaccatattgttcttcatagtgattcaattaacttatactctctactaacaataattcaactccaactcttttcttttccaacatgcaattatacttccttcattactagaaatatttatttgtattgatttacatttcttctgtgtgctgtagtaatatgtgttatgtgtaatataattattctaaagtttagcatttttttattaactttaaacattaaaactattttacccaaaaagtttcttaaacaggtctcaattcatttaggaatttattttgtcaatgcttaagacatgccagtgacacagtcctcaggaggtccttactacataggccccgggctggttggcctacaacttgcttgtatacattttagggagacataagatatcaatcagtatgtgtcagatgtacatttatttggtttggaaaggtgggacaatgggtaagggggcagtggagagtggggacttca

SEQ ID NO: 617602 - DNA, 155 bp, Homo sapiens
gatgggggctcttttgtgtcatgtgagaaagaggcaggccggatgtcagaggggtgccttgggtaacctctgggactcagaagtgaaagggggctattcctagtttttattagctatagtccattattgctaaatcgcctcatgcacgggttacc

SEQ ID NO: 617603 - DNA, 389 bp, Homo sapiens
  misc_feature (278)..(278): n is a, c, g, or t
  misc_feature (304)..(304): n is a, c, g, or t
  misc_feature (354)..(354): n is a, c, g, or t
  misc_feature (365)..(365): n is a, c, g, or t
ccaaaaatctcaatcctgggctgggtgtagtggctcatgcatgaaatcctcagcatgttaggaggctgaggtgaaaagatcacccgagcccaggagttcgagaccagcctgggcaacatggtgaaacgctgtctctacaaacaatacaaaaattggctgggcgtggtggcacgtgcctataattccagctactcaagaggctgaggcaggagaatcgcttgaacccgggaggcggaggttgcagtgagccaagattgtgccactgcactccagcctgngcagcaggagcaaaactccatctcanaataaataaataaattgttcacttcttttaagtatttttttatgctattntaagcagaatngtttcttaatatcaattttggatt

SEQ ID NO: 617604 - DNA, 421 bp, Homo sapiens
cgtcgcattacgcatcggagaactacataggagagcacgtgtctgcacctcctaactgcagaagcaaccgtcttctcaaagacgaaggtcttagcaaagttcagtgctcggtgtactcggcacaacaatgcagtgtagttcagaaggtatgtaggcaactcttaatctgaataagaatggggggggcgctttcgaaaaatatggcttcacgaaggcttgtcattatagggctaaattttaactagaatgtgagtctgaactcttacatctagaacaaacaaaaccttaacatcacggattggttcaaagaatggtttactggaaaaattaatctgtaacaaaaagttggcatggagtgcgaaggctccaccgttgttttttttttttttttttttttttttttttgtgcgcgaccgccccc

SEQ ID NO: 617605 - DNA, 356 bp, Homo sapiens
tctctactaaaaatacataaattagctgggcgtggtggcgcatgcctatatcccagctacttgggaggctgaggtaggagaattgcttgaacctgggaggtggaggttgcagtgaacctagatcacgccactgcattccagcctgggcaacagagcgagactccatcttaaaaaaaaaaaaaaagatgaaaaaaaaatttgttttcagtttgaaatcctattgttggtattattcaattgccaacagaaaagggcttggttgggttccgctctgtgtcaggttaaagcatactaaagaccagttttataagtcatgggctttgaaaagcaggcacacttcacttacttggagaatt

SEQ ID NO: 617606 - DNA, 717 bp, Homo sapiens
  misc_feature (118)..(118): n is a, c, g, or t
  misc_feature (454)..(454): n is a, c, g, or t
cgggtcaggtcattcaaatgccccctcgggaggccaataatttggggaggttttccaccgaaaacacatgtgggtgcatagagtccacattgggaaagccagcacgacacaacacatntgctgttctctcgcgagagatttcgatagtgagatgaagtaactccccgctgggttaccgcagataaatatgtgaggacaattacatgtgatgagacagcagaacccccttgagataaagatactctcgcgtaagattggcgacccccacagtaggtgttgtttgtacacacaaggagccacacagtattctctgcaacgaatgtgttttctcaccacacatagcggtgatttgatggcgcactcatcatctccctcctctctagcaacagaaaacattccaccattcaattgggcgtgtgaccatattctcttcgcaaacccccacacctagcanttgtattgtattcacaccactgctgttcataaacatcattagtagtcattcccttctatataaaccaggggtgaccctcctcgtgcattctccctcttagcaattaatcattatataactctttgtgctcttttagaattacaattggacctacaaaggaattaaaagacccactaactattttttctcgtctattaaaataaaaaacacagcgagccccctcttctctctctcctggcgagaaacaacaaatagacaaaaac

SEQ ID NO: 617607 - DNA, 779 bp, Homo sapiens
  misc_feature (51)..(51): n is a, c, g, or t
  misc_feature (61)..(61): n is a, c, g, or t
  misc_feature (71)..(71): n is a, c, g, or t
  misc_feature (106)..(106): n is a, c, g, or t
  misc_feature (142)..(142): n is a, c, g, or t
  misc_feature (153)..(153): n is a, c, g, or t
  misc_feature (207)..(207): n is a, c, g, or t
  misc_feature (211)..(211): n is a, c, g, or t
  misc_feature (213)..(213): n is a, c, g, or t
  misc_feature (284)..(284): n is a, c, g, or t
  misc_feature (294)..(294): n is a, c, g, or t
  misc_feature (300)..(300): n is a, c, g, or t
  misc_feature (312)..(312): n is a, c, g, or t
  misc_feature (342)..(342): n is a, c, g, or t
  misc_feature (350)..(350): n is a, c, g, or t
  misc_feature (354)..(354): n is a, c, g, or t
  misc_feature (369)..(369): n is a, c, g, or t
  misc_feature (377)..(377): n is a, c, g, or t
  misc_feature (393)..(393): n is a, c, g, or t
  misc_feature (399)..(399): n is a, c, g, or t
  misc_feature (424)..(424): n is a, c, g, or t
  misc_feature (438)..(438): n is a, c, g, or t
  misc_feature (443)..(443): n is a, c, g, or t
  misc_feature (446)..(446): n is a, c, g, or t
  misc_feature (448)..(448): n is a, c, g, or t
  misc_feature (475)..(475): n is a, c, g, or t
  misc_feature (546)..(546): n is a, c, g, or t
  misc_feature (593)..(593): n is a, c, g, or t
  misc_feature (607)..(607): n is a, c, g, or t
  misc_feature (616)..(616): n is a, c, g, or t
  misc_feature (620)..(620): n is a, c, g, or t
  misc_feature (625)..(625): n is a, c, g, or t
  misc_feature (649)..(649): n is a, c, g, or t
  misc_feature (655)..(655): n is a, c, g, or t
  misc_feature (658)..(658): n is a, c, g, or t
  misc_feature (660)..(660): n is a, c, g, or t
  misc_feature (665)..(665): n is a, c, g, or t
  misc_feature (682)..(682): n is a, c, g, or t
  misc_feature (686)..(686): n is a, c, g, or t
  misc_feature (694)..(694): n is a, c, g, or t
  misc_feature (704)..(704): n is a, c, g, or t
  misc_feature (712)..(712): n is a, c, g, or t
  misc_feature (715)..(715): n is a, c, g, or t
  misc_feature (779)..(779): n is a, c, g, or t
gtaatttagatacaaagaaattctaaaagagtcttaaatttcacaacttcnatgtgttttntcacaattgnctcgcactcctcgttcctcccccactcgctaaganttacaacactctaggcatccgcctccaaaaaagttnttatctatgcncccttcatggctaacctctcaccattgccagctcccactcgcataatagccccnaagngnctattaaaaaaaaaaaaaggcaaaaaacgcaattactttcgcaccaacctaatactagttttatttttaantcacagtttnattttnatataaatggantcatacaatgtttattctttcatacctganttctttcnttcnggaacacgtttcagngcttctgntgtccagtagggggcntcaatngttctttttctttttattgtctgcnaccattccattgtntggantcnanctagtctgtttattcattctgcctgtnaatgaatatttagggttatattccagttatttgtctttttatgaataaagcattcttatttttatcttttnagaagtctatttgtttgttatgagtcttcacctctttatccttgganaaaaacctaagganggactcgcngganaatanaatagggtatttgtttaaatttanaagaancancnaaacnattttcaaaagtgtttncgtncttttccntactcacaanaaatacangangtgggcttgtttgaagtttgtggatgtgtatgcgcttctcatgtgtgtactggcatttgtctan

SEQ ID NO: 617608 - DNA, 371 bp, Homo sapiens
  misc_feature (56)..(56): n is a, c, g, or t
  misc_feature (59)..(59): n is a, c, g, or t
gccccttaaggggtccctttcaagggaggggggggaagggaaggggaaaacccttnggnggggccccctccccagggggttgtttaaaaaaggccctttgttccccccccccttttggaaaaggaaatttgggatgggggggaaaagggggggccccccccaaaaacccctcccaaaaaaaaaatggggacaaagcacaggggcggagttttccaggaaaaggggaggggttacccagctcccatgggggggggtttttttgtttgtccccctgatgatgaaaagcccccccctccccaaggggggggtttttagcctttttttggccccccttttttgttttcaaaaaagtttggtccttagaaagggga

SEQ ID NO: 617609 - DNA, 408 bp, Homo sapiens
caggccctctccaggagcccctggctgtgataaatgtgcatctgtagagtgcacaacctgaacatccttaccaagcagccctgcccaatatcttcctgcctaaagagtcccaatgctgagagtatgcctttaaaaccccattttggccatttctcaagaaacctgtacttgatggatcagctggcaccatccagatcaataaactggctcatctgatctgggccccccacctaggaactgactcagcgcaagaagacagcttcgactctctatgatttcattcttgaccaatcagtactcctggctcactggcttcctcccacccaccaagttatccttaaaaattctgcttcccgaatgctaggggagactgatttgagtaataataaaactctaatctcctgctca

SEQ ID NO: 617610 - DNA, 161 bp, Homo sapiens
gggtcctagaattcagcaaggagccaaaacaagtttgcaagaagaaatggattcttttcaggttcacagaaggttgaacccatttacttgaaccagaagttgaattttaaatatcttgatctcaaccttaaggggggcacgttatttttaaccgggcaaag

SEQ ID NO: 617611 - DNA, 117 bp, Homo sapiens
agggtatttataggttcacactaagtgaaaagtccagtgggatattctagcttcaggcacggttggatccagtgggcacaaacgctgtcatcaggattcaacgtctctccactattt

SEQ ID NO: 617612 - DNA, 289 bp, Homo sapiens
gaaagttgttaaaataaaaagtgggtgtgggaatcgggtgttctttccccccattgggaggatggtcaaaagggttttagcagggtccccctttttttcccccccccccttttttttttattaatcaaaagaaacttcaaaggtaatgggaggggggggtctccccgggtgagaactcgttccccccccagcctttcatgaaaaagcgggttttttttaatcaacccaaccccccccctgatgggagggggttccccaatctttccaaataaaaaggaatggcttggga

SEQ ID NO: 617613 - DNA, 139 bp, Homo sapiens
  misc_feature (106)..(106): n is a, c, g, or t
  misc_feature (138)..(138): n is a, c, g, or t
aattcgcggccgctcgaccgagaagacgacagaagggactgtggcaatgtggtgtgtgataaaattaagccaaatcaacagcccattttgtgcaatcagggtcgantctgtgtggactctcttgggtttttggctttnc

SEQ ID NO: 617614 - DNA, 183 bp, Homo sapiens
  misc_feature (49)..(49): n is a, c, g, or t
  misc_feature (56)..(56): n is a, c, g, or t
  misc_feature (119)..(119): n is a, c, g, or t
  misc_feature (137)..(137): n is a, c, g, or t
tcggaccaaaaaaattatggcccatgaaaggagagagaaagtgaaacgnagcgtcngcctcgtcctgagtacccacgtcctagggaaggagaagatcgccagcatgctgcccggagcantcgtacgttcctgcaganccccccggagaggagcccgaataccaccccgacgccttaagcccag

SEQ ID NO: 617615 - DNA, 129 bp, Homo sapiens
tatgcccactatctgctgtgcaaaatggccgacgatcgcggcgtatttcccggccagtgggcgctctccggcggcggcgtcgagccaggcgagcgcattgaagaggcgctgcggcgagaaattcgcgag

SEQ ID NO: 617616 - DNA, 901 bp, Homo sapiens
cagtcatgcgggaatccaatgcatgaatgatgatcgttggcagcccacgagaaggaatggacaggtacttcgtgttattccagctacgcagaagggaagggcacatgggtgattgatagtcggtcagagggactgtctgtgattggatgtggaatagtcctcgaggatgtgccttgaagagaaagctcagtgaatatgaaactgacgcagattgtaagaggtggaatactctagacagacaagactaggtattacattcttatatgctggaatctggtcattcgccattgcccaagaccaggtctagtgagcggaatgtgggaagaatcctcttcatggggacctctttctagatcattttgcttacctattacagctatatggtggctgcccgatattaggagtctggtgaggaagagatttggagatgtcatgaggcgaggttagatgtgtaagtgtagactgactttcagaaagtgtctcttaagtattgcatgaagtcaagaaaaacacagagtgtgtgggaggaccggttcagtgtccaaagaaccagcccatgccgtgtttaacacgcttggatgtcgggaattcccagatatgtctcagagtgattggaaatccctatttgttcaactgcaagacagggtgtctcaactcatgtggaccacaaggtcctggatgatgcaagggggtcgtgatctgcaaggatcgtggcaaattctacgatctcctttggttgaatagtagatcctgcttgcttcaggtttcagtgagtagaggtggggactaccaggtattttggccacaattgggtcaaggtgaatatgtaggtaattttttatgggaaagttcggagagtttggcagtggtgggtcagcgagctggtgttaagagtgtgaaa

SEQ ID NO: 617617 - DNA, 90 bp, Homo sapiens
ggaagtggcgccgttttttgaaatcggccgagtgggctcgcgccggacccgagccgccgggggtgccatgtccacccctccgctgggcgg

SEQ ID NO: 617618 - DNA, 266 bp, Homo sapiens
gttaagcccccccccccccgccccagttttccaggggggttactatttttggggtcatgggggcagttttaggacccttgaaccctttttttccccccttcccttcccagtaaatggggcaggggcctacggggaggggcttgttcttaactatttagtggtcccgttaacccctaactttccttttttttttccggggccggggtaaaacgacctcatggttttcccccttctaaaaaaagtgtgtttttgggggaaagagagga

SEQ ID NO: 617619 - DNA, 806 bp, Homo sapiens
  misc_feature (328)..(328): n is a, c, g, or t
agcgggcggcgcggcggggcgatgtgtgattaccatggcgaggagtctctgtccggggtgcctggcttcaggaaaccctattacctccagcgctcgcttctcatatgtgcggatgaaatatctattgcttctctgcctgagttagtggttttccgttcggaagctaggattatatattgtgcagtgtattctacctatacagaatttaatgcaagacggtacatagggactgtagaaggaaatactagagtatgtgagcagagatacgaaggactgtgtagttacttgatgtggcctgctgtgtaatcattgcctttgatgcttccgngaaactcgtttagcttaggagaaaatgtttatccaccaaggcaccaagcaagtcagatgtgagtctagggatgtagggatagatctagacaggtgtagtagacaatgtcaacatggaatgagcgctacagtctatgatttgggaactgaattggaagccaagaaaatagaaatagtgcgtattagataagtcgcaagctagaggaagctacgtgttacaaaaaatttccctacgaaagtgggtctgagtagtctctgctcataggcacacaatagcgagtgaccgaatggcataaccatcgtctgaaactagtttaatcctcatcttagcacgcgtggcctgatggacgacgaaaggatgcgccagggtttccttgggggagaaagcaaaagtcgagcagtggagcacattcttcagactggaagtgaatgtctatcgtcatgggtgataccttcaacgataaaggaaccataccccc

SEQ ID NO: 617620 - DNA, 118 bp, Homo sapiens
aaggcaggagtacagtggtgcaatcatagctcactgcagcctcaaactcctgggctcaagtgattcttccattcttcacctcagccaccatgccagttattttaatttttgtagagac

SEQ ID NO: 617621 - DNA, 112 bp, Homo sapiens
  misc_feature (86)..(87): n is a, c, g, or t
ctcagtgactctggcttctatctctgtgcctgggtcgccaaaatctatggatacaccttcggttcggggaccaggttaaccggtgnngaggacctgaacaaggtgttcccac

SEQ ID NO: 617622 - DNA, 396 bp, Homo sapiens
catcgaggacgcatcatattacagcaatgcttttcttttctgccaattagcaccaatataaatcgttattccatctaaggccctgtattacttcagagaatataaatctaagtcccggccaggtgcagtggcttacgcctgtaatcccagcaccgtgggaggctgaggctgagggatcacaaggtcaggcgtttgagaccatcctgaccaacgtggtgaaaccccatctctactgggaatacaaaaattagtcgggtgtggtgtcacacgcctgtagtcacagctgctcgggaggctgaggcaggagaatcacttgaatccgggaggcggaggttgcagggatccgagatcgcctcactgcactccagcctgggcaagagaccgagactccctctc

SEQ ID NO: 617623 - DNA, 224 bp, Homo sapiens
cgacagaggaggcgcgagctcctgggtagatgtgctctctgtctgttcagattattatgtccctgtatcacagctacccaggagctcgtggcctcctcgtctgtccacctcctctgtgctgtccacctcctctgtgctgtccacctcctctgtgctgtccacctcctctgtgctgtccacctcctctgcctcctctgtgctgtccacctcctctgtgctgtaca

SEQ ID NO: 617624 - DNA, 108 bp, Homo sapiens
atcagatacgaatccagtataaagccctaaaacctgaagtggataagctgaacattatggcagccaaaagacaacatggttcgggcagctcgagctttgctctctgct

SEQ ID NO: 617625 - DNA, 308 bp, Homo sapiens
  misc_feature (5)..(5): n is a, c, g, or t
  misc_feature (185)..(185): n is a, c, g, or t
  misc_feature (293)..(293): n is a, c, g, or t
acaangttgccccccaaaccttccgtgccccatcaaagagtctattgtaggatgggaaggaagtatagatagatctgtaaacaagtaaaactggttgtcaaatgtgctaatacaactgtgtgaattatgatgtaaacatgtttatttaataactgcattaaatatgacataagcacctactaatngccaggcacaaccactttatatgaattatttaattaatacatactgtaatggaggtactgttatcctcccaatttaaaggggacacagtgaagcagcaataaattaantaatttggctaaggt

SEQ ID NO: 617626 - DNA, 321 bp, Homo sapiens
  misc_feature (50)..(50): n is a, c, g, or t
tgcaagtcgattcatagagagatccccctatacggagtctcatacattcnctcactcagcgtatggccctatctcctgatacgcttggagcgaccttatggctacgtcgcgtggccttgttattacaccgcttgtagtatatacaaccccctgcagcggcaacttacatacaagaacaattaactggagcaaagggagatatttctttgtgcagattctgtaagggctgggcagaaatgtgtatggtcaaagccaagcagttccatttacagctctgttttttacgtagttacaacatgatgtgattgtagctttttaaac

SEQ ID NO: 617627 - DNA, 351 bp, Homo sapiens
ggggccaggcgcactccatctctatacattagcacgctattccgaggcgcgccctgtggactcatgcgtcggatcccagcactctgtgaggccgagggccctggagctccacacggcctaccctatagcccacgatgtgaatctgaatctacaggcagactggaccacctctctcccatgccccgagaatggtcacaagggcttccttggctacgatggtccggaggctttgggtggagtatacatacccggtcggcttgataagggggaactttcattacatcccgggagactgtcccacggcacacgcacaggcgtgcttccttgccccaacacctgatctcctctctg

SEQ ID NO: 617628 - DNA, 131 bp, Homo sapiens
ccaccttggcctcccaacatgctaggattgcaggcatcagccatcacacccagcctggatataatgattttaataagcaatttagtctccctggtgtccctaggacgccaggctcaacatttgccatgaat

SEQ ID NO: 617629 - DNA, 267 bp, Homo sapiens
cacgcggagagagagagagagagagagagagagagagagagagagagagagagagagagagagagagagagtgagatatagagaccgcgccctcttgcttgacttcttctcccccttctctctctccccctcatccttcctctctgtgccctccctccctctcctcccttctcttcctctccctccctcctctcgctctccttcctttccttttccttccttgttctcttcccttccccttctccttcttccttccccccttttcct

SEQ ID NO: 617630 - DNA, 234 bp, Homo sapiens
caatacatgagggctaggctaaaacacagtcaggtcacgttgttatggacagcaaaggctacagggtgcggatcctggctcttgtagtacgaattctgactgcaccaactatgcctaggacggacgggagttgtagtttaagtagacaggtgctggggtttgcagcagaccagtctgcacaagcaatggaagggcagagctattgtagtgtattaatgcagcacattcatgcca

SEQ ID NO: 617631 - DNA, 297 bp, Homo sapiens
gtgtacgaccctcgcgggtctcgtctcggatgcgttcaaagtaaacgataaaggagtatgctgtcacgccgatggccacgatcgcgccggcgataccagccagcgaaagggtgaatccgacggcctcgccgagcaacaccatggctgcgtaggtagtgataccggcaatgacgagggagccgagggtcaccaatcccaggccccggtagtacagcaagcagtagccgccgaccagaataaggccaatgatgccagcgataatgccagctcgaagctgctcacccccaagggtgggcg

SEQ ID NO: 617632 - DNA, 298 bp, Homo sapiens
ggcggtcccattcattcatgcccggcatcgcgttatctttcaattccattcctttccattccattccattccgttccgctccattccattccattccattccattccattccgttccgttccgttccgttccattccattctattccgttctattcgggttaattccattccattccattcgattgcaatcgagatgattccattccattccattccattccattccattccattcctttccattacattacggatgattccattccattgcattccatcccattccattcccctgta

SEQ ID NO: 617633 - DNA, 228 bp, Homo sapiens
ttgctgaggtactctcgaggattctttgaccagagtctgggagtaatgtgttgctgtcgacacacattggcctggtaagagagagagagagagagagagagagagagagagagagagagagagagagagagagagagagagagagagagagatatgtgagagagagagaagagagagagagagtgttgtggtgtgttctgtgacacacagaaatagtatgatgatgag

SEQ ID NO: 617634 - DNA, 384 bp, Homo sapiens
  misc_feature (13)..(13): n is a, c, g, or t
  misc_feature (291)..(291): n is a, c, g, or t
  misc_feature (325)..(325): n is a, c, g, or t
  misc_feature (331)..(331): n is a, c, g, or t
  misc_feature (357)..(357): n is a, c, g, or t
taccctgtcttancgtagaaatgtttaccatgtaaatacacagccagaccaagatagaagtaggattactaagttctgttgggacaagccccgggtaaacacagagtatcatgtaatggatgtgtgaggcaaggctggggagtatttggaggcaaggggtgaggagcattcacctgggctatcaatattccctgtaagcattaaaaagcttcagttccgcttccctgcctcagccagttgttttgaatacgtccagattagaacagccaaatgtgagttttagaagtaagnagtgcctcaatctgtccaactgttctcgagctgnactganccaaccttgttgggttccatggcttncaaacacaaagaagtggattgttgaac

SEQ ID NO: 617635 - DNA, 493 bp, Homo sapiens
  misc_feature (10)..(10): n is a, c, g, or t
tggcccccgntggatggttactaatcctggagaaagaatagggtagagaagaggctgaaagacacagaagagggacaaaagatggagaacagtccctgagatggtaggagcaatagagagagactgggactaatttgccttcagaaaggaatggcttttcactgaaaatggaaggaatataagaggatatgtggccatgcatgctgttctacattagagtcagaagttgagcgtttccctacacaatggcaattagtgttgctttttcttgtgacgtagaggagagttaggtggatgagtaggtaatctaggaaataataataaatatatgacatgttcatgaaattagaagaagaattaacatggatatggttatttgcagttctgaaggcttactgaaagttggaaagcataaatatatgcatgggaatagacaggacatagagttgcagagtggcttcgcccctacaagtcggtggcaagacccatttag

SEQ ID NO: 617636 - DNA, 248 bp, Homo sapiens
  misc_feature (35)..(35): n is a, c, g, or t
gggttatagaggacaaggaggtgcccggtacagcnttcctgcttgaaacatcctgaggctgtcgcatttcctgccacttcccgccctgtccctcctcccagtatgggctgcgaagctcacacacagcttttcccctacactccaatcacgctgagacttccaagtaggcacatctccgtttctccactatgtaaactttcaacgagctcatacggtctgttctatgttcttcgcgaagcgccgcacac

SEQ ID NO: 617637 - DNA, 367 bp, Homo sapiens
  misc_feature (135)..(135): n is a, c, g, or t
  misc_feature (187)..(187): n is a, c, g, or t
  misc_feature (219)..(220): n is a, c, g, or t
  misc_feature (247)..(247): n is a, c, g, or t
  misc_feature (280)..(280): n is a, c, g, or t
  misc_feature (282)..(282): n is a, c, g, or t
ttataaatacgtttagctgtagactttgtacaaatgcatttttatgtggaagattaatatataaaataggactaaaaagaactattcttaggggtggggtatggggagatgtggtcaaggacacagaattcattnagggggaataagtcaagagatctctgtacaccatgatgactatagttaacantatattgtatacatgaaaactgctaaaaattnnaagtgttcttaacacaaaaaagtatgncaagtaatgcatatgttaaatagcttgatttancnattctacgatgtatgcatatatcaaagtgtagtgtaccataaagttataatgttcgtcaattaaaaaaatatttttagaaaaact

SEQ ID NO: 617638 - DNA, 267 bp, Homo sapiens
gccctctccaggggaccagttcaggaccccagctgccccccaggatggctatgagctgggagaggtgagtgggggaccttcactgatgtgggcaggaggggtggtgaaggcctcccccagcccagaccctgtggtccctcctgcagtgtctgaagcgcctgcgtcccaactgcactgccacccccaggagttgactgcatgaatttgttcctaacagcactgacacctcttgctttcggtttactagattaaacggggccgttgaca

SEQ ID NO: 617639 - DNA, 985 bp, Homo sapiens
agtgacacagccgctttctttttgattggtgggggccacaaatatatttttttcgggcccggcccgagttcttctgtattggcccccggtgttccccgtatagcaggggccaccgagatcccaaggcaatacttccccagggaactctctggagcaagggcccgaggacctctcccttgccggttgcccgccccggaggcccacctcccacggcttgcaagattccgaggttcacccttcttaaaggacacccacgccggtggattccctaatacacgttccttctgtcagtaaacaatcgcttttctccattcaggacttctgttccttacgacgtttttccttctgcagtggctttccgagagccctgggaactgctgcccctgcggccccgtctttggcatttccgcctctgggttctcgactcatggccgggtggcgctggcacagccttctcccctggccggagtccgtggcccagtccctgccccttgtgggaagtcaccggtcacacgaggggccccgctgtcctcaccctgtctcgaacacccaagcctgttctgggtgtgcgccactttttgtgcttttatggttaattttattgaagggcccacggagtctgtagttcgacctcaacctcagaggacgatctttggacctcttggacaccacgagggagctccaacttgccccaacaaccgaggggcggaacccacgctacacatgcctacaagtcaagttacctaagccccctacctttagcttctgtgcatccgcggggcagcttttggaagcggggttttctggggaactggcgccatcgccgggagctccagaactgcagatagcctccccaggttcaacccctggatggacggcgcggctttttatagcacacagggcttaacatcgggtaccccccttccaaccacaccgccacaattaagatctgccccacacctccaccctccaaaaaaaaaataaa

SEQ ID NO: 617640 - DNA, 179 bp, Homo sapiens
ataggcgaacgtacagtggagaatgtgatcagtgttcggaacggcctcggccagcaagcacgaggcactgaaggagaatggggtcacactatcccatcgacttatcacacgactgacgtacgtgggatgagatcaaagaagatttccccttaaaggaggtggacattgtcatggtaccc

SEQ ID NO: 617641 - DNA, 331 bp, Homo sapiens
  misc_feature (12)..(12): n is a, c, g, or t
  misc_feature (33)..(33): n is a, c, g, or t
  misc_feature (41)..(41): n is a, c, g, or t
  misc_feature (48)..(48): n is a, c, g, or t
  misc_feature (60)..(61): n is a, c, g, or t
  misc_feature (91)..(91): n is a, c, g, or t
  misc_feature (123)..(124): n is a, c, g, or t
  misc_feature (147)..(147): n is a, c, g, or t
  misc_feature (179)..(179): n is a, c, g, or t
  misc_feature (202)..(202): n is a, c, g, or t
  misc_feature (313)..(313): n is a, c, g, or t
ttttcgaggtcnacaactttagctgggattttntttctgcntaaaatntaggagcgattnnaattgaactattcttgattccaggttggancctgttggaatatttggctaaaggaccagttnntttagagctaagacatgtaaaanatcccaaatggcagtacctcattgtttacttnagcttttggtacgttatatgttntcagaggaaaaagacactactgtaaattgtgaatagccaatacataactgtattgtatgcaaatctgtgattgttggcagtgtcatctctgagaaacagataaataaagtntatttactatataacatt

SEQ ID NO: 617642 - DNA, 630 bp, Homo sapiens
  misc_feature (450)..(450): n is a, c, g, or t
gggctcaaaaaaatacctttcccctcccccgcgagatttttctcccttggggggctccaaaaaagggtggtttggacaccccgtgggaagagtgtggggggcgcccgtttgcgcccccccccctggggggacccttcttttacaccccgtgggtgtttgtggagcagttaatttgtccaaggccccacccccgggttcttctcccctttacccacggggggttctttgaaagggaccttttttttctatccctcgggccacgggaggggaaaaccccggcctataggggggttaagagccccccccttttttccccccccatttgggggggtcttttccgcccccccccccaaaacggggttttttttcgggaaattggggggcccccctttttttaggggggcccccgggggccccccccccccccccatttctttttccctttggggnttgggggggggtttgccccccccctttggttttgggttttcctccctggggggggaaattttgcccgggttaaaccccgggggtttgggcctttaccaaaattgggccccccccaaaggggggggtacccccctggggggtttttttaaaaaaaaaaaaaaaccttttttttttttttta

SEQ ID NO: 617643 - DNA, 1576 bp, Homo sapiens
tcaaactttagaactttatttataatgataatttttatacttttatttactttaaaaaattaatttatatttttccattcatttaaacaaagagttaggccgtgagttcttcagtgccttttgtgcacagctttttacctttcaaagaaaagtttatctgtgggtaagaataggcaggaaattatgtgtgggaaatgtgcaaatttaaacagttcttacattatcttcttaattattgtaacagttcgtgtgtaaaatatttcctttttctttctcgttttacgtgggaatttgcaagcggaaaagaattgtggttcgtggtttattccacaccacaaatatgagacacgagacatatctggggaatatctccttattttttgagagaagagatcaatataactttttctgtgagaacctatatatattatgagagaaaacatattttcttcttctattcctatcacagatatgaacagacacttcaatatctatcagactatctattattctcctgtgtgtcaccagagcaaggcttcacgtgggtcttctcacactcccttttctatgtgagagagagacccaaaacacccgaggggtctttttattcctcaagtgtgtcaccacacacacactatttatctccaccgaggcttcacacccaaagaagcgcacaaaaagtgtggcgtgggcctcatctcaccattcacggggggaaaaccccatatttattttctcacacaggggttgtaaaatctctcacggactccacgatttatttatttaaccgcgggcacaaaggaactatttgttattttacacggctaattgcctgtggacaccatattatacacccactctgttggtttggcaaccctcttcccaggggaacagataatcaccgccgtggtggctctccttcctttttaaccgtcttctacttcttcaacaccacggaaaggcacaccacctctgggggcgcatttccccaggggctataacccgccagggttctccacacaagctttttttcttctgcttaacccacattgtggaggatttcttatgcgtgggacgtctttctccgtcaacagccccatgtattgcctttggtctccccctaaaaggggggggggttacaacacaaagcgtcttttctacatcctttgtcaaacagaccccccctgtcagtttctcaactggggcgccgccgcttataataaaaacaggcggcgcacccacattaaacaacacgtcgcgtcgtccacaccctgttcagcacaacacatcattctttggtgggccgcacaccgggacagcatacaaccctcctgcgcgttataaagttcaccgcacacaacatatcatgtgtggcaccccccacagggggggcgacaccctctctcgcgtcgcacgaagtttcctctgctcattctatcttacgaatacacgcgcgtgtcggtatttaatactcacacccccacaaccgtactaaccgtcgtctgtgattcacacacgcaccgtgcaccagcagtacatccctcctctaccacaacagctctgccctccagcctgc

SEQ ID NO: 617644 - DNA, 208 bp, Homo sapiens
cccgcgggcggggacgaggaacaggaaattctggaaacaagtggctaactttcgactcatgttgcttggagaattgatgtgaaccctgcggagtgctaggatgagaccccagtgtcatcagtgccagcggctcacggaacactcgccaggttggtctgagattgaagtgtagacagacagtacatgcaagagacttccgatggcgtgc

SEQ ID NO: 617645 - DNA, 279 bp, Homo sapiens
  misc_feature (142)..(142): n is a, c, g, or t
  misc_feature (154)..(154): n is a, c, g, or t
  misc_feature (160)..(162): n is a, c, g, or t
  misc_feature (167)..(167): n is a, c, g, or t
  misc_feature (177)..(178): n is a, c, g, or t
  misc_feature (185)..(185): n is a, c, g, or t
  misc_feature (203)..(203): n is a, c, g, or t
  misc_feature (240)..(240): n is a, c, g, or t
  misc_feature (243)..(243): n is a, c, g, or t
  misc_feature (248)..(248): n is a, c, g, or t
  misc_feature (254)..(254): n is a, c, g, or t
  misc_feature (268)..(268): n is a, c, g, or t
atcaagtcagccagctaaagtatcctactgttaaatccttaaacctaattttggaaaagagaaagttaatcaatgtatttaccttacatgttggaaagaactatgttaggtctgattcatgtgaagaagatgttgcaaaggntttttttcacantttttnnnggggntttgggtaanngtttttntcttttcttgactttttntcctgaacacttatgtcttagcaagtggtcaacatgnggntttgnccgccnaattgtcggtaaanggttgaggcag

SEQ ID NO: 617646 - DNA, 930 bp, Homo sapiens
  misc_feature (470)..(470): n is a, c, g, or t
  misc_feature (473)..(474): n is a, c, g, or t
  misc_feature (476)..(476): n is a, c, g, or t
  misc_feature (481)..(481): n is a, c, g, or t
  misc_feature (483)..(483): n is a, c, g, or t
attccgagcctcgggtaccctcccgtaacgagcgccaaagaagtatattacataaattattggaatgatatcattccacttgtagatcccagagactaataagtaacacaggatttcttatgttcttggtcaaatctgataaaattaaagtcatttttgttccttaagtttctttagttgtacatacagaaattagacgatgaaagaatatttgggctgcatatgaagaggcaagacacagttataagatagagaacttgttttaaagaggacttcaatattcccacagtttcaagtttgtgattacctgtcaagaagactcaggttgtgtccccatgtgttaactggtcctgtcctctaagtgttagctctcctatgcccataaatctcaaagtagctggggttttaggctgtaaactttagctacttttccttttcatctcaaaagaatgaagaaaactggctgggcncgnngnctcangnctgtaatcccagcacttgggaggctgaggtgggcggatcatgagggcaggagatcaagaccaccctggctatggtgaaaccccgtctctactaaaaatacaaaaaattagccgggtgtggtggtgacagacgcttgcaatcccagctacttgggaggctgaggtaggagaatggcgcaaacccgggaggcggagcttgcagtgagccgagatggtgccactgcactccagcctaggcgacagagcgagactccgtctcaaaaaaaaaaaaattgaagaaaactaagtcaggcttagtggcttgtgcctgtagtctcagttactctggagtctgagatgggaggatcacgtgatccaggcaagcgttcgaagatgcttgtgctgtgatcacttctgtgaatggctacggcactccattctgggcaatgtagagtggagaccctgtgcc

SEQ ID NO: 617647 - DNA, 300 bp, Homo sapiens
ggctggagtgcagtgacaccgtctcagctcactgcaacccctgcctcccaggttcaagcgattctcctgcctcagcctcctgagtagctgggattacaggcgtgtgcaccacacatggctaattttttatacttttagtagagacagggtttcaccatgttggccaggctggtctcaaactcctgatctcaagtgatctgcccgccttggcctcccaaagtgctgggattacaggcatgaggcaccgtgcccagccaaaaagttttcagttagaacaaaaatggaaaacagaaccacagt

SEQ ID NO: 617648 - DNA, 110 bp, Homo sapiens
tactaacccggacgacaataacccggacgacagataacccggacacaataacccggctgactataacccggacgacaataacccggacgaaattaacccggacggatgag

SEQ ID NO: 617649 - DNA, 360 bp, Homo sapiens
ggattaaagttcttttgatcccccttcggcccccctttttgggaaggtttgggggaaatggttgggggattttgccggggcttttttttacctaagcccactttattttttttggcctggaaaaaaatttgccccttttggttttggggtttacaaaggttttttccgacttggtttaaccccctctttaaactaattaaaggcttgggccccttaaaagggctctaaatttgctggccacaagaggctttttttttttcccctgttgggggccggggggccccccccttttttcccgggggggggccgcccccttagggccggggttggtttttggttttaaaatttttttacccccca

SEQ ID NO: 617650 - DNA, 327 bp, Homo sapiens
cccgctcggggctggtgcgctcaccagcactgtaactttctttcatgaattcccactgatcacaaaccccacaccaccatctcactgacaccatgttcaaccatgtcttttacttacaaattccaggaactggtcttaggaaatccaagtatcaaaccaaggttgtggagtattccacctcaggaaggaatgctgaacaactgatttacagacttgttgccccagctagaccaccaggtagcccattactcaaggtaaccattacaaccaaatagtgctaacctgcataccctacccctcacatgctttgccaagccccagctgcgg

SEQ ID NO: 617651 - DNA, 684 bp, Homo sapiens
gaaatggatcagagcggggggtgtggacttccatctggagccgggacaggacctcagggggcaaatgacgaccgtctgtgacacgcaggcccacgtctgtgctagaaaagccaccccttgatatggggcgaggatgggacccgagagaccctcgccccaccctgcactggctcagcagccgggtccagactcccaggcctctggaaaacgaacctcggggggacgcagtagggtcacacagggcttcacccccagctcgggttcagtcctgactcagagacgacccggcccccacgactggaccccacaacgcacagggcccccgccggccaacaagaccaaggtcacgcacagcggtgctgggatcctccagaggactccacaggggaccgagggcctgcagggattcgaaaaccagtgccggacgcagccttcctcccttacagcaagagctaggagataaaacaggcaggccgggagagcagggcccgggtcgcgccttcctcacggctggaagcctcccaggttgacgggaggaatgatggggacggggcggggtacttggagaccttcctctgtcagatggctctgatgtttccactgttgctgtgagcaggacagggttaacttggcagctggctcctccacaccctgagcgcccacatccgtgccctccttgccccg

SEQ ID NO: 617652 - DNA, 803 bp, Homo sapiens
ggaatggtgtgtgagatgcgcaggcttgtgccatctggcctgcgacgtcaatgtcaaattcgcgccgacgcgtgtctgtgtccttggtcggagacctcatcgtgctacccatgcatttcagaactcactgccaagtagccctgaacaagtgagccaccatgcagtgtcttcagacttcattaagacacactgcatgatcctcgttcaatttgctcatctttctgtgtggtgcagccctgttggccgatgggcagtctgggtgtcaaatcgatggggcatcctttctgaagatcttcgggccactgtcgtccagtgccatgcagattcgctcccacgtgggctacttcctcatcgtggccggcgtggtggtctttgctcgttgggtttcctgtgctgtatatgtgtgctcaggactgttgagcaagtgtgccctcgtgacgtgtcttcttcatcctcctcctcatcttcattggctgaggttgcagctgcctgtggtcgccttggttgtgcaccaccaatggctgagcagcttcctgacgtatgctggtagtgtctgccatcatgaaagattatggttcccaggaagacttcactcaagtgtggaacaccaccatgaaagggtcaagtgctgtggttcaccaactatacggattttgaggactcaccctacttcaaagagaaccggtgctttcccccattctgtggaatgacaacgttccaaaaaggcaatgaaccgcccagcaaaggtcccgacacaagttagggtgtctcactccgtttgtggaatcgaaaatgcgcccggg

SEQ ID NO: 617653 - DNA, 667 bp, Homo sapiens
aactacaaatcctaatccaaggattcccaaatcagcccgcacatccacacgtagagcccgccacgaacctttctttctaactaccctccgctcccgcccgagaactcgattttactaaactacgcgcctccagaagctcgattctttatatttcgtattatttcgtgtccgctgatattgcgagggctactacgggccgaaagccggggatccgtgaattctggttctgactatagcgctgatagagtagatagctactaacggattgctttgtctgtctagcctcgcctcccgtatgcggggttaaatctatgtacgcgtttataattctgggtcctaagatccgggtcgagattctttatacggggtgtgcatgactgaatcctggcctcaagagtcctagctcgatctaaaagggaacacgagtcttaaaagaggggcggctctttgaggagatctcaccttcgatagatagcggagtctctcctatctctcaattcgcgggtattgccctggctggtccgtcctctagtatcgcctactggcggcttcccctataacgtcgggccgatgacccgtttacgactgatgcgggcgcttctttgcgtttggattttatttgcagagtttgacctgcggtcgtgagaactaccgactaaattcgggt

SEQ ID NO: 617654 - DNA, 373 bp, Homo sapiens
  misc_feature (13)..(13): n is a, c, g, or t
cccgcccattcgnggtgctgctggtgttgttgaggtccctgggagcattcttctggacttcaccatttctccaaaattatcagcgcagtcagcttcatatacccagatatggccacttctacacgtgaaattcaaactgaagataaaactctgactttggagtataaacttttgccttgagtatgaaaccttgacattgctgaaagaaaagtggaaactgtaagggacaacaagtttcaccaaggcacagtcttctctgataggccagcagagcagctaaggagaagacagatcattcaagaacttaagtcatttgttagctacagcatttccattgctgtgatacacattcagccattctggaggaaagcta

SEQ ID NO: 617655 - DNA, 300 bp, Homo sapiens
  misc_feature (12)..(12): n is a, c, g, or t
  misc_feature (27)..(28): n is a, c, g, or t
  misc_feature (34)..(34): n is a, c, g, or t
  misc_feature (171)..(171): n is a, c, g, or t
  misc_feature (189)..(189): n is a, c, g, or t
  misc_feature (205)..(205): n is a, c, g, or t
  misc_feature (271)..(271): n is a, c, g, or t
aaacccgtgccntggcaatccctgacnnaccgcngtgatgcccagggaagacagggcgaccgtggaagtccaactacttccttaagatcatccaactattggatgattatcccgaaatgtttcattgtgggagcaagacaatgtgggctcaagcagatgcagcagatcccnatgcccttcgcgggaagnctgtggtgctgatggnaagacaccatgatgcgcaaggcatccgagggcacctggaaaacaacccagctctggagaacttctncctcatatccgggggaatgtgggctttgt

SEQ ID NO: 617656 - DNA, 142 bp, Homo sapiens
agtacggtgagaaggagctgaggatgtctaaggaggggagatcccgggtggtcagaaagcactggtgtctggaaagcatttaagtgctttattaaatgttagtccctgctgggcatgacggctcacacttgtaatcccagca

SEQ ID NO: 617657 - DNA, 882 bp, Homo sapiens
  misc_feature (5)..(5): n is a, c, g, or t
  misc_feature (65)..(65): n is a, c, g, or t
  misc_feature (74)..(74): n is a, c, g, or t
  misc_feature (76)..(76): n is a, c, g, or t
  misc_feature (86)..(86): n is a, c, g, or t
  misc_feature (99)..(99): n is a, c, g, or t
  misc_feature (125)..(125): n is a, c, g, or t
  misc_feature (131)..(131): n is a, c, g, or t
  misc_feature (135)..(135): n is a, c, g, or t
  misc_feature (140)..(140): n is a, c, g, or t
  misc_feature (146)..(146): n is a, c, g, or t
  misc_feature (154)..(154): n is a, c, g, or t
  misc_feature (173)..(175): n is a, c, g, or t
  misc_feature (179)..(179): n is a, c, g, or t
  misc_feature (181)..(181): n is a, c, g, or t
  misc_feature (191)..(191): n is a, c, g, or t
  misc_feature (205)..(205): n is a, c, g, or t
  misc_feature (212)..(212): n is a, c, g, or t
  misc_feature (217)..(217): n is a, c, g, or t
  misc_feature (223)..(223): n is a, c, g, or t
  misc_feature (235)..(235): n is a, c, g, or t
  misc_feature (241)..(241): n is a, c, g, or t
  misc_feature (257)..(257): n is a, c, g, or t
  misc_feature (260)..(260): n is a, c, g, or t
  misc_feature (266)..(267): n is a, c, g, or t
  misc_feature (314)..(315): n is a, c, g, or t
  misc_feature (338)..(338): n is a, c, g, or t
  misc_feature (429)..(429): n is a, c, g, or t
  misc_feature (494)..(494): n is a, c, g, or t
  misc_feature (671)..(671): n is a, c, g, or t
  misc_feature (729)..(729): n is a, c, g, or t
  misc_feature (804)..(804): n is a, c, g, or t
  misc_feature (809)..(810): n is a, c, g, or t
  misc_feature (817)..(817): n is a, c, g, or t
  misc_feature (859)..(859): n is a, c, g, or t
ttttngaatggcaggattaacaatatctaaaatctcacttgtaggagacaccacaggcaccaganctgccactngngctggcaccngctccaccaaggncagggaagagcccaaatgtgagagtnggggtnaggntggcnccagcnctgaagcnaccactggtgctggtactnnnactngnactgttattngtactggtactggnaccagtnctggnactgcnactctcttgggntttggntttagcttctgctccngcntggatnngggctttggcccagggtccgatatcagcttcgtcccagttgcagggnncggcagcattctccgagccgagnccaatgcccattcgagctctaatctcggccctagccttggcttcagctgcagcctcagctgcagccttcaaatccgcttccatcgcctctnggtactgagctgcccattccttgggatccttcttttgtaccttgcaggcaaacttgaggactttnatcttgctggtctcatagtaagagcgcaggccccagaagaactcatattcagggggattgctattggggactctggcatagtccaggtacttctgcttcacaaactcatcagtgatgagcttcttcacgtccccaaagagtgaatgatgtatcccagggcgcaccaaacttgcgcanacctcccagatgacagcctcactggaccgatttccattcatgaagatgatgctaagangcacatgagcagaccagcttgggtgagtcttagtcgttccagtatgcctgcatcagtgggtctaagtgtgagagnatgtnnagtggtnttcttatcatttcttcaattgaatccaatacttctccaaganagctgctcgttcatgattcgggg

SEQ ID NO: 617658 - DNA, 101 bp, Homo sapiens
tggactctccggacttctctgttctcctccgtcttctcgggcttggtatttaccatgctcttgctgaagccggaggaggactcagagaaggtccaggtatg

SEQ ID NO: 617659 - DNA, 337 bp, Homo sapiens
acgcatctgtgagccgatctccacttgccattgtctctctacaagaagttactcaactgtaaagcctgcctaggaagacttaaaggagttgtcacccagtgaaggaaggagtctccaagagctgtttagatttgcccggggaggatgtggaggagactttctgcctcaacttcacgatctgccgagaaagctatggagtgattgaacagaaaaagctgatacctgggggagataatgtaactgtgtgcaaggataacaggcaggaatttgtggatgcttatgtgaattatgtcttccaaatctcagttcatgaatggtacacagccttctctagtgg

SEQ ID NO: 617660 - DNA, 861 bp, Homo sapiens
  misc_feature (144)..(144): n is a, c, g, or t
gaaagcggaggcagcgggggaagatggcggcggccgttccacagcgggcgtggaccgtggagcagctgcgcagtgagcagctgcccaagaaggacattatcaagtttctgcaggaacacggttcagattcgtttcttgcagaanataaattattaggaaaccattaaaatatgtggccaagacagctaacaaggaccaccttggtttacagccttataaccatcttttggaaacctaagcgtttaggggtaactgaaaggttatacagtaaaggtgtctgagcaagtaaacaaaatgtgacgcttcatgaagataaaaccaagagaaaccaagtctgaagagaccctggatgagggtccaccaaaatatataaatctgttcctgaaaaagggagataaaaccaattttcccaaaaagggagatgtgtgtcactggtggtatacaggaacacttacaagatgggactgtttggatactattattcaaacaagtgcgaaggaagaagaaaaatgcaagccttaaagttaaggtcggagtaggcaaagttaatcagaggatgggatgaaggtctctgtgaatatgagtaaaggagaaaaaggtcgatggagattgaccagaatgggcttagggaaagaaggacagctgatgcaaaattcacaagtgaaagctcatttggagtgataagtggtatgatggaatagagggttcagctaggttaggaatgtaaattgttgaaaattaacataagtgatttgcattggaggaggcctggatcaggggaattgttttggccttgaggaaccagaacgggaaattacgggaaagggaggttcttggagggaaaggtttggaaaaaatggg

SEQ ID NO: 617661 - DNA, 298 bp, Homo sapiens
  misc_feature (45)..(45): n is a, c, g, or t
  misc_feature (94)..(94): n is a, c, g, or t
  misc_feature (98)..(98): n is a, c, g, or t
  misc_feature (135)..(135): n is a, c, g, or t
  misc_feature (166)..(166): n is a, c, g, or t
  misc_feature (191)..(191): n is a, c, g, or t
  misc_feature (219)..(219): n is a, c, g, or t
  misc_feature (259)..(259): n is a, c, g, or t
gaaggttagctgcacaaaaatacaaaaaatacattacatggagtnccttaaaaaatcccctttttatgttggcctcaaacagagagagatctancccnggttggaaaatgcctaagtattaaaattctcctttcncctcaggctggaaggccctgtgttgaagtanggtaagaagagcaactagggtgacnggataagcatctgtaaggatgggcagcnggacccctggtcatgttcagaattatttgacgacttgganccaatgttctctaattaataagcttggtgagttattttc

SEQ ID NO: 617662 - DNA, 502 bp, Homo sapiens
ttttaagcggggggtttttatttctcccccccttccaagggggttttgaaagtgcccgggggggttttttcccgggtttggggtttcccccccttctggggatccccccccccaggggggggcccccttaggccccccggggttccccccccccctggggtttttcctggggcccctggttccccgagggcccccaaaatccctttgggccctccccttctgggggggccccctttttggtttgtttttatccccaaagtgtgaaatttttcccggggggggggggttgggccccccgttccttccccctctttttttccccccgggtccccccccccaaggggatttttttggcctttatgggccccggggggtcctccccctgggtttttgggggggctttttttggggttttttcggggggtgggccccccccggggccccccccccccccccccccccgccccttccgggtttttttttttggtttgaggggggggca

SEQ ID NO: 617663 - DNA, 117 bp, Homo sapiens
ggctgcttgaggatcccctacaagaccctgacgagatggctgctgctgaagaaaaagtggtagaatgaacaaggggagctgaagacctcaagaagccagaggggcagaagcaggaag

SEQ ID NO: 617664 - DNA, 1324 bp, Homo sapiens
ctgctgtgaggtcgaagcttccagtgtagctggaccgcagagactgaccacagtgctctggacatccatgagcccaatgtcccccacactcagtgcagtgatgatgtgcggaatgtgaagtgtgacatgggcagaaccagtgagcaattatcttgctccgtagccaagtcgtgcaatgggggcagctgttggccacactcatccatcacggtgcttggcagtgccccatggttgtctactgtagttattggagacactgcttgtggacattgcaccaattgtatacgacagacgcatggctagagagttgactattgccatctaacctatcctggcttgcgtcacagctgttctgcattcatgcggaccatactgtctgacatacctatagcatgacagtcccggggaatcattccatcccactcaaccagaagggcatccagcacgcaataaagcattcggaacaccctcatccagcttgctatccaccgccattggcaagccgtacaacatggttacaactgctggtcactcccccactatatgccaaagatggatgtagcatggagcagcgctccatattgaccccatagacggctaccctgttgccggcgcacagcctggcaaagcacccctctgatgactagcagtgccttgttgctacatggcactaggaaccgatcacaaaccgactgtggcaccacccctagaaccccaacgcagccacaaccccacgccgggaggacgcaggagaaaagcccctaccagccaacacgggcccggtgaacaacgaccaagcgccccagggcaccaaacagcacacacacgtaggcccccgaaaacaccctgcaaacgagcacatggggacactgaaagacaaccatgacacaagagaccagcagtcacgcgccaccagacccacagacagcgcacccaccgcctgacaccgccgcccgcccacacccacacacccctaggggacgcccccaaacaagacgagggcacctgaaacaccacgcacaaacatgaggaggaacacctgaagaccaaccacaaacacaaacacccaacacaccgcacgcacgcggcagagacagcgaccctgccacccaccaacacagcgagaccccccgaacacccgcctgagacagcccacgcgatgaacacatgccccgcacaccaacccccgccacacacacaaacaccaccacgaggcaacggtgaccgcggtacacaacacaaagcgcacacaccacagcacccgcgcgccacccccacgaccacccacccacccagcacccaccaacaacacccaccaagagaa

SEQ ID NO: 617665 - DNA, 697 bp, Homo sapiens
  misc_feature (29)..(29): n is a, c, g, or t
  misc_feature (289)..(289): n is a, c, g, or t
  misc_feature (360)..(360): n is a, c, g, or t
  misc_feature (365)..(365): n is a, c, g, or t
  misc_feature (380)..(380): n is a, c, g, or t
  misc_feature (384)..(384): n is a, c, g, or t
  misc_feature (390)..(390): n is a, c, g, or t
  misc_feature (394)..(394): n is a, c, g, or t
  misc_feature (414)..(414): n is a, c, g, or t
  misc_feature (426)..(426): n is a, c, g, or t
  misc_feature (450)..(450): n is a, c, g, or t
  misc_feature (467)..(467): n is a, c, g, or t
  misc_feature (528)..(528): n is a, c, g, or t
agcgggctgtgcgtcttgggttggcgtanccatggcgtctcgtgtcctttcagcctatgtcagccgcctgcccgcggcctttgcgccgctgccccgggtccggatgctggccgtggcccggcctctcagcaccgctctctgctccgcggggacccagacgaggctcgggactttgcagccggccttagtgctcgcgcaggttcctggtagagttacacagttgtgccgccagttatagcgacatgcctcctttgacgttagagggcattcaggaccgtgtgctttacgnattgaaactctatgacaaggattgacccagagaagctttcaagtaaattctcattttatgaaagacctgcncttanacagtttggaccaantggngattantcangggccatggaagacgaattngggtttgaaatncctgatatagactgctgaaaagtnaatgtgtccacaagaanttgtagattacattgcagataagaaggatgtatatgaataaagtatcagaccctttggctntgctgagagaggactcagatgatagtgacgaatgtctggcagtgaggacacattttggcattcttgctgactctgacagagtgattctgatggacttgcatttaaaatggatgtggtttactctttggaaaataatctataaaaccaacattttccctccaaagaaggt

SEQ ID NO: 617666 - DNA, 1443 bp, Homo sapiens
  misc_feature (1370)..(1370): n is a, c, g, or t
ggaagctcacgctcgcaatcgtgatccagagggagcgaggaggtcctaaatcccgtaactcctggtagtcgttagtttaccgctcatagcgaaatatgaggcctccacggcgaatgagccgcggactccatggacagcgaggtaagattacagaagactggattgcacacatcgatgatcgagtgacgcttggtggtggaatatggcgcaactcattactacctgcctaacaatgcatactcgttggcactataccgagtagtcactgtgcacaactcccaaggttggtgcagcgcagcgtagacgtcggaacttcctacgagcttgtggtgcccgactgtcattccattccacatcggcgtatcccagagacattgtgacccaacgatagacgtcgatgagctcttgtaagccgatcctgatggagccatcagggagacactcatcctgagatgctaacaggaccgactcgaagctccttgcaccgattcggaagcattcaggacccatggctacatggttccagaaggctatccaaaaccttgggcgtcacgcaaatcggagacgtggtgggcggcactggtcgcgcgcgctgtgcaaatttggcggttgattgcccagagggtccccttggcaaggaaatgccccccgtaccgtgacaaagtaagttccaggaaaagcttgaaagagctttcccaagaaaaactatgtcttatggcctttgtaatcgagggagaggggaccctggtggctttgaccgaggggaatacaccttaggatcccccatggctaattctaatctttaactcagacggatctctccatatgctccccccatattcttctttgacaatcgtgggaaggacctttgccctaaaaactaaccaatgcatccgttaggtctaacaatgtcgtaactttctggggtggcgtggaatcaagacttgggggtctgccttagaccatttcccattggctctttcctttggccttggaaatgtgcgggatctgttaccccgtttgggggatctccccccccgatgatagtgtccccgcgtccctgggtaacacacaatggcccttgggcaaggagcctagaggaaggtattaaatatgtggcacggagcgccctttgcttacaggtggagcatgtggacccaagagttcatggtgcctgaaaggtcccttcctctcagaggccccgtttccccgcatatggtctttccgatggcggggtccccaaaatggtcgctgaggcatcttatcacacacgggtaatggccttccaaccggggggttaaaggccactaacccacaccctcgaacccaattctcaaacgttggacagggcggcctagagcgtgattacnccgggcttgcatgtctatagattgcgcccaggcgggcccctattgaaaagggagactcttcccccctccactg

SEQ ID NO: 617667 - DNA, 876 bp, Homo sapiens
  misc_feature (29)..(29): n is a, c, g, or t
agcgggctgtgcgtcttgggttggcgtanccatggcgtctcgtgtcctttcagcctatgtcagccgcctgcccgcggcctttgcgccgctgccccgggtccggatgctggccgtggcccggcctctcagcaccgctctctgctccgcggggacccagacgaggctcgggactttgcagccggccttagtgctctgctgcagtgtgactcgtggtgactttgcttgcctgctatgtgcaatggtgtcagtggatttggtgccctggtggggtgttgggggtgcctgtggtgcatcctggtggctgctgccagctgcaagtgcagggtgtgaccctggtggggcagccggctcgctccgcagcccccgctgcctaaaggtgtttagttgacccctgactgggagtgccgggtgacctcgtaataacgagcaagagcacttgactcgagtccagcactgctggtgctgccgcttaccgaaacttttggacaagtctcctagcctggctcacactcacctgcaaaattgggatcctggtctctaccttgctggagtagcaatgaggattagatagagttaatgcgggctagagcacctcgtcacggtatcaaaatacgcggtcaccgtaatagtaggtgaaagcagcatgcaaaggaggcagccaacactggcctaacagccttctccagagcggtttctctctgcagttctgtccttactcttcctgcgcacctctgcctgtgtcagggctctggcagtatctatgaacagccagtgccttgaccaaaggttgattggcggtccatatgcggttttcccaccaccggccggttggttgccccgtaggggggcgccaaaggccagggaggggcgagaaac

SEQ ID NO: 617668 - DNA, 440 bp, Homo sapiens
gggttgtcgaggcgtcgccaactcacatgaaggggactgactgtgggcacgactcacttctccactggtctgctgttctgaaatcatctgattggctttctgatcgtttggcagggtcgtgactgctcaataccctcactctgcaaattggacttgcccgcgttcctgaagcgctctcgagctgttctgtaaatacctggtgctaacatcccatgccgctccctcctcacgatgcacccaccgccctgagggcccgtcctaggaatggatgtggggatggtcgctttgtaatgtgctggttctctttttttttctttcccctctatggcccttaagactttcattttgttcagaaccatgctgggctagctaaagggtggggagagggaagatgggccccaccacgctctcaagagaacgcacctgcaataaaacagtct

SEQ ID NO: 617669 - DNA, 361 bp, Homo sapiens
agcaggtccatagcttactggagcaacaagggcccagccgacgtgcggttgaagctcgagctgctcaagcagccctgagacgagcacacagctggccgtcgtgacgatgtcccggcgctgtgaactcagaggagaacttccaagaaccgggaaaactcgccgcatcagatccagcacgccttacgtgtctcggtcctgaccgatggcaggaggagacgcgccgctgaatcggcgcgttttcgggctgcacaaaccacgggacggagcctcgagcaggcgtgcgaatagcagctgcagcgcatcaggtctggacgcagagcctgaaacctcaagcccaggagccagcatggatctcactacg

SEQ ID NO: 617670 - DNA, 1367 bp, Homo sapiens
gactgtttctttaaaaaaaaaaaaaaacaattgtgtccttcccctaaaatgggcttatcatgtgatcagggattccagggcagtggcagaataaattactcagaaaactatagggtcataggccttttatacaggtaaggttttggcattaaaccctggtgaattaaggggaaatactggtgggctggtggtgtaaacaatatggaaaccaagaatcttctgcccattattttaaaagggttaatttcctgggtgtgggggtgttgcgagagagacacaaaaagggacgggaacaaaatctacaaagggaaaagataccacacgcagagagccacgcggaacagaaaaaaagaaaaaagataaaacaccagtaaagaagagaagaggaagagaaaacaaaacaggcaagaacagcaacaaagcaaaaaaaagaacgaacaggcacgcggaagagaggaaacagacgaaaaaaaacgaagagaaggagaacaagcaggaaaagacaaagcggacacagacagaaggaaaagaaagagacaggagaaaagggagaagaaaagcggaggaagcacgggtcaagacgaggcgagcagaaaggcaggagacagagcacagaaagcaggaggcagagaagagagggcaaggagagggagagaggcggagaggggccaggaggcagagaaagggacgggaacaggaaggagcgaagacgacaacagaaggacaaacagaagaagaacaacagaaaggggagacaggagggcaaggggagaagggaaaaaggagcgggctgggagaagagggaagagaagaggagaagaagggaaaagaaggaagagagagggagagggaggagaaggagaggaggagaggaaaggaagggggaaacgcagaacagagaaggcgaaggaagagaggggggagggcaggaagcaggaggaaagaggtggagaggaagagagggagggaaagaagaaggagaaaagagagagaggggagagaaaagaacgagggcaaggagggagagggagggaagacgcgggaagaggagacaggaggaacgggagggaggaggaaagagagcgaaaagagaacaagagaaagaaaaagagagcagagaggacagagacaagcaggagagcggcacgagagacggagagacagcgagaagacacaaggagaagagagagagaaatgagacagaggagaggaggaagagagaaggagagaaacggagacgagggtcgaagagcaggggacgaagagagacgaggaaagtagagagaggagagagagaagagaggagagagaggaacggaaagagacagacaggcggaggagcggggggagagagaagtggggacggg

SEQ ID NO: 617671 - DNA, 135 bp, Homo sapiens
tcttcctggtggacacattgcccccctttcatgcagtcggctctggttctctcccacctctctgaccattccttctcaggctcctttgcgtgcgaggcaatgccatagtcccaactacttgagaggctgaggtgg

SEQ ID NO: 617672 - DNA, 365 bp, Homo sapiens
tccccccgacccccccttccatggggccggttccccgattcctgcccccagttctccaaaaaaccaaagggggtttgtgaaagtttcaaacgggggcttttctgtggccgggccacaggggggggcccggggtggcctgacctcccaggaaagccggggggccttttcccccccacccggttccgggccattgagactgggttttgtcccccgtttcgcccggaactttcccatgcccagccctccctcagggggcccgcccgttggggaaaagtcggcccttgggttttttttcttgagtcattttatttttatcatggaatagggggggccccgggtcccccccaataaaagggtttttccta

SEQ ID NO: 617673 - DNA, 222 bp, Homo sapiens
ctagaggatccccccgtaccaccctgaagtcaaaaaccatgggactccttttggccatagcactggagagcattagagccagtccaaaagcacctccttactcagtccatttgagttaatatacggacgcccctttcctccttacaaaaacagggcccccttctaaactctcaggctaaggagaaataaccttcccaaacaggtcttccccttcaatggagc

SEQ ID NO: 617674 - DNA, 275 bp, Homo sapiens
agcaagtggaagcaagccttcaatgccacggttgtggtgcggcacatgaggaaactgcagctgggcaccagccaggaggggcaggggcagacggctagccatggtgagttgatgacaccagtggttggggcagggccggtagttggctgttgctgtcgagactgctgcgtggagccgggcacagaactgacccccccactgtcctaccaactctagggccctgaacctcgggtcatgatcctccgcgtgggagggctttgtggaagcctgctact

SEQ ID NO: 617675 - DNA, 610 bp, Homo sapiens
gtcgccaaaacaggatggggcccaatttggcttggagcttcgttccattgagagtctccctttggttcccccgggaagcaacaatgggccatgtgataaccgcatagaagagaaagctcctcatttggggcacacaacccctcaaagaggcccacccccctcttgtgagaggtgcttttccaacagcccaaagaggaattgtggctgtggagaaaattagggaggtgtgagagccccaccagacccagcatattctgcccctcctagaggaaagagtgtaaagggtgcccacctggaatcaaagattaggcaaagaaaatcccgaagcccctgtgtagaccccccagagcgcggtggcttgaaactcttatttggaggggaaattaatgaaaatgttcttggtttgctgggagtattggtgtcgcaaaagttccacgctgttggtggataatttctcggagagtgcccctcttaagggggtgttccagaagtaagcccactgttttcctgcttttggccccataacacaaaggccaagagaaggggaaaacccaaatcaaaaaaatttaagggggaaaccccttggaaaaaaattttaaaacccaaaaaa

SEQ ID NO: 617676 - DNA, 145 bp, Homo sapiens
ggtacatgaacccaagtagaaagtggacttaacaaagtatctggagaaccaagcattctgctatgactttgcacttgatgaaacagcttcgaatgaagtcgtctacaggattagtcccattgcatccactattttcccatccttg

SEQ ID NO: 617677 - DNA, 632 bp, Homo sapiens
tttctcacggccggtataatcgggtctttattcaaaaaaagctgcccaaaagtgtttcgaccttatagtggaataatctcaaatttataaaagttttagtgcagcagggcttcttcctcctcggtatagatagggtttctctcctcgtgcgaggctctcttttgcagggggcgtggtttctgggaagctggggtgccttttttctccccaccaagagaggcttctttcgtggtttctttaacacaccaaacaagacaagccttctcttttcctttctcttctaccttacccacagaggctttcatgtgccgtggaaaaccggcgcggcctttcttcatatcgtgatatgtggggctttgtgtaggtgcgcggtgtagcgtgacaaagaccagcggtggcgcttttatacccacgccgggaagacttgggggaaataccccgggggccgtgggggaaaagaaaatggggtgttcccgcggggccgcaggggtgccctgtgggccaatatggggggggttataagcttctcacaacaagtgtaattctctcagagtgttttttacacagaggggagataccatctcccttatagagaaccatcgggggacagtggcacatcttttcttggggcg

SEQ ID NO: 617678 - DNA, 326 bp, Homo sapiens
ggtcgacggacattttaacaatattaattcttctaatacatgaacatgggatattgttccatttatttgtgtcttcagtttctctgatcaatattttaaagttttcattgcagagctctttcacctccttggttaaatttctttctttttcttttctttttttttgttagctattgtaaacaggattgttttcttgatttccattccagataatttgctattagctggcatgcagtggcgtgatcacagctcactccagccttgacctcctgggctcaagtgatcttcccacctgagcctcccgtttagaaataatactgctactg

SEQ ID NO: 617679 - DNA, 931 bp, Homo sapiens
gaagcgccgtagtggtgtccttgatgtcggggaccctacctggaacccatcaggaaaaggtgtcggggcttcataacacgggcagctgacgcccagctcgagtcgtggtgcgtccagagtagacaaataaccggactaccggtttatggcgtatgttgtagactgaagacgccgcggttatgaagaacctataagaagttggagacatacggagtagtcggcgatatggacagccaagacttgactcggtagagtgagtgtccgtagccacatgacatgtctgagttactcgtcatgcagtccatcggacatgactcctcttgccctgaagtctccttgggggcacctcgctatgagatgataacgacttgctagctagaggggtctcgccagcaactggttcgcttgacgtaagtgacatgtgtcattcccttttctgcagcaaggccacatggtaatctctgacttgagctcctggcgcagaggattgaggaaccagtggtagagaagactgctggacgggagaagcttgggggaccgaggaggtttcgcgggctgaagggaggataacgccacgcgtggatgtgctcctttctacaactgtaacgtggtacgtgcccccctgccccgaggaggtacaaggtgactttgccctcaatgggtggtggtatctggtgatgtgatcaccggggagcgggaccatgtataaacgagagagacctcgatctaatgaatggcgttgcgaaggtgaacactctgttcactcgatctatgcactatgactcttaagtaaacatcatccgtggaaatggcaaagtgctttccagatccaaaagggaatttttttggggactttgtcttctaaaaacttggaaaccttcttctgggagccggcgcggcctagcataggaaagggccacttacttggaaa

SEQ ID NO: 617680 - DNA, 152 bp, Homo sapiens
gaagcacctccttccctaaacacctccttcccaacacctccttccccatcacctccttcccaaacagctctttcccaaacaccgtccttcccaggagacctccttcccaacaccgcctagtttagaccaacccctgttcggttgagcggaga

SEQ ID NO: 617681 - DNA, 1054 bp, Homo sapiens
  misc_feature (1054)..(1054): n is a, c, g, or t
taactttgaaaaaattaatttattcccatgatgggggctagaaggagggcccaaagtctagagccgtggttcatttgtgccccctttgccttctttctttccagattgaagagaggcttagctgaggccttgaacaggcctgtgggatggctcatggggcttgagggcctgctcgtggcaggatggcaagcagacacgtggacagggttcatttggggcggccagatatggccaagtcttccagacattcttacacggactgagaccattttgtgcccgcttaatgggtgtgtaagaccagggggcacacatgacaaaggccatacatacatacaagcattccttgagccccatggcgtttacagaagggtccagtagctttctggggctccaaatattgtgcccaagcggacatgagaagggtgtgaaacacatattctctgtggagctaatctggggagactactgtggcacgcatgggggtgtgcgccactactgtacaaacatctttctaaaagacctatctcttgggtgtcacatcattcggctgcactgggggacgcccaataggggcaacaatgtagggcctataggggccacaaaggagaaaacacggattcaggggagttgttataagaaaacgcctaacaagaagagaacccccttcatccccccacgaaatggttagcgaaccaacccccccacggttggatgagagaactgagcagtatctacacgcaatgaaggataaacgccccccccaggataggaacgacacagtggaggaacagcaccacagacagtcggttaaataatcaccaatcacaaacaagaaagacacaaaagttggccgcgataagagccattgagggaacaaacaagaacgtcgcataaccagcagtagcagagaggctacacaagagagaggacgaggccaaaaaggacgcaaccccccaggggatggttaaatagagggccaacgagcgacccagacaggacagacggaccccattccaaatgacgataaagagcggggagagataacataggggan

SEQ ID NO: 617682 - DNA, 128 bp, Homo sapiens
cttagaatgcactttgtccttgagatcactttattctcatattcatgccatctttcttatgcttactctttccaaaatgtatattttcctggatcagtatttagttaatttctcagcttagaattcct

SEQ ID NO: 617683 - DNA, 130 bp, Homo sapiens
  misc_feature (18)..(18): n is a, c, g, or t
  misc_feature (85)..(85): n is a, c, g, or t
  misc_feature (123)..(123): n is a, c, g, or t
tcccacctcagcctccangaatagcggactacaggccggcagcaccatgcccagctaatttttgttgtgttgtattttttgtggnagatgaggttttgccatgttgcccagactgtgtctcanaactccg

SEQ ID NO: 617684 - DNA, 1499 bp, Homo sapiens
  misc_feature (813)..(813): n is a, c, g, or t
  misc_feature (891)..(891): n is a, c, g, or t
  misc_feature (1135)..(1135): n is a, c, g, or t
atctgtatccgccccttggtggtttggcttttccctccttttttttccttttgctcgttgatatatttcctcctcgcgtccctctttatttgtcctcgtggtagaatataatcccctttgttgaaagttgtcgctcgtgtggtgccccctgttgtctggagcgagttgcttttctcttatatctctcccggcggctgtgggtttgtcccctcgcttttttatcgcagggccgcctgacacattgtctcttggttgtttgttgagaaacgttcttatgtatgtttgtttgttgttgggtgttgtataactcacctccccgcctcctcgtcccacatggtgtcaggtgtgtttgcaaacacacgatcgccttcacaatctttcttgtgaaggataaggagtccttttaaaggttgtttttcgttccccccccagcccttttgtggcgacgccaccatattataaccttccgcctcttttttttatgtggaaagacccctggttgatataagggtgttgatggttttcacaccaccacggtaggagaaccccccgcgtgtggtgcccccccacgacgagaaacctcccctcggagaatttttgtgttttatataataaattataaatacactttgggggagggaccacatcggtggtgatatttaaaaggtgggggccccacaacagggtgcctctacaccactctcttaaaaactctggggttttatattgagagactcttttataaccccgcacctgtgtcgctctcacactcgggtctttctataaaacacatctgtctcgagaagagaattncatctctcttctgagagcggggtagaggggaagattggaaatggctccacacgttggttccaccacatccacacaagngagatatccacgccactttattttttctatgcccacgcgcacatctccacatcttctctgttttataagcccctctcgcacactcgctttatagagagaattttgtagaggttatcacactcgagatatatgtgcttttatatatgctcacatatacctcgagatgttggccctcgcgagagagaatttgggtatatgtgagaattttatatatgccactctcacgccacgcgaccacgcgcanaaatggtgagatgtatatttgtatatgcacatgcgcacaatatacaaggagaatgagcccgttctttgtttctacacacgaggaaatgtgagaaattggagaagctcacaacaccccctttgtatattcccacaaatatagggtcttcacaacacattttggtaaattttcacatttaaaattgttatggagggcgttggaggctaattagttaaatctaatcttccacaaaacacccgtttaaataatagcacctgagatataatgagatgccacgttgtccaatggagatgagagtgagtcacaactaatagctctgctagtaattgatttattttttttccataaagttgcataaacccca

SEQ ID NO: 617685 - DNA, 567 bp, Homo sapiens
  misc_feature (307)..(307): n is a, c, g, or t
gataatgtggtctggaattaagagcactaggtttgatttgagatcaagctccattatttactaactgaatgactctttgagttccagtttccttaaccacttaaagttattatgaagactaaatgacatatggtaaattaaacttttgcaaattataaagggctttgcagaagtaggacatttataacatgttctgttcttacttcatgatggtttagtgatttatattctctgactgtaagttccatgagagcagggatgacacgttttgttcagattgtaccccagaaacttgtatagtggcacntaatagacacccataattgtgtgtgcaactctatctttaaagaacgccactactacatctagaaatatatttcaagaaatctatcggcttaattaggtaatgaatttcaattgtatctcaaagcgttccttatatttagaagacacataagttttgtttttttctttcaacttatataagtatcttaacatgctacttctagaatattttaattgttaagaacaatttcttaataaacttccactgtcttcctgagaaaa

SEQ ID NO: 617686 - DNA, 175 bp, Homo sapiens
tagattgactgtcatcggttaacctaaagcaactgttcaggacaagcctctactgtctgcctggactttgaaaagcagagttccacaggagatctttccagcatctcgggatcagaagactcagactcagccagtgaggaggacttgcagaccactggaatcgggaagagggcta

SEQ ID NO: 617687 - DNA, 412 bp, Homo sapiens
taacatatagctaaaccctattaaccatagcatcaagatacaaacagagtattgatttttcatctcctaacctatcagtacaaattaaaaagatcaataatatctagagtcaaaaaagaaggtacaggaaaaatggttattttcagccactgctggtacaggtataaactagcatagccaatttaggtcaatttgacattattaacatcaaaatctcatcacccactaatgccacttatagacattataaatgctctggaaagtcttagcaatacgaattgaccaagttagaacacaggaaattcagagcctgaagaccaggtcttctaattaaccgaatccataaagaccaagaccaaaagaataagaaattatgaagaaggcttccaagacgcaggacctggggggatcc

SEQ ID NO: 617688 - DNA, 124 bp, Homo sapiens
  misc_feature (31)..(31): n is a, c, g, or t
acgggcgacctagaggatcccggcaccatgngctggctgagtcagattagaatctcaggctatatgcttataaaaaattttaaggatctgtacccactgtaagattaacagtgatttctgcctt

SEQ ID NO: 617689 - DNA, 149 bp, Homo sapiens
ctagaggatctcccttcacagacttgcgccgatgtaagcaggaacccgtgcgcacggatacgtgccgcgctatggcgtgcgcttcaagcctacgactacctcgagtgctctgccagaccaaggaaggcgtgcgcagggtcttcgagacg

SEQ ID NO: 617690 - DNA, 469 bp, Homo sapiens
caaattgttagacaaacatgttagcaaaagaagatagcccatctcatattactcatattcgagcacatactaatgtaccaggaactataactaaggcaaatgaacaagctgacttgctagtatcatctgccttcatggaagcacaagaacttcaggccctgactcatgtaaatgcaacaggattgaaaaacaaatttgatatcacatggaaacaagcaaaaaatatagtacaacattgtgctcagtgtcaagtcttacacctgcccactcaagaggcaggagttcatcctagaggtatatgtcctgacgcattatggcaaatggacatcacacatgtgcctacattaggaacactgtcatatgtccatgtgacagttgatacttattcacatttcatatgggcaaactgccagacaggagaaagtactacccatgttaaaagacattaattatcttgatacgcagtcat

SEQ ID NO: 617691 - DNA, 117 bp, Homo sapiens
  misc_feature (109)..(109): n is a, c, g, or t
ccggagttcagtacttaatagactttctgtatcttttgtctagaaaaatgagactgtactgtagttcagtgtgatgccactaattttatgtatattttagtgtaaatgnccagcagt

SEQ ID NO: 617692 - DNA, 887 bp, Homo sapiens
cccggagtcacttgacactacactatgaatagtagccataaacgattcatcactgatcctaacgcggaatagctagatatagtcgagtcacaacagtcaatatccgtccctacgtatggcgctagacaaggtccgtaatacatactcgccttaggacatggatagcatacactcgtcatcaaccgctcgaacaacccgagctactcctcttaggcaatgatagctcgcactatcagccaatcactagtcacttaggcgcgccatgccgaagcccagcccgagacgggagacctagcaccccataacaatagcctcctacaaaactcattccacaccacaactatctgcgccccttacatcctaacgctacacactctcaaccccaacacaccacctacagtcccaacacttgtcctacaatacccatcacaatacgaataccccacaccacaacctcactccttcaaccttaccaccaaacttagaaatcaactgacacaatttcatcccctacacaccacccacacacccacccccattaccctcgtcccgcatcacgtgccaacacccatcccatcgcacaaccccttcaacccatgtcaacctcaacaactgtcacttactaaacgaacaactttccaactaccccccattccactcaacccctcattcaccatctccttaccatatactcccccacaccactctccacattccaccatcctacaacccccccgtcaagtctaccgacagacctttcgctcttacccaccacaccacgaacccccatctaccaacctcctactcaccgcacactcccaccgccataacagcacttacactcgccccgcccttacgcccttcacaatcaccctctacacaccaca

SEQ ID NO: 617693 - DNA, 349 bp, Homo sapiens
  misc_feature (14)..(14): n is a, c, g, or t
  misc_feature (44)..(44): n is a, c, g, or t
  misc_feature (52)..(52): n is a, c, g, or t
cctagtcaccgcgntagaagacatgtatgtttgtagcatccaantattcgtnttcaaatgaaataaccccttctatcgcgggcgctgcttgaaaacctaagttgtttaataaccgaaaaaaaacctgctgccgtgttgcttccaaaaaggtgcgatatttttttaatatccattttccgcgatctgtctcgatgatggaaacgtgcggcttgatgaacgtgcttttttgcacatttatgccatattccttctcaagaaatgggaagagacgatgcgaatcatcgtctctgcgctgtttattcatcacgttcactgctttccccatattgtggcatacgcgggtaaactt

SEQ ID NO: 617694 - DNA, 150 bp, Homo sapiens
cgttaatacatcagaactatatacaatcaacttcgtactaaaaacactcgccattaaacaatcaccttcctatgaatccgagcatcatacccaacgattaccgatcatgaccacactcaatacatttcactactgaacaaacgcttcctt

SEQ ID NO: 617695 - DNA, 128 bp, Homo sapiens
caacgatggtcctcagctgaagatcggaggagctgagattctagttagagggtcatgcagcagaaggctcgagggatggagctgattgttctatgattgagggacccatacagactggcgacacctga

SEQ ID NO: 617696 - DNA, 200 bp, Homo sapiens
cccagggggaaggtgcagcccctcatctttcagtgtgggtgcaacagtcaacctccttctcccaggaatagaggtattctggggaaggtgagccctctatccaggactgagaaggcctgctcacctcctcgggagggaagcaccagggttggtggcatcggaggcttaccactcctatgactcctgttttctctctcaca

SEQ ID NO: 617697 - DNA, 347 bp, Homo sapiens
taacccatttggaacccggccttttcttagccactgccttatcaattacaggatttgccggtaaaaacagactccaaaataaagggttttgggttaacctgggttattaaaggtgctctatgtttggaaaccgaccatctttaaagtctgattatttggatcccagatttgcagctgccttgggcttgaatcccagcaatgtttaaagggggaaggccgttacctggtgatgtttttttactggatcaatgaaaaacaaattgtcatggccgttcttgcccgggacttttccacaaaaagggttttttttttcaggatttccataaaaattgatatgccccgcccga

SEQ ID NO: 617698 - DNA, 137 bp, Homo sapiens
cgttaccttcgcgcttctgtccccaccatactgaatctcctctcacagtttccatgtagaccccttgaagaggggaggggcctagggatgccgcaccttgttcatgtaccatcaataaatgtaccctgtgctcaacc

SEQ ID NO: 617699 - DNA, 424 bp, Homo sapiens
  misc_feature (32)..(32): n is a, c, g, or t
  misc_feature (63)..(63): n is a, c, g, or t
  misc_feature (170)..(170): n is a, c, g, or t
  misc_feature (243)..(243): n is a, c, g, or t
  misc_feature (258)..(258): n is a, c, g, or t
aattaccgaaatttaaatacgacctcacctanagggaaatttggcccctcgaggcccaagaantcggcaccgaggggaatccaggagacccaaaacccacaacactgccccggaaccccaggatggcctacagttgttcaaaggtatcgtttttagcccctaacccctanaagcactgggggagactgcgcagttcatatttgatgaatgacctcagtcttatccaatgttgtgtatcgcaantgtaatctttctaancttttctggtgatactttatctccgaatatacaaatgtagtagagaagggatgttgtggattttagggtcagggacctttaatgttactgcccagtgttgcccttgagctccagccttccagatgatcccacataagtgtaggctaactgtaaacggttaatacaa

SEQ ID NO: 617700 - DNA, 106 bp, Homo sapiens
acaaatttcaagtaggtttcatctggaatcacggggggacccaaatagtctcagagcccatattctacttccatagggaaagggtaaaacaaggcttaagtaggcc

SEQ ID NO: 617701 - DNA, 278 bp, Homo sapiens
ggcccccttttttaaaagtttccccccaaccttttggttggggtggggggaagaaaaacccctttttgggccggccctgcccccttaaacccgccctaaaggggaggggcccctgttttattcctggggcccccccggggggggggggggccccctgtttttttccggggggggggggccccccccccccccccccccccccccccccttttttttgggaaaccccgggcccccttccaaagggttttagggggtttcccaaaaatttttttttttta

SEQ ID NO: 617702 - DNA, 385 bp, Homo sapiens
gcgcactctagtcaacaaaaataactagtagtacaatagaatatttataacagtatgccaacatcactactctgggcttggggtcattattaagtaaaataagaattactcaaacacaagcatcttgatactgctgcagtcaatccgataactaagatggctgttcagtgactaatgagagggtagcccgtacagcgaggataagctggttgatgggatgattcacaagtcaagtggaatggagagggacagtgtaagatttcatcatgctcctcagaatggcacacaatttaagacttatgaattgtttattactgaaactttccatttaaaattttcagaatgtggttgaccgtggactagaggggcgggggatctctagagt

SEQ ID NO: 617703 - DNA, 266 bp, Homo sapiens
ggatgccgccgggggtccccttcctccccctgggggccaaagatttattttttataaaatccttaaatttggggtgttttggggggggggggggcccccccccccgcccctgggggcctttttttttttttttgaaaatccctttgggggcccccggcctccctggtggggggatttgcccccgcccctgggccccccccgttgttgcctgggcggggggaaggggggggccggggcccgttattttttaccctggattcctttta

SEQ ID NO: 617704 - DNA, 103 bp, Homo sapiens
ctccagtgggggataacgtttcctgcctgtctcccttgtgttttaaggacctctattgttctagtgtctagataaccattcacaaataatgaggttgtgttta

SEQ ID NO: 617705 - DNA, 144 bp, Homo sapiens
ctactaacgtcctaacctttagctggaagcggtttctgatttacagctctaggtactcccagacatgtaggtgggagagatttggtttcaaggggttgttagatggagtaaattttcttttgttttattttttttttaaacaaa

SEQ ID NO: 617706 - DNA, 300 bp, Homo sapiens
atccccgtcttcacgtattcgtcaccaggagcctcctaggccattcaagacgattactaccctatgccagccccttaaacatcccgtccccacactcaagcccgattgatatttcctattcgcctacacgatttctccgatccgtcccttacctcctcggactcctgcctcactcatttatctaccaaccaccctactatctatcatcctagccatggccatccccgttatgagcgggcgctgtgattatgggctttcgctctaagattcaaaatgccctagcccacttcttaccacaag

SEQ ID NO: 617707 - DNA, 147 bp, Homo sapiens
gagtccttaccgggatggtcatactaggtggcagtcgtgagccttaagcactatgaaagctaaaggttgctactttaagaagggaactgagatcgtgcaactacatgctactccaacaccttttctggggtctgatgtcgcgttgca

SEQ ID NO: 617708 - DNA, 224 bp, Homo sapiens
gctgcgacgttgtgttttttttgttgagatggagtgtcgctcaggagtggggggatctaggctcacggcaaccagcggcgcccgggtttcaccatggtgaccaggctggtcttgaacttctgacctcaggtgatccgcccaccttggcctcccaaagtgctacgattacaggcatgagcaccgcgcccggcgacttttttttgttgttgtgtttcactgtggac

SEQ ID NO: 617709 - DNA, 523 bp, Homo sapiens
gaccaactcccctgctgacagccttgggccctgggtcaaagagccagccacctagctctgggaagctggttaatgctgatgtgcacacctgggaacagagtggacaaatcaaataattcccagaaatctgagctggagcccctacccatgagcctgttcttagaggaaaggcgctgcaggaatgaaagtgaccacgctgcaaaatcactgttttgaccctctttgactgagatgttcttcaaaataaggaccatattttatagtgttgcctttgaggcaagctcagaagctctgcctctgatactcgcttgctcctggtgtggctttagaaaacaaaacaaacaaacaaaaaaacaaggaaaaacaaattgtgaaagtctgcccttatccctcctaaacctacaaggctcacttccaataccacctcctctgtaaagttttttcccaactgtttctctacatcttagaattactccctctctcatttgtctggggtgaggggtggggatgaattttactggtc

SEQ ID NO: 617710 - DNA, 313 bp, Homo sapiens
taaagccaaaacatggatgaacctaggaaacattatgctaaatgaaataagccagacacaaaaggataaacatggtgattccaattacatgaaatctctagaataggcaactttatagagttagagagtagattagaaggttccagggactaagggaagtggaatggtgagttattgcttagtgggtacagtttctgtttggagtgatgaaaatgtttttaaaatagaggtgatgaaggccggatgcagtagcttatgcctataatcccagcactttgtgaggctgaggcaggaggtcgagggtttggcttta

SEQ ID NO: 617711 - DNA, 1254 bp, Homo sapiens
  misc_feature (258)..(258): n is a, c, g, or t
tttgtttgtggtactggtgttggggtggggtactgttgcctggtgcgtggtttgtttggttgttggtggtggggggttgctggttttggtgtggtggtctggtgggtcgtggtgttttcatttttgtgcgctcgtgtgggttgcagtgtgggtgcgtgttgttggtctgcgttgtggggccgtggtgtcgtgtgtgtctccctctggtgggtggggctattagccgggtttgtttatgtgtgaccctcccgggtccgnctggtgtggccgcctcccgcccaccggggtggtggcgctcccgattggatgtccccccggggcctgggtgccggcttctcgggacatttttgcgcgtttgggctcgggggacagggattcaccccatgtttgagcaacccgggggcacccaggctatggccccccttatggccctttttaaggggacacacacgatttagaaaccacagagtttgtaacccccaaaaagacacgcggttggttaacccggtttccgcggatttttcccccgggattattctcttcgaacccacagggtgtccccgggaacgctttgggccgcccacacccatggggccccgcgtgtttgcgccccacaaaacccccctggaaagaaagggccgggccccccggggtgcaattcaatatagggaagaagtgatgctagacaccgggcgcctctggggcgacacacagagactttcgcaacaccgcggaaccacaaggggcggcgtgggttgcggagagggggatgtctcccccccttagtatccccccccccctcaataagcttctccggcccaccacacgatatataccacaggtttatatgttcacccgcacatttgagatgaaaagcggagaattctcagaagaagggcccaccggtaaagagaggtattttccactccacaagctccccaggagaggagaggagagaagagagaaaaggagagaagaccacactataatgtgttcctcgagaggtttccacagcccctggagatcacacagcgaggagattatattgtaaatatagagattcctcgagcacctcaaggagaattgctgaaagctctttggaacttcggcacgttctgtccacaacctcttcacggtcacctcacgcctcacacacacttgggatgaatttccaaaacgcgcctccggggagacctcgtttgaaattttttctgtaatgctgtattattttccataaatttggggccacagcca

SEQ ID NO: 617712 - DNA, 962 bp, Homo sapiens
  misc_feature (962)..(962): n is a, c, g, or t
gaagttcaggagccaagatcgccgtcattgcactgcagcctggtgaggggtgtcgcaaaccaccatggcacacatttaactatgtaatggaactacacatcctgcacatgtaccccagaacttaaataataataataaaagatcacttgaggtcaggagttcaagacaagcctggccaacatggcgaaacctcacctctactgaaaatacagggtcttgatctgtcgcccaggctgcagtgcggtggcatgatcctgtctcactgcggcctcaaactcctgggctcaagcgatcctcccacctcagcctcccaaagtgttgggattacaggcgtgagccactgcgcccgggcaagaccttttttttaaaaaaaaaaaaaaaaaaaatttccatttcttttttcctccagttttgggttctccaaataaacaagaagtaattggggttcaaattaagaagtaggccgtaaacggatagtacagggggaggtgctcacataatgtttctaagagtggtgctcgaacttcctggggcttcaagccatattcccgcagtaaaaggctttcaaaatagggggggttacaagggaattgagccaccacacgggcaggattgggtggttccaacatataaatcgtgaatcacccccctggtataaacccttagggtttaattacccctcattaaagggtaactctgcaccttgcgtaatgaactggtttgccttcccttgacatattaagggattcttggaaagctcagccaagtggatccatcaactaatgatgggctacaggcattcggagtataggttacccacagctgatcggtggctatccaagtgaaacggctagccgaagcataggtgacactgtcgcaagatggataattaagagtagtcagcgaggactggtcacacaggggcatgaaagacccaattcacgggtgcgaccactggctcn

SEQ ID NO: 617713 - DNA, 708 bp, Homo sapiens
tcttccaaagtggtgggattatcgatgtgagccaccgtgcctgaactagaacttttttaagaaacagggttgtgctctgtcactcaggctggagtgcagtggtgtaacccctcagctcactgcagccttgtaactcctgggttcaggtgctcttcaccacctcagaactcctgagtagcaaggactatagatgtgcgcacccctggctaattttttttcattcaatttattggtggagacaggggtctcagcttatgttgcgcagatctggtcctcgaacatccgtggattcaagtgatcctcctgactcagacctgaccgacgtgcatgggaattacaggcatgagccatcgtgtcatggcctaagaactaactgttaacatataattcacaccacaaaaaaaaaaaaaaaagaaatagaaaagaaaagaaagagaggagaagaataaacaacaaaaggaaaaaaaaaaaaaaaagaaaaagaacagaaaggacaacaaaaggaagtagaattaaaaaggaacaacccgcatgaaccaaaaaagaaagactgaggacaacaaaacaaaagaggaaaagaaaacaaaaacaacataacagctaacacagcggagaagacaagacagtttgaggacaaaaaacacaagagagaggtaggaagacaaaataaggaagatgtaacacaaaggtgaaaaagggatcaaaaat

SEQ ID NO: 617714 - DNA, 107 bp, Homo sapiens
ctttttgtattaggacttgactgttggatttctatgccatgtctctcacatctgatcgtcagtcccatcatgactgtcgagaggagctcgagtgctggtgggtgtgg

SEQ ID NO: 617715 - DNA, 388 bp, Homo sapiens
tcggtgaattcactccccgcattgcttattttcgtcaggtacaacatcttccactctcctgggctggcagcataaattccgcttaagttcttatgacgctcttcacactctgcgagtgtagactcaatgattcctttaagcctgtcaattcgggatatatgattccatacatctgcaattatttgatcgtaaatagtaaggtcaccaccgatgcaatttgaaaagatgattactgaaggctcgaacaccgcctcggctgaaattgaccgcgtatcgacgctgggaaatgtgccggattatcaacgatgaagataaaaccgtaccgcttgccgttgaagcgcgtactgccggatatcgccgcgggatccgatgttatccacgcccaggt

SEQ ID NO: 617716 - DNA, 90 bp, Homo sapiens
gcggccgcctactactactactgctcgaattcaagcttctaacgatgtacggggacatgaccaaaaaccaaaagtgcattcaaccttacc

SEQ ID NO: 617717 - DNA, 488 bp, Homo sapiens
  misc_feature (484)..(484): n is a, c, g, or t
tggagggatctcacttggtctcccaggcgggagtgcagcggcatgatctgggctcactgcaagccctgcctccggggttcatgccgattctcctgcctcagcctcccgagtagcggggactacaggcacccaccatcatgctgggctaattttggtattttaagtagagatggggtttcaccatgtgggccaggcgggcctcgaactctggacctcaggtgatctgcccacctcggtttcctaaagggcggggatggcaagcgtgagccaccacgccgggcctccagtggctttggaagagggtaaagtcaagtttctatttctagaaaccttttttcagaaattggtggcgatgttggtacaatttacctcataagagaaccacacccttctccaaaagggcgggtacggcatcagtgagatgagtagggtgtgggtgggggatggtaagactattaagatcctagtaagtcaggggtagttnacgg

SEQ ID NO: 617718 - DNA, 149 bp, Homo sapiens
tgtgcctcatgaggtcaggagttcaagagcatgctgaccaacatggtgaaaccccatgtctactaaaaatacaaaatcagccaggcatggtggcacatgactgtaatccactgcacctggctttctactgcggtggcctcatgaggcca

SEQ ID NO: 617719 - DNA, 497 bp, Homo sapiens
  misc_feature (131)..(131): n is a, c, g, or t
  misc_feature (171)..(171): n is a, c, g, or t
  misc_feature (195)..(195): n is a, c, g, or t
atccatcacgtgcatgtgtatatcacattggagatggatattgtcctcagacattatccttgttcacaaccagtatactcctgagtatttttacgtgtacaattaaatattactaactgtagtcctccccngtgtgctataaaataccaaatacttattcattcttctatnttgtctctacttattaaacatccncccccatctgctgctacccttcccaacctctggtaaccatccttctgttctccatgagttcagttgttttgatttttagatctcacaagtaagtgagaacatgtgaagtttgtctttctgtgcctggcttattttacttaacgttatgacatccagttcctccatgttatttcagaaggcagaatctcattcttttttctggctgaatgatactccattgtgtgtaggagccacattttcttgatgtgttcatctgttgatggtcacttaggttgcttccacatcttggctattgtgaacag

SEQ ID NO: 617720 - DNA, 931 bp, Homo sapiens
tatagtacaaacttagggctcttaattcaggcagtaaagtaaggaacagcaaagggggagggctacaccatcaccagtggcaacagaaagcctcaaaaacataaagtccctcgacttatgtcgggatagactcttccatagctcaggagaaacacatttaccgtggctgaggacaaggccaggcagccgtggccacacgtgcggaagggcagctggacgcgcggcctcgtggctcagtccgtggaaggtgcttggtgagggcttccagcagatcctgcttcttcagaccactcttcagcccgtaagcccgggaggcctctttacagcatgggcccagtgaacttgcccagggtacccttgctgatgtgggtctacagatccgtcttcggaatactccacctgtgggcctttggcttccagaaccttcaatatactcgggtataactcatgggccaactttagcccttcaggatggcacactcgtggggggataaacaagctcctttaaactcatccaccaaggagcccagtctaatcatccatggcttacaaccttgggcaatgtcaggtccactgcattgtcaccggatccatcaaatccaaggccaaggcctccaggttcctgaaatgctgctgcagcacggggttctcaaagctgcacatcctgatgtgaagcgaaggttctcaaggatagcctacatctggcccacatgtcgggaagttggcctagtcaccaaagaacagactcagttgaccgaaacgtcacacctggctgcaacctggcagggaaccagtagcccagaagagaattcgagtggcaaagaccccggaacggagtccccgaggaaaatcaccgggtgggaagaacccgaggccgggacaagcacccaaaaaccggggccagtggcacacaaagagaacacaaggggaa

SEQ ID NO: 617721 - DNA, 528 bp, Homo sapiens
ttgtcatagctgttcctagagtaacacgatgacggctcttagaggcatgacttgttgtacgcgtgtgtatgtatgtaattgggttgaatatagctataaacaaaagttgatgcacacgtaaattcatgcttgttgtaacgtgtcaaacactacagaggtgtagggaaaatacctagtgccaccctccactccaaaatcccatgtcgccagagataaccatttattcagactgtgagtatctattaagtatctattgctaggctttggagatagcatcatgaacaacctggatgtgctctctgcccttgtgatttggacagatgcttcagttatcttttactgtgtatatattgattatgtttcgtatgtctgtgcgtgtgtgtgtgtgtgtcgtgtgtatcgactgtcttcttcctcctcccataccattccccacaaaaggagggggtagggatcacgctacacctataggcaacccagttttctcactaaatggctgggcatgtcctttcacgtcatcacatatag

SEQ ID NO: 617722 - DNA, 1016 bp, Homo sapiens
catttgctcacaatttatagtagttatttgctatctacctatattaaaattcgagagtgagttaaaaaataattgatagatttggtgacagtaatgatttacagtatgcccaatatatgccttatttctaaataagtcatgctgtataaagtcatcttggtgttgttcagagaaagttcaagatctatattcacaaagaaaaacattttataaattgagtcgcatgttctcttagagtcaaaatgttaaagctggaggcagtattgaaagctttgcaattaggagttgcagagatgccttggcataccacgaaaaacactgtcaatatccaactcattataaattgtctatcagaattaacctaataactttcagtacaggacaagcagcatcctagcaacttgtagtagtctgggttcccagcagagtatcacagtaaccgtctctgacaacttcactcagaattatccaaagctgccaaataatctgtcatagagcctacattgaacagatttcacaaaaagatttactaggcgacgaacagtcataacaaatgtgaatatgttgactccttgaagaagccgactgtttcaaataagttaatagttactcctgggaagacacatatctcaacggcatattcactaagaattcacgaggcgacaacaaaacccgcatccataagggactcgatctgaagcatccaactttagcataacaagctgaacaaatggaaaccaaatgcaaccaccaactacacacacaagtgcccagcacagaacacctcgcgacggcacacagacacgccaaccacaaacaacatacacccacactggagaacgcaagagcacaacacaaactaacccgagacagaaacaaaaagagcgagaagacagacaacgaacaaaacgacaaaaaacataaacaaacgcacaaacaaacaaacactacacaataccaacaaacacaacaataacaaacacaaacaaccagacacaacacgaacaaaaaaccac

SEQ ID NO: 617723 - DNA, 1214 bp, Homo sapiens
ggaaacgtttaccttgtctcagatgtaactggtaaagagctgatttctaaatttttctgtaattgcagcaacctttctctcctgtctaccctttgtagtttactgtatgccagtggttttgttcttggttaccacttgaacagacaagttaacttcgcgaaacactttgggacgaaactctaactcactggcctattacccggactgtaacgatcattacagaccttagaatgaaacgattgtgaaacagctcggtggacgaacaatgcttaacggacactgcatacgggagaaaacacacaagtacaaacttagaagtgctatatgcagacatggctagcaagtacatgtaccttatcattactgactgaaactgactattcggcagcaccctataaacttatactcgctaaacaatttacatttagagggacacacctccataccaggtatgacctctctccttggaaatagcggtacataaaagagcttggcaaagtaacggataccacagacgaaagcacagcgcaacctggagctataacttagccccataaaggggactcctaaggatatacactaattagagcccacatgtacgaccattatacatgttgctaattcacactcatagaatctgacacagagaaaagagaaaaaacacatcaagggtccagaggctacaacactgcaccacgtattacaaggagaaaccaatggacatcgccaataaacccaggcttccacaccaaggcaataacacttgcatacaacgccaaagctcctaatatgaaaaccatggcacgatgacaccaccgcaacctaaccaagcaagagaaaaaacagtaacagaaaggaaagagacccagaaaaaagacaggaaaaactggacaacatggaagaaaaaacgaaacacaaaaaaaagaacacaagcccagaacggaccacgagtagacaaagagcagaaaaaagacaatgacaaaaaacaaaatgacgtagagggaggagggttgagatgagaccgtgaaagacgggacggaaacagcacgcgagcgacctaggcagaacatgaagatcgacataacaagaagggaggcaacaaaaagggtacaatgcaatcggcagaattgtaaggcaacgaacaaactaagaagaggagaaaaaaagacaggaaaagaaacaacgccgccgcgcacatgcacggagaagagaga

SEQ ID NO: 617724 - DNA, 335 bp, Homo sapiens
atcatggggtctggagtctaaggtcatggttggttcctgcttcacagttgcccagctaggaaaatgttgtgtccgaaattgttgggttcttggtctcactgacttcaagaatgaagccgtggatcttcgtggtgttacagtttttaaagatggtgtgtccggaggttgttccttctgatgttcagacgtgtttggagtttcttccttttggtgggttcgtgggctcactggcttcaggagtgaagctgcagaccttcgtgggtgagtgttacagcgcttaaggtggcacgtctggagttgtttgtatctcttgtccagagttgttcattcgtccc

SEQ ID NO: 617725 - DNA, 848 bp, Homo sapiens
gaacggcctgctgaggtaccgctctacatttcacataatcctgggcaccacaaaatatataccaaaacttccatcagggacattatgatcctcggaccatgcgaagatattctctatccgaatcatttctgtcaccgtacaagatcctatacttcgagtttgagctattggattctgtatgtagtcccccaaatacgaagagttagagaactcaaaggtagttctttcctatcactgtccacctctgctttcatctcagatgttaccataaatggtccgcgctgttttataacaagatagagtctcagtgcgttcctccttcactgtttcatctaagtgcctcacatttttttctacctataacactctaggatgtatatttcatataaagtatccttaacttcttttcaaattaatatctttctgcacacaaatattattgtgtttcctaaatccaaccattttcattaattcaggcatattttaactccatgcttacctactttcttcaggtaaagggcaaataatgatcgacccaccataattatctatacataaatggaagtcgttctagactattaaatggtggctaatgtgccttatggttgaaacgcacttcacaccggtcaccatgtctttcccacaatcatttcttgacttacttatacacactcttagacccaatagcacgttaaattcctcaaacagtgtttctccggacaacatacattttgccactctttaccttatgggtatctccatgatgacaggttgcgccggtgcactgggagcactctgctggtatggcaccggttttaactgccacaaggattctagctattataaga

SEQ ID NO: 617726 - DNA, 266 bp, Homo sapiens
  misc_feature (16)..(16): n is a, c, g, or t
  misc_feature (65)..(65): n is a, c, g, or t
  misc_feature (70)..(70): n is a, c, g, or t
  misc_feature (185)..(185): n is a, c, g, or t
  misc_feature (190)..(190): n is a, c, g, or t
  misc_feature (200)..(200): n is a, c, g, or t
  misc_feature (206)..(206): n is a, c, g, or t
  misc_feature (208)..(208): n is a, c, g, or t
  misc_feature (212)..(212): n is a, c, g, or t
  misc_feature (214)..(214): n is a, c, g, or t
  misc_feature (227)..(227): n is a, c, g, or t
  misc_feature (232)..(232): n is a, c, g, or t
  misc_feature (241)..(241): n is a, c, g, or t
  misc_feature (247)..(247): n is a, c, g, or t
  misc_feature (257)..(257): n is a, c, g, or t
  misc_feature (259)..(259): n is a, c, g, or t
  misc_feature (263)..(263): n is a, c, g, or t
taatatagagattttntttaaactgtattgaatttttacagcacattgcatgtttgtcacaacgnaactncacagtttggatttttggccacatcatgtcacttacacccacaacagctctgaaaggagtatttgatgaacacatctgagccaagagcccagagctctctctccaaggccatganagttngttcactgtntggganantccntnaaaacagccacgngtagntgcacagcntacagntctccccaantnttancaa

SEQ ID NO: 617727 - DNA, 202 bp, Homo sapiens
  misc_feature (173)..(173): n is a, c, g, or t
acagcgaagtgaattattggtgagtattaagaggggggcagcacattggaagccctcatgagtgcagggccttcaatcacatgctccttgttctgcagcttggtgcggcatggacattgataactttggccaattgtgaacccgtggccacaggtgccctgggtctttcccanaaggcacctcgctatgcctgttgtggagc

SEQ ID NO: 617728 - DNA, 873 bp, Homo sapiens
ggtggttgtgtagtaattgttgtgtgcgaggtttgttgattaatctagatttagtatattgcattacgtttgtgagtgttacatgtatgatatagggttgctgagtgaggtataattgcttggtgtttttgggtaattttgggataaaatgtagagtttgcaggggatttctaacttgcaggtagtattaagatgattagcttgtcaggacatttgctggttgtaagtgaacagatttcaagtacatggggcattccacgacagaatgtcgacagtcacctggggccagcatcagtttgtagccagatcctaacagtgccaacatcaccgtccttgccactgtagccctctagtgagaatattgggagctaccaggcaggtgcccagtggcattcagggaagatgggcgacaacatcagggagtgggcagctgtatggaagactcctcattcactgaccaggtcatgggcagggccaacctgggctaggaatgaggctgccctgcagggcttctcatctagtgtagcaccagtcaccagtcccaggtcacagaagaagcccctcccagcacaccatcatggagaggggaagttgaacgcccagggagacgggctccatggtggtcccacatggacgctgttttgcaataccctggaaaaggcggctctcccctgtcgcctctacactcttcagagagcaggaacacagagttaatctcgtatgaatgttatttctactttagtcctaagcaagcataagctgccctcttggttgatcatactttatacggagagctatcgatttatgaaatgctttcagtatgcattttaaattatgcatgcgaaatgaccacacttaaagacatgtgacttc

SEQ ID NO: 617729 - DNA, 657 bp, Homo sapiens
actgaagaaaatacccagtctgtatatatatgtaagagccatgcagtgagcgtggtgatagtgaagatggcgtgtcttgagaggtgaagaatatcgttattgtgacagtgataaatgtcacacttgattctggattctagtagcaagatatgtgattcgaatgccaacactgaatcagacgtaccaggaggtcagagttttggtgtacaaggggaagcagcgtgtgtcagatattaccacattatagatctgaagaatgtatctgcaatggtgataaatgggaatagccattaacctgcttttaagtcttggcaggaggacctctgcgtctcggagaacgctcagctgtcatccaacagctggaccgacctgactcatcacccttggaaagaaggactgtcctccagtatcataccacacacgaaagtgaaagaatcgaggacaaaagccagcgtaacactacaatgatcccagaaaaagaggtagggacatcctcatctaaaggcacagagatacaccataggaacacgaagataacatcacgacagtgcaaagagatgaaaaagagagaggacagaacaaaacttatacaaggcgcaacaagcacgtgcgaaagaacactcagagaaatacgaggaacagaagaaagggcaagaa

SEQ ID NO: 617730 - DNA, 310 bp, Homo sapiens
ttttgagatggagtcttgctctgtcgcccaggctggggtgcagtggcatgatgttggctcacagcaacctccgcctcccgggttcacgccattctcctgcctcagcctcccaagaagctgggactacaggcgcctgcaccatgcccggctaatttttttatttttagtatagacggggtttcaccgtgttagccaggatggtctcgatctcctgatcccgtgatccacccgccttggcctcccaaagtgccgggattacaggcgtgacgagtcagtgcctggccaataaaaagtatttttaaagtccaga

SEQ ID NO: 617731 - DNA, 333 bp, Homo sapiens
tatgctgtttatttgtgtggttgcattatagtgtcactggtctgtgtacttaagtgtgtttttgcagttgctggtctttcctttccatatttagtgcttctttcaggagctcctgtaaagcaggtctggtggtaccaggtaccaggtctggtggtagcaggtctagctaggttggggaagttctcatgaatgatatcctgaaatatgttttccaaatatgttttccaagttgtttctccccatctatttcaaagatgccaatgagtcatagatttggtctctttacataatcctatatttagtgacgttcctcatcccttcctcatcccagtg

SEQ ID NO: 617732 - DNA, 254 bp, Homo sapiens
cagtattgcctaccggtctcattcatcctcaagacgagcctgcaggcagaatcacccttccgctaagtaaattcagaagagaataggagccccaaggctttcacagaaattcacattaatggttaaacagcaaggactcactcgcctctgaaaactggggctaaagggcacaaagggggcacaaagctcaggctgtgggggacagattgccttcaccagtaattcccatgccccccccatgcgtggattgccag

SEQ ID NO: 617733 - DNA, 165 bp, Homo sapiens
gctgagctagaggatccccttatgttctgacccaccatctatattttttgtactatgtaggtagagagggggcctctccatattggtcaggctggtcccgaactcccaatcctcaggtaatctgcccgacttcagcgatcccagatgctggtgattacagtgcgt

SEQ ID NO: 617734 - DNA, 433 bp, Homo sapiens
caggaaagggggtgggcgaggactagcgaatgtagaagggaagggcgcagagaacttgacttcccaccttttgcgctttccaggccagctcaggggcgagtgtgggcagggcgagtgtgggcagggcgagtgtgggcacggcgagtgtggcagggcgagttgtggccaggccgagtgtgggcagggcgtgtgggcacggcaagtgtgggcacggcgagtgtgggcacggcgagtgtgggagaccctaggtctgcgccaccgccggcgtgagcctgaaaagctgctgggagaaccagctccgaaacagagtgcccggaagagattgtgacacctatggaaatttaatgaattgataaagggatcgattcgattcaatgtgagaatgttagtttatttaataaatagtgctggtatagttgtcgatctaaaaaaa

SEQ ID NO: 617735 - DNA, 238 bp, Homo sapiens
acggcacaaatcacattatactaaatcgctggtagtgccgtgatccggtactctatgtctattactgtctgcttatagcaataggcagctgagtattctctagattgtctatcagtacttcagccattgcttctgtgcattaatcccatcaattgctggaatcatcctttcattccattacttctttatatctacttctttcgtgactaggttcttcaggttcgattttgaacatttt

SEQ ID NO: 617736 - DNA, 119 bp, Homo sapiens
tggtgactttccatcccttgaaccaaggtcatgttagcacttggctaccagcatagttgtcaccattccaacctagaaattggcacaaatgcaactgtgtcgcgggttgtagagggtac

SEQ ID NO: 617737 - DNA, 529 bp, Homo sapiens
aggagccgtgtacaagtgcgtcgatgggcgaggtgctcgtgctgtgtcgcattgcggagattggtggcagcggtgggggtctgatgtaaggtgtggagaggagtgcggggtgcggtgaaaatgagcctgtggagatactagtggcagaaggccgcgagccaccaatggtgtgcagggaggatgttcagggcgatgtgggtgtggaagcgtaccataggtggtgcaagtgacggtgcatcggtcatggtgtcttcgtgtcgaggcgcgggattcaactcgcgaggcttggccgtgctgatgagaatgttgctgccataggtacagagacagacatagagaatggtaaagaggcagaaagagagccatggccccgcccccaaaaaggccaggttggatttcctatggaaggaactgtggcccccctggacacttgggttccccctgcaacttcagggcccctgggcctgggccccccttgggaggaaaagtccccctcctttccaataaaaaaaagtggttttagcctggg

SEQ ID NO: 617738 - DNA, 666 bp, Homo sapiens
  misc_feature (165)..(165): n is a, c, g, or t
  misc_feature (190)..(190): n is a, c, g, or t
  misc_feature (262)..(262): n is a, c, g, or t
  misc_feature (306)..(306): n is a, c, g, or t
  misc_feature (328)..(329): n is a, c, g, or t
  misc_feature (331)..(331): n is a, c, g, or t
  misc_feature (440)..(441): n is a, c, g, or t
  misc_feature (445)..(445): n is a, c, g, or t
  misc_feature (449)..(449): n is a, c, g, or t
  misc_feature (580)..(580): n is a, c, g, or t
gagtccctggctttttagtggggtgggtagagtccactgatacatttctatcagcacctgatggcctgggtgcttgcttgaccccaggtctgatgtgtggcttgtcaaatgttctgggcctcacagtagtataaaatctgtgtggcgccagagtggtctgtagtncctcttgactaggacttggggaaancatgggtataaaagggatgcctcgtgtctctagaggagcaggttcgctctgagagacctcagggtatggttnatgaggaaggagcacatcttttggagcaggtgtggtgtatgacncttctggacttggtgacgtttnngnttttgcagtaacacgctggggcaccttaggaactggttgtgtttgtgggattcttgggcgtggtgatgtttttggcttaggaggagcacgtggtgtctgcttgggagcnngttnagtntgaggtacttctggatggggcgtggttttaggtttgggatgtggacgacgggttctttttgttgttgttggagctgaagatgtcccaggagtaataggtccaaagtctagtttggtctgcagtgtctctgngcgtggcgtggttttatgtttgggacgtggacgacgtgttcttgttcgttgcgatgtttttggagctaatgttgcactgtagccta

SEQ ID NO: 617739 - DNA, 386 bp, Homo sapiens
aggatccccaatgtctcatcctacctgacatgtttataaaaactgctatgctaacatgcactaagtaaaaagtgggatctggtattaaagataattagttggctgggtgtgggtggctcatgccgtgtaatgccagcactttgggaggccgaggcaggcagatcacttgaggtcaggagttcaagaccagtctggccaacaaggcgaaatcccgtctctattaaagatacaaaataattaaccaggtgtgggagcacacacctgtaatcccagctactcaggaggctgaggcaggagaattccttgatcccgggaggcagaggttgcgggtgagccaagagcgtgccactgcactccagactaggcgaaaaagtgagactccatct

SEQ ID NO: 617740 - DNA, 616 bp, Homo sapiens
  misc_feature (165)..(165): n is a, c, g, or t
  misc_feature (190)..(190): n is a, c, g, or t
  misc_feature (310)..(310): n is a, c, g, or t
  misc_feature (354)..(354): n is a, c, g, or t
  misc_feature (376)..(377): n is a, c, g, or t
  misc_feature (379)..(379): n is a, c, g, or t
  misc_feature (488)..(489): n is a, c, g, or t
  misc_feature (493)..(493): n is a, c, g, or t
  misc_feature (497)..(497): n is a, c, g, or t
gagtccctggctttttagtggggtgggtagagtccactgatacatttctatcagcacctgatggcctgggtgcttgcttgaccccaggtctgatgtgtggcttgtcaaatgttctgggcctcacagtagtataaaatctgtgtggcgccagagtggtctgtagtncctcttgactaggacttggggaaancatgggtataaaagggatgcctcgtgtctctagaggagctattgttgtctttggtggctcaaatctaaaggtaacaggctgcagaacaggttcgctctgagagacctcagggtatggttnatgaggaaggagcacatcttttggagcaggtgtggtgtatgacncttctggacttggtgacgtttnngnttttgcagtaacacgctggggcaccttaggaactggttgtgtttgtgggattcttgggcgtggtgatgtttttggcttaggaggagcacgtggtgtctgcttgggagcnngttnagtntgaggctcatctgggctgggtagggttatagattgagaaggcagaggcgacgtttctagtgtggtctccaggtggttcagatacatatgtcatagattccacaacttcagtctttgggt

SEQ ID NO: 617741 - DNA, 325 bp, Homo sapiens
aagtctgggcacagtttaacaccagcactgtgagaggccaaggcaggaggatcacttgagctcaggagttcgaaaccagcctggataacttagtgagaccctgtctctacaaaatattaaaaatttttggcactccagcctgggcagagagtgagatcctgtctcaattataaacaaacaaacactgagagccaaatccaatatgtttatgggcccgccggaatgatagtatttactatcaatgtagtgtatgtatcttcaactggtgtcaaagacaagttcttgggagtctgattttcaaggttgtataacaatggaggcttcc

SEQ ID NO: 617742 - DNA, 1021 bp, Homo sapiens
cccacgcgtcgcttcgcgacggcacactcatcacagcgctaagctcgcactgattttttacctgagtaggcctagacaataaagatgtctagctttctattccagttctagaccaaaaaaaataaaccctcgttccagagaagctgccagtcaagtatttcctcacgcaagcaaccgcatccataatccgttctaagtagctatcctcgttcaacaagtatactctccggagcaatgaaccataaccaataggtaccaatcaatactcatcattaatagagtcataactggctataggcaagtaaaaccatggaataggctcccctttcacttcgtgatgttgccagaaggttaccccaagggcatcccgcttctgacattccggcctgctgcttctcacgattgactaacaagactaggccgcccgagtctcaatcagtagtaccaaattctctcgcctcactacacacgtaagccgttctaccgtcactcgtctgcaactcattgatccagtcatagcaggcacgattgaggctgggagttaaaccaaaacccatgctacgcaaaattcctgtagcatactccatcaattacccaacatagtgatgcatataattagctaggttctaccgttacaagccttaaacagtaaccagttctgtaatgtttaactagttttactattattcctaaactacttatcggcattcctacgtatatcaaacttaaaacctccagtcatccacagagggcgttagtactatctcgcacctgaaaccaaggctaacatgacgtaacagcccttaggtccaatgcaaaccttgctcttccctaggaggactggccccgttaaccggagtaattgcccacaaatgggccactatcgaacgaaattcacaaacaaccaatagccctcatcaatccccaacatcataaacacccatcaaccctacattaaactcatacattatacgtacccaaatttactccacctacatcacaataatcccatttttaaccc

SEQ ID NO: 617743 - DNA, 1113 bp, Homo sapiens
ggcccgcgcctcccgcatcgcctcgcgtcccgtggcgccgcccgggcccgctgttcgggggcccggaaccccggccaggcgcattttctgcaccgtccgctttgcaagaaggccctcgagtcagcgactggattgctcgccatcaaggtccagtgacaagtcctccaagaagcgaaaggcgcacaccgccaccaaggccttccggaggcacaagcctgctcgcaagggctcagtgacacgatttaaccaattaaaccctgtgaagccgaacccccacagaaaaaataacagcacgcaacaacacaagcttcaaagagggcacatctaaaatgcaaagagagagtacgcagagagaaaaaaaaacggggatactagcgagcacggtgcacaattggtccaccaattagaccagtgctaacccaagaacaccaaaaagattttcttgtgaaccacacacgtgtgcggaacaacttctgcgccgtgacacaaccacaaaaaaaggggagaacgaagaaaaaaaaccaactccgcgagaaaaagaaacccccagagactaaaacccgagctcaaaaagaaaaagaccaacgaaaaacacaacaaaacaacacgaacaaagaagaaagaaagacaaaaaaacaaagagaaaaaagacaaaagacgcaaacagaaaaaaacaacaacaacacacacagcgaagagaggacgagagagagcagagccgaaggaagcagagcagcaacaaaaaaccaaaaacagccaacacaacacagaaacaacacaaagaaacgacagacaaacacaggcagacgaaggcacgccagacacaatacacaaaacaagcgaacagagaagagagaaagagcagcaaacaacaaaacagaaaaggagagaagagagagcgaagacaaaaagacaaaaacaaaagaaagacacagaaagaacgaaagaacgacagaagagaaggagagagaagaaagaccagaagacgacacaaacagaaagacgagaagaacagacgaggaaaaaacaaacagacagacagaacaaacaaaacgaagaagaacgaaaaggaaaagacgaagagaaaaacaaagagcgacaaaaaaagacgaa

SEQ ID NO: 617744 - DNA, 611 bp, Homo sapiens
  misc_feature (83)..(83): n is a, c, g, or t
gggcctgcgctgcgccacgatgtccggggagtcagccaggagcttggggaagggaagcgcgcccccgggccggtcccggaggntcgatccgcatctacagcatgaggttctgcccgtttgctgagaggacgcgtctagtcctgaaggccaagggaatcaggcatgaagtcatcagatatcaagcctgaacacataagccctgagctgggttcgtttacagacaaaatccgcttatggatcctgcgtgccaagattcctgggcaaaaacaagtccaggggatccagcgttggcatcttacggaagatacttggcccaagtccaaccgttgatgacgtagcctgcgatgaacgcatacccagtggaagaagctgttgccggatgacccctatgagaaagcttgccagaagatgatcttagagttgttttctaaggtgccatccttggtaggaagctttattagaagccaaaataaagaagactatgatggcctaaaagaagaatttcgtaaagaatttaccaagctagaggaggtactgactaataagaagacgaccttctaaggtggcaattctatctctatgattgataacctcatctggccctggtatga

SEQ ID NO: 617745 - DNA, 412 bp, Homo sapiens
  misc_feature (78)..(78): n is a, c, g, or t
  misc_feature (113)..(113): n is a, c, g, or t
  misc_feature (377)..(377): n is a, c, g, or t
aaaacttaggatcccctctgaaacccccaggattaggggacacagcagtggctagggcattcagcccacagaactgancgggaaatgcccacttgtattggctgtaaagaaanccctggctttgggcccaggcacagtggctcaagcctgtaatcccagcactttaggaggttgaggcggatggatcacctgaggtcaggagtttgagaccagcctggccaacatggtgtaaccccgtctctactaaaaatacaaaaaaattagccaggcgtggtagcgggcacctgtaatcccagctactcaggaggctgaggcaggagaatcacttgaaccggggaggcagaggttgcagtgagctgagatcatgccactccacntccagcctgggcgacagagcaagactccatctcca

SEQ ID NO: 617746 - DNA, 366 bp, Homo sapiens
ggatagagcccagattgacttcaacggtcggatccgtaatggcagtgtctacagtgcacacagcaccaactccttaaataatcctcagccctacttgcagccctcgccgatgtcgtccaaccctagcatcaccgggagtgacgtcatgaggcctgactacctcccgtcccatcggcacagcgccgtgatacccccgtctcttccgccccacctcagactatgtgattgtgatgaaccagctcagcagggacatgatgcatagagaacggcacaccctactgtgctgcgaagcttcaacatcggcagctcagtacacaagcagcagcacccagtcgctggtgtacacccagcccgagcacagcgagc

SEQ ID NO: 617747 - DNA, 216 bp, Homo sapiens
gttttagaggtgtagtatgagatttgcactagcagtagtgtggatacagaggaaatcggtgcatgtcttgtagcaactggatttttagttcagcttctacaagtctactgtaaaccctgaaaagcatagaaacacacttagttttaaaagccatggatgtgaggcaggagagacggctcagtctgtaagaggtgtcactgctattccagagtcccg

SEQ ID NO: 617748 - DNA, 111 bp, Homo sapiens
aaaaaaaaaagaatgagacagtaactcagggaaatcctccttggaaggaaaggaagagatcatcaagctcggcctcataactccaaagtttcacgtgctccaggggaaatc

SEQ ID NO: 617749 - DNA, 468 bp, Homo sapiens
ccaaacatagcttccaatgccaaatcatatcagcaatgattccaccgctggcttgtctgctgccatactcgcgggctcatgtggagagggcaggcagcaccccaaggcagccatcacgggcaagcagctggagtttgattacgtcagcatctgtgtgtgtgtgtgcgtgtgtagtgtgtgtgtgagcagcatcatgtggggtgtcaactgtcatttgcagtgtgggcagcaaagcaaatgggactaacataggcagttttgtgtcttcagcaagtctgaaaatgtcatcatcagcagcattaaaattcatagcctcaaagtcatatggggttcagacaccagcttcagttactatacccctgtgctgtaaccatcacacataatttgactgtcacagagaaatgtttctataaacgttgtatgtgtctgttgaatcataacactgtgcccggcatcacacacaactga

SEQ ID NO: 617750 - DNA, 82 bp, Homo sapiens
aatattcaaacgaacacctttcctctggccctcacttagcttgtgaacagacatatttaaaatcctttcttggtgtagcagc

SEQ ID NO: 617751 - DNA, 420 bp, Homo sapiens
  misc_feature (100)..(100): n is a, c, g, or t
  misc_feature (127)..(127): n is a, c, g, or t
  misc_feature (133)..(133): n is a, c, g, or t
  misc_feature (186)..(186): n is a, c, g, or t
  misc_feature (217)..(217): n is a, c, g, or t
  misc_feature (252)..(252): n is a, c, g, or t
  misc_feature (259)..(259): n is a, c, g, or t
  misc_feature (326)..(326): n is a, c, g, or t
  misc_feature (360)..(360): n is a, c, g, or t
atcagcagcttctcgataagatctcaaaagttgggtaaatgggctcaagcttatgccccaaaaggcaaaatggcggagtttaatggtacatgcccttccnccaggaatgctagatctgtaagggaanaacgtnttaagtgagcatgtgcccttcagtatactgaaccccctgtgcttgtggccccnccaagtgctggcaggcccccgtgcatgtggncagcccatgccaaggtaggaatcaggggaaaaaanatgcaanccgtaaatccctggaagcatgccagcatatgaaaccccaatcaaaggtcaaaccagggacttgaatntgtcaagtcattcacgcctggccctcttccaagnggactttacttcctttcattccggctctaaaactttttaataaacgttcacccctgctct

SEQ ID NO: 617752 - DNA, 995 bp, Homo sapiens
tggagacggagtctctcactgtcgcccaggctggagtgcagtggcgcaatctcggctcactggaacctccgcctcccaggttgacaccagttactcctgcctcaccctcccaagtagctgggactacaggcgcctgccagcacgccgtggctaattacaggtattctagagtaagagacagggtttcaccgtgttagccaggatggtctcgatctcctgacctcgtgatccgcctgcctctggctcccaaagtgctgggatcacaggcgtgagccaccgggtcgggcctctgtgaacctttcctttatactggagacaaagtctccacgtgtgtacacccagactggaatgccgtgacacaatctcggctcactgaaactctttgccttccaggttcaagctattctgcatgcctcagcgtctcaagtagctgggactacagattgtgggccaccatgtcgtggctaaatttgacccgtcccgtctaatgccgggccacacaaccggggtttcgccccattgttcggacgaagctgggctcaaaaactccggggcacacacaggatgattggacgcgcactacaggtatttctcgacacaggcaggcggagcagacactcataagggcacttgaccgcagtgtatggctgtgggccataaaagacgtttttcacgaaaagggcccgttaggaggaagcacacaatgagcatgggcgagctcctcgtatgcgcgtagcaccaggggaatcacctctcagtaaaaagagagacccagggcccccctgtgttgggggcggcgccccgttgtcaagaaacaaagcgggcgaggcacggctaggacagacacaacacatgtgcacgggggggaaaacaattcctcccggcgcgcgcacacacagtgtgggcgccaccgtggggcaccccacattaaagaagagcggcgacgcccacaaccccccgggtgttcacaagctcccaggcgagggagaacaaca

SEQ ID NO: 617753 - DNA, 188 bp, Homo sapiens
agctggattgcagcatttccactgtcagttcagcatttagcttcaatcatcagttagtgtctgttgtccattcatgtcacatcctttcctcatggccaggcacaacagctcaattcaccattttaatctcactcagcatcttgttcatgccagcatcatttgtgccccattggccatcagtttatgct

SEQ ID NO: 617754 - DNA, 314 bp, Homo sapiens
ttaagtacttccacatacctctataactcgctgatgcactgggcacgcgtcgaacaaggtttcctcagcaagctgccgtatcagactcaatcgaagtaaacaggttctagggttccttgaatgtatacatatagctagtataaattgccttctctgctgcgacctgggcctttactgctatcttccagagcttcctttaccataatctgcagcgactttaacatactgttgcactataagctagctcttatagattctatctaacaacatctcagctctgccataacccaataccaaacgcccctcttcgtctg

SEQ ID NO: 617755 - DNA, 638 bp, Homo sapiens
  misc_feature (626)..(626): n is a, c, g, or t
ggcttctctgcccctttcaccccaggcgcatccgccgcggcgccatggcgcgaggagacgccccgcgggacagtacttccaggcgcgactggccggggccggcaacagcacagccaggatcctgagcaccaaccacacgggtcccgaggatgccttcaacttcaacaattgggtgacgctgctgtcccagctgccccttgcttgctcttcaccctcctcaactcctttccttgttaccagttgcgtcccggagacggttgcgcatttcttgggcagccttgcttggccattacttgcttgcttcttttgcccttgacagcagcgcttggttcaaggttggacattgagccccggaccctttctttcttccattcaccattggcctccgttcttgctttcattcaacttcctttcagttgcagttccttacagggcagccttcttcgggcagctgggcaccatgccctccacctacagcaccctcttcctcagcggccagggcctggttgggatttttgctgcccttgccatgctcctgtccatggccagtggcgtggacgccgagacctctgcccaggggtactttatcacgccctgtgtgggcatcctcatgtccatcgtgtgtnacctgagcctgc

SEQ ID NO: 617756 - DNA, 1010 bp, Homo sapiens
  misc_feature (405)..(405): n is a, c, g, or t
tccaaaaaagccagttttttttttattggtaaagctcggccaaaaatttctagggtgtgccaagtggtgtcacctggccaaatctcgcaccaggttgtggtccggtgtgtgacccagacaaaacagagatgttctgggccatacagacaaaccagggccaggggagggtggcactgggggtgggtttctggctcttggtggctgggtactggataacttctctgtgtggttctcacgttcacatctctatacaagggattctttctccctctctataaatctcccaaattctgtgtgagtcgctggggcgcctgtgtgggacacgacacaacaggccaggatacggcgggtgtaggcgcttagaaacgccaccagtggggccgtgtgtggagtatattggttccncccagccaatctcatagcgcgtgtgtataagaggggtgttgtgggcgcttcgcggtgtgagaatttccccatataaacgagtgggcgcgtgggccaaactcatgtggggcccctcacgagaaaagccgacacagagagggggaacttcccattctgtggaagagggacacaggggtccacccggggggtgtgtacagagaaaataccgctctgtgtgtgtgtgcggcccacagcggggtggggtggggggccttctacaaggctgtgtgacagagtaaaacgcccagaggggtccacatataccctgtggaacccagggcttttggtctccaggcaccaaagggacagaccagaccagaccacggggggtgcgcatgcgcataggtacggggggacaaaacaaaaacgggggagacaccaccaaagagaagcaacccccaacatttcgtagaggggggggggtcccaacaatctctgggagaaccgggtggctcaatttggggcaacaccagcccccagggggaatcattccccaaaaaagagctgagacgaggcggtcaaaaactcctccagagagaccccaagagagacaacatccctgggcg

SEQ ID NO: 617757 - DNA, 169 bp, Homo sapiens
caacggatgtgccgctccgacaaaaacaaagggaatgcgtcgagaatgtcgtttggtttcggtaagctcgttgtctcacttggaatgctgtccaccgtcgtcggaacaagcctcccggccgccgcgcagagcggagcggcctcctggtacgggagcggcacatgcgttg

SEQ ID NO: 617758 - DNA, 836 bp, Homo sapiens
  misc_feature (1)..(1): n is a, c, g, or t
  misc_feature (155)..(156): n is a, c, g, or t
  misc_feature (158)..(158): n is a, c, g, or t
  misc_feature (160)..(161): n is a, c, g, or t
  misc_feature (163)..(167): n is a, c, g, or t
  misc_feature (169)..(169): n is a, c, g, or t
  misc_feature (272)..(272): n is a, c, g, or t
  misc_feature (276)..(277): n is a, c, g, or t
  misc_feature (285)..(285): n is a, c, g, or t
  misc_feature (289)..(289): n is a, c, g, or t
  misc_feature (305)..(305): n is a, c, g, or t
  misc_feature (325)..(326): n is a, c, g, or t
  misc_feature (334)..(334): n is a, c, g, or t
  misc_feature (345)..(345): n is a, c, g, or t
  misc_feature (347)..(347): n is a, c, g, or t
  misc_feature (374)..(374): n is a, c, g, or t
  misc_feature (377)..(377): n is a, c, g, or t
  misc_feature (430)..(430): n is a, c, g, or t
  misc_feature (500)..(501): n is a, c, g, or t
  misc_feature (507)..(507): n is a, c, g, or t
  misc_feature (589)..(589): n is a, c, g, or t
  misc_feature (591)..(592): n is a, c, g, or t
  misc_feature (594)..(594): n is a, c, g, or t
  misc_feature (596)..(596): n is a, c, g, or t
  misc_feature (608)..(608): n is a, c, g, or t
  misc_feature (619)..(619): n is a, c, g, or t
  misc_feature (735)..(735): n is a, c, g, or t
  misc_feature (738)..(738): n is a, c, g, or t
  misc_feature (819)..(819): n is a, c, g, or t
nagtttcattagagatcacaaaagttcagttggaatcaaaagggacagaagcctgtgctctcacagaagcagaaaagcttaaactttcaaaaccaaaacagagcagagctttgcaggtttatattctgaataataagaaaaggggaggggtaggnngngnntnnnnncnacaaccaaaggaaagcatttcaaattgaaaatgccaaaggaaagaagtaataagagagaaaaggagaaaaacattgaatgttttatttattttaacaaaaganaaannagtttacnaaanataaaagattccaggncgctttgggctagggcttgnnaccataanggtgatgtganangctcatcattattttgttgtgacttcnagngtacaagtgttcaggtagaaatatttcctaaggcgttgctccacaattctgcnttctttctttacttttcttgcttaagttctgaccactttctgaacataatttgttgaatgatggtatttnncatgantttttttcccgataatatggctttcttttttcctctaataaccacattccaaatcaagccagttttgcaatttgctttaatnanntntnttttttttgggntactaagaggngtactctgtgaagtaaacgtaacctcttagcattaaaactacagcattgagcctggcccaatatctcattaactcttcatccaaaaccaggactcagctggcagactggccccaanganttcttcctgcatgtagtttacttaaccaatggtgcccatcataccagcatctcctgcgggactctcctggaagaaaaggcntctttggttggaagagg

SEQ ID NO: 617759 - DNA, 457 bp, Homo sapiens
gcgccctgttagcagcgtgttggctcatgcctgtgatcctcagcatgggagtccgaagtgggtggatcacctgaggtcaggagttctagaccagcctggccaacatggtgaaaccccgtctctgctggaaatacaaaaattagtcgggcatggttgcacatggctgtagtcccagctactcgggaggctgaggcaggagagtcgattgaacccgggaagcagaggttgcagtgagccgggatcatgccactgcactccagcctggatgacagagcgagcctccatctcaaaaaaaaaaaaaaaaaaggtaccaaatttttttctggacttctattccccaaaattccgggccccaacactctgggacgctaaagtgctgtggaattgaggatggggaaagcagggaggttaggagggaaagagatttgagaatgtgacgctggcctacagcacattg

SEQ ID NO: 617760 - DNA, 658 bp, Homo sapiens
catacggaactgtaagtccattaaacctctttcttttgtaaattgcccagtcttgggtatgtctttatcagcagcatgaaaatggactaatacagtaaattggtaccaggagtggggcgttgctgaaaagatacccgaaaatgtggaagctactttggaactgggtaacaggcagaggttggaacagtttggagggctcagaagaagacaggaaaatgtgggaaatttacgaacttcctagagacttgttgaatggctttgactaaaatgctgatagtgatatgaacaataaggtccaggctgatgtgttctcaaatggagatgaggaacttgttgagaactgaagtaaaggtgactcttgttatgttaaagagactggcggcattttgcccctgccttagagatttgtgaaactttgaacttgagagagatgatttagggtatctggtggaagaaatttctaagcagcaaagcattcaacaggtgacttgggtgctgtctaaaggcattcagtttccaacacgggaaaacactataacaaaatttgaggggtgcattacagttggaccaattgcagcctgacatgcatagacagaacatcccatttctgaggtgacttgggtgctgttaaggcttcacttcccagggactccgtaca

SEQ ID NO: 617761 - DNA, 260 bp, Homo sapiens
gaacatcatagcacacaggcgctagcaagaaggggcggagacctccaaggagctggcctgcagtcagcttcgggatcaggcgtaatcaacagtcacttctggctggggccctctgagcccagagttgactcctgggggttccacgccccctaccaagtccctactgcctgggtcatggcgcagggaatggagccttatcttcgggggcaatagagctgggctcaaaccctgccttgccattcactaagtttccctgtgtg

SEQ ID NO: 617762 - DNA, 108 bp, Homo sapiens
atcctgtaagtggtggccactgctaggcattgaagatacagtggtgaacaatatatgcagagaaaataacaaacaaacaatggtcacgctgattgcctgttttgaagt

SEQ ID NO: 617763 - DNA, 287 bp, Homo sapiens
aggcgctcgctatcattgaggcctcggctggcagcgccgagaaggtcatcagcgacgccatctacgagaccggcgcgcagaacctcaacgtgcctgctgtgccatcgtggccacgctgcgcggggagtcggtcccgcggttcgccctgggcggccagcacgctggcggcattcgcctggtcggtgaaaacggcccagagctggaggtcaccgggccggcacgttactggagctacgagcagacgcgccggctcatgggcggcgcattcgaggcgggggtacccgagc

SEQ ID NO: 617764 - DNA, 476 bp, Homo sapiens
cctttgtgaatatcgtgtttcgatcaccattgaagctatagggggcaccgagaggttgttatgcagcgataccatacctactcacttcaataggggattgtttttccagttagttatgacagagaactttcctctccttaatagaagcatcctttttaaagaaacacttgccttgtgccacacactacactgaaaaccaagttatctagacagagacattactcagtctacttctaatcaaggatgaaagtgagctgtatattctaaaagcagctaactatagttgtactacctactctttgggaggctagcttgctgatataaccttcttagttaacagaacggatgcaccaatggctcctagttcttgagacaggacccaaatcaaattgtcatgataaaagccgcttatagagcacttttgtcctatattgtaagaaagttcgcattatcgacacactgacggcggccgcaac

SEQ ID NO: 617765 - DNA, 102 bp, Homo sapiens
gatcacgtgcatggtgatgaacatgaggttggcatcatccttttggtcccattcgggtgtccaagaggtgggaacagcacaaacccaatctgccagaaccag

SEQ ID NO: 617766 - DNA, 310 bp, Homo sapiens
ccctgggcctcggttttttcattttgcataattggagatcatccctttttcctccctccctaggttatgaaaatctaattaaacaaccccggtggaaatatttcccaaattcctaagcattatgcaaatccatcagaaaatggaagcccaggatgaagtcatttcccccgcccccgcttcgctggtgtgggtggaggaagcctgtcatggaatcccccctgtgggcccccatgacaaattttaatctccaccagtattttccctgaaattccctttggtttatgttgtgcataaaatccctttggggtta

SEQ ID NO: 617767 - DNA, 367 bp, Homo sapiens
tgatcctctccttcaacggaatgcttgcacgcctggaagacgcgttcgtccggctatcaaacttctcagccgacatcgcacatgagctgcggactccggtaagtaatcttctgacgcataccgaagtcgttctgaccaaaaaacgcgacctcgatgcctacgaagacaacctctactccaatcttgaagacctcaagcgcatgtcgcgcatgatcgatgacatgctgttcctggcaaaagctgataacggcttgatcatccccgagcaggttgatatcgatctggtcgggctagtgtccagactgattgagtactaccagcttgcagccgaagaccgaagcattcggcttgcccttcaaggcgaagg

SEQ ID NO: 617768 - DNA, 410 bp, Homo sapiens
agaatcatatacagtcagagtagacgtgcaatgtctctaggatgcgaagaccacattgcggcgactgctgttggaaagtcagtatagcgtggtgccagcatatactgggcgaggtcacaactgacttcgtccctcgaagaacgttggcgggcccattgacttcattgacttcttggtcttccataactcatagagatgtacatttctgtagtcttaagccacccaggttgtggtcatttgtcggtggtagccaaggaaaaacttaacctgtccaccaatgaggcctctgggtctggttccaccaggagctccactcagatcccaagacagccagagactggctagccatggtggcgtgagcagaggagaggaacggaaggctttgtacgcacacaccaaaacagagagcc

SEQ ID NO: 617769 - DNA, 306 bp, Homo sapiens
  misc_feature (4)..(4): n is a, c, g, or t
  misc_feature (54)..(54): n is a, c, g, or t
  misc_feature (132)..(132): n is a, c, g, or t
  misc_feature (300)..(300): n is a, c, g, or t
agtnatttgtatatatcgttcaataaatattggttaatattaccccaggtgtgnttgtcacgccctgtaatccccaatactttgagagccccaggacaggcagattgcttgaacccaggagttcaagatcancctgggcaacatggcgaaaccctgtctctacaaaaaaaaattacaaaaattaggtgtggtggcacacccctgtagtcccagctactcgggggcagaggtgggaggattgcttgagtctggtgggagacccaggttgaagtgagccatgattgtgccactggactccancctggg

SEQ ID NO: 617770 - DNA, 976 bp, Homo sapiens
ggagtgagtctgggggtctgggtacaacacccgacacaataagagtgacatgaaaacgtgtacattgaaagagggaggtataggttcccctcgtggtatatatccacttgttatgtgtgcctctatacgctacgttgagaactagcgaatcgaggggacaaggggttgtcccccacaatgacaagagcaacattgttgttcgtgcattcccatactggtacggacaacattactaaggcttttgtcagggaatcgagttggactcaattgtcgtgataactctacgtgcttactctcagaacgtgtggagtcgcattcgatggtcgagtctacgcaactactggctgatcctatcctcgaggagatatatgagtgagtcctcatggacgaaaaattgtggatcctatataagttagataagtaatagcttggaaaaaaaggagatgtgaccacagcactgctccgagacaagatttcctttgaagacagttgctagtaactaacctaaaggggtgtgacttcagatagaaccatggtcttggaagtcagaatgaagttgatgaagtgtcaggacctgctggaaccgaggtgtactttcccatgtgcctcgacgacagataactctctggatgagtagctagtctttttgcccatagggttggtgaggctaccttgaagagtaggggctgtcactgagtgaaaagtgacattcctggccactcactgcatttgatcacagactgtagagtttttgacaaagtcactttttattcttttaagttaatttaacatatgcgagatgaagaaaaacgtgtgggagggtttaatgattgtaattaacaaacatcaatgatttaaaggagagggggattagattctttcaaaaatacatgtgggcccaggaggtaatactgaatattgttcagatccaagataaggttaaggaaagccccagttttgtgtaataaatgagtta

SEQ ID NO: 617771 - DNA, 380 bp, Homo sapiens
  misc_feature (380)..(380): n is a, c, g, or t
atacatacatacatacatacatacatacatacatacgacaggtgcagtggctcatgcctgtaatcccagcactttgggaagccaaggcgggtggatcacaaggtcaggagattgagatcatcctggctaacacggtgaaaccccgtctctactaaaaatacaaaaaattagtcgggtgtggtggcgggtgcctgtagtcccagctactcgggaggctgaggcaggagaatggcgtaaacacaggaggcggaacttgcagtgagccgagatcgcgccactgcactccagcctgggcgacagagcgagactccgtctcaaaaaaaaaaaggaaaggaaaaaaggaaaaaatttttcagaatgtttgcaacatgattctcaan

SEQ ID NO: 617772 - DNA, 1127 bp, Homo sapiens
gccatacaagcccaaccagaaggatcatgccacattgaatggtctgcacagtagtgaggcaggtgctgtggaatgacatctgccttccaacttcttacgtgagctaaggcaggctctcccctgcaatattcagatggcatgttcgagccaccaattctgttgcctatattatatagggtggggcaggcgcaagaacaaggtgggagccaggggcagttccgaagcatgtctctcagagaggagcagcacaggcaagtctcaacgaatgggtcaggtgccgagcttgtggttcctgcctgcacgttgccccgttcctctctgaagttgaagtcacgagggaccttgcgctatgggcctggacgatcagtttgcctgtcaacccagaaagtcggccacacaagccagctggtacggcacattctacacattgcacgcggcttgctattagcacgaaattaccgagatgcttcgtgcccttctgcaaacacccgcaatgttgctagtcgagaactctggcatccgcacgatggcgggaacctactatgacctactcctgtcaatgggcccatctggtacatgttcacggccatatctcactcgggatttgggtcaagtactacagagcacaggcaaaccatttgtgtccatggtccatcatttcccaaggcccttcccaccccactgctcaacgtgtttcacgcattagcatcgcaaggagtggccgctaatctaaccccaggcaaaacaggtgctgcatgtacttatccccatggaccgtgctgcccttactggcacccttccacttgcaacccacccgtacttccttgtatacggacctatgggcactccctacccaaatctctacgtaacaggttggactcccactaagtggatcaccgcgtaaggatttcaaccccgtttgctggttccccatccctgctgacaaccctgggacaaattctacgtgtaggacttattccacgccaatgggccatcacgcagaagcatctgctagggtccccttcccaccaggttaaccgaacaccctcctcctattgggaaggcagggtatggctacttgccacttaatctctccggtaaggcaggcgggctctctgcgcagaacg

SEQ ID NO: 617773 - DNA, 866 bp, Homo sapiens
  misc_feature (131)..(131): n is a, c, g, or t
  misc_feature (133)..(134): n is a, c, g, or t
  misc_feature (141)..(141): n is a, c, g, or t
  misc_feature (146)..(150): n is a, c, g, or t
  misc_feature (167)..(167): n is a, c, g, or t
  misc_feature (171)..(171): n is a, c, g, or t
  misc_feature (182)..(183): n is a, c, g, or t
  misc_feature (216)..(216): n is a, c, g, or t
  misc_feature (218)..(218): n is a, c, g, or t
  misc_feature (230)..(230): n is a, c, g, or t
  misc_feature (236)..(236): n is a, c, g, or t
  misc_feature (245)..(245): n is a, c, g, or t
  misc_feature (309)..(309): n is a, c, g, or t
  misc_feature (322)..(322): n is a, c, g, or t
  misc_feature (345)..(345): n is a, c, g, or t
  misc_feature (351)..(353): n is a, c, g, or t
  misc_feature (361)..(363): n is a, c, g, or t
  misc_feature (371)..(373): n is a, c, g, or t
  misc_feature (379)..(380): n is a, c, g, or t
  misc_feature (385)..(387): n is a, c, g, or t
  misc_feature (433)..(433): n is a, c, g, or t
  misc_feature (826)..(826): n is a, c, g, or t
tctgtctagctatctgttggtaatacagaaagtatactacttttttaaaaaagtgggcagaattcttgtgtatgtatatttgtgtgtacagtatgtgtatgtgtgtatatatatatattatatatatacanannatataancaaannnnntaaggaaaaacaaaaanatanaacaaaaaaannccacagcctcgccaaagaaatatttcaaaatgncnataacaggaggnaaaaangaaaaccanaacctaacttttatacaggctttatctttaatttaacgatgtgcggaggactttcttgcttgantctgttccgggcngcctcccccccccaccaaatgcntttttnnntttttttnnnttttttgnnnttcagnnggggnnngaacagaatgctggaacccaggctggactcggacacactaaggttntgattttgaatttcagccttattagaagatctaacctaagagtaagctaaccacagggattcttttgtagaacactttttatgcagatgaagctattttttccagcaagtagattcttccagtttttccaaggagtaatttccccgaattggcataccacggcgtggacagctgatatttcacccagctgctggcttgtgggtgtggctctttgctttatatatatatacacacatgtgagtctggctgggctggtattttgtttgatcttcctggaaatgagcagtgactaacgctcacataactggttttttttttatctgggctgatgaatacatttacctaagaaactcatttcgttttacttaagaggggaagtgcagttttcttttngcagttcagaatccaagcacttgatttgctgggtttggaa

SEQ ID NO: 617774 - DNA, 427 bp, Homo sapiens
ccttgagactgatagaacagactctaagtctggtaaatatttacaagctatcctctctgaagcctgctaccctgaagcttcatctgcatggtaaaaccttggtcttcataatcccttaccttaacctaaacattcttttctattgattccgggtctgtagataataaccaatcgccaatcagaaaatcttcgaatgcatctatgacctggaagcccctgacttccagttgtcccacctttcctgaccaagccaatgtacatcttacatgtattgattgatgtcttatgtctctctaaaacatataaaaaacatataaatgcaagatgcagcctgacccccttgggcacatgtgtcatcaggacctcctgaggctgtgtcataggcatccccttaaccttggcaaaataaactttttatatgaaaaaa

SEQ ID NO: 617775 - DNA, 399 bp, Homo sapiens
aatattctattctgcatcctagactccacgccggctctcctcgccatccagcagcttcctgtaggtgcgatctcactgtccacgccagatatgacgtatcatcagactccgtggtactcacgcagactgccgcgccatgtcctgctaggcccgctgcagggcgggctccagctcggacaacttggcgttggcatccttgatggccagctctccacgctgctcggcatctgcaatggcggcctccagggaagccctctggcctttgaggccctcaatctcagcctgcagccggctgatgttccggttcatctcagagatctcagtctttgtgcgccgcaggtcatccccgtgcttcccagccaggctctgcaggtcctcatacttaatctggtacatgct

SEQ ID NO: 617776 - DNA, 644 bp, Homo sapiens
gctcgtagaaggcgcattgatcgtagagtcgacgtaatcaggaacgttcttggatgcgtcccctccggacgccctagttgccgggtgctcagactcactcggttgacatgtcgagggagccaagccccgaggcgtccctaacctaaacgctaaagtaacgtcagatcctccagatgagtttgaacaatggtgctccgagctactgtcggatcgtcccgagctgcatcgctgcacatgtatcacgctccatgtgcaaagcatgcagatgcaccggacctaggtaccttgctgtagagaaacatacaatgtcatggacttcttacagtaattaatattgatgcgccatcaatcggagaataatacatcctaaatattcattgaaatcactccctagtctagcaatggaacgccactagatcgatactagaatgcgaaggtagctcctagacattactggggagcaacatggagaaagcgagaccatagacaaagggggccgcacatctcgccaagggggaccgattcccgcgtaggacggtgtccagagatcgtttgagcgtggtcaggcaccggagggagtctttctgatgcatgacctggtgtggcctccaattctagtgtgggccaccggctgatactcagag

SEQ ID NO: 617777 - DNA, 657 bp, Homo sapiens
  misc_feature (126)..(126): n is a, c, g, or t
cgaaagtatcccctgtggggagagcatggagagaaaacaccccccccttcttgccagaaacatatttctctcctctcttgctctctggtgcgacacacgtgggacgacatcgtttttctcccgcgncgacatatgtgtattttctctcgccccccagcacagattcttttgtctctgtggcgggcgtgatactatgagtgtgcgtgagagaaagatatgcgacgcacagagagagagagagatatgtgtgcgagagtggctgtggtttacaggggaaagaggagcacacagttgtgtggtcactccctgacaagatgtcgtgacgagactcccctcgccagccgcggatctatgcaaaatacgcaccacactcactcgtgtcgtagacatacacatcacttcttgtaaaagcagagttgtgtgagacagataaatccactcaaaaatataaagagaggatcaccagtgttttacagaatactcgtgctatgatagggagggtgatgcagagctcgctgccactgttgaccaccacgtggttttgaataattacgacgcacgcgctggagcgtccggcactccaaatgattggtcaacacccacctcatcacactcaaataaaaaaagaaaaaataagggcgaaacaatagatcaaag

SEQ ID NO: 617778 - DNA, 273 bp, Homo sapiens
agatctcagaagtgcatggcctcttgctctatgtgtgaggtctgatccagggcacaatgtctgccatctctgactaacacggtcagtggagccttaaggtctgcccagagctctgtgagcaggctttcatatgtgtgcatatctacatgacacatggtgaagtacctgtgtattctagggaagttgcctaacaccagccttttccgaaggcactaccattaatcgggccccagccccctatctctattgcactatctacggatgctgactccc

SEQ ID NO: 617779 - DNA, 361 bp, Homo sapiens
cggcacgaggcaaaattattgctaaaaaatgctaaggattatctgagccttcagcgagttgtattctttttgctcatggagggtcttcctccatgtagttggctactgactgattagggtggttgttgctgaaggttggagtggctgtggcagtttcttaagacaagacaatgaagtttgccacattgagccttcctttcacaaaatatttctctgtaacatgcaatgcagttttgatgtgtgtgtgtgtgtgtgtgtgtgtgtgtgtgtgtgttttgagacaatctctcctgcaacctctgcctcccgggttcaagcggttctcctgcctcagcctcctgagtagctggaattgcgggtg

SEQ ID NO: 617780 - DNA, 152 bp, Homo sapiens
  misc_feature (24)..(24): n is a, c, g, or t
  misc_feature (32)..(32): n is a, c, g, or t
tccaagtgcattttttagaatatntgattttncttgattttattttattaaaaaagactggaactcagtcccattattcctattaatgtccattttcccaagagatgtcactggagataataatcttaaatattcttcgattgtggaggagc

SEQ ID NO: 617781 - DNA, 105 bp, Homo sapiens
ctctcgttggtttttgactaaaaacatttttctttttttttcccccatagacggagtttggctcttgtatacccaaggacagacatgcaataggcgccggtctcg

SEQ ID NO: 617782 - DNA, 1413 bp, Homo sapiens
acatactatctaccaccactgaacccactgctgccctgggcagtgagtggctagttttatctcctggacttgtaatttacactccagtatatttttacttctatcatactgggcatcattgtgcacacaagcggtcaacatcatcaggcattggtgcacccaattgggtccaggcaagtcccagtgttctggcactatggggctaagcagtggcggttgggcacctccagcatgggcaagggtggtgctcaagcatcctcctgcacctcaacagtgtcatttgccctttcaagcagaacacaatgctgcgggtccatcaggggcaccagctatgtccagcagggtcaggcccataagcagcacaggggcattcaccattgctacagcaccactcctgggcgccacgcgcaccctagtcacgacaccgtcggggtaacacaacactgctcgacagcaccgcctaagtgctccacaggcaagcactccgggcacacgacaaacagaacaatacaactgctaacatccagcactcaggccaccacgacagacacgcaacaacagctcctcaccgccccgccctgcacccacacgcaccagccactacttagacacaccccgtaacgggacactcacacacaaccacaccgacacaccaccacaccgcaaccacacgccccccaacgcacagaacacgtacgccccaaggtacccgccaaccgggcctcaaaggcataccacagcactcacaggactacccacagccaccctgcaccacagccaatcccacaagcaaacaccctacggcccacccggccacaaactgacaggacacccgggacaagccccgacatcaacaccccaccaggcaaccacgacccagtccacgcaccacacccactgaaccagcacgggaccatcagccctgcccgccaacacaccacgtggcccgcacctgggaccaacccctcaccccacaccggcaacaccaacaaaacaacaccacggcgcccaccaccaccgggccacggcccccacctcgcccccacacgcccccgcacccacgccaccggccacgccaagcgaaccaacagacacaaccagatgcacagcccaccatcatcccgcacacccacaacagaaaccaacaggcggacaccacacacgaccgaggagcacagccggccccacaaccgcaacagacacgaccggggccgacatacccaaaagggccgcccagcacacagaggggagccaactccagaccccacacacccccacaaccaaccccgacaggcaaagaaacaccccgccaaaccctaccacccacgacaccaagacgacaacacataaagaagcagcacacagcaaagacaccaaacaacaacaacatagacacgccgacagcgcaatcag

SEQ ID NO: 617783 - DNA, 211 bp, Homo sapiens
tgtagtagttgcaggggtactatataagggtatgaaatcagtaccaacaggtccttggacagctgcctgagcctgtccagcactggggaaaagagactaagtaactggaggctggggggcaggtacagttgctgttggtgcaggtggtctatgaagaattacctggcgctgaaacagcctgtgcatgagtcattggaggaattccaggacg

SEQ ID NO: 617784 - DNA, 889 bp, Homo sapiens
tggagtctgtggagagtcacgcgctgacacgatggaattcatgcgtttgtatcagcccagacattaaggccaaagggagaaggtatggatctgtagctagcaagtgtggtcacaaggaattacggacaaccttagtgcgcgagcctatgagtaagtggaatgtcaatgaggccattactcttactcatctgtcaccctagggagactcatggagttagtgaggaattgcaacgttcaagttccattgcatagaatcacaagaggccaagtcccgataagtatatcagcatagtctgcaacaagtaccaagagctggactgagttcgcttgaggaccatcatcatgttagcgtgccgatgctggaagtggaaggggggggtagtgttgattcgagtaggatgagggtagagcgtctgggagggtcagagtgatacctctcaatgtgaggactccgaattaagttgggagacaataggaacagagtactcgagtgattagttcagggtggttgggatgtgtgttcagatgaattacctgagtgaacataatgcagagatgtcctagtgataccatgatgggtagggtgatgcaaagttggagatcgactcctaggggagcaaggaattggttggcctataataaggcgacagagaattggaaggaatggcgtacccaaggtgaaatagtctaccgttgatccctggctcggtaatcccgaagtgaaaattgtgccgtccagaacggtgtcaggtgtgcatccaagcaccacgcacagagggggcgccaagtgcccatcaagggaaaggcaaaacccagattgaaggaatccccggtgccactggaacgttcgtaagggccgggcggaatggatactaagagcccgggcaaa

SEQ ID NO: 617785 - DNA, 991 bp, Homo sapiens
gagccccaacatagcagcaagtctgatcgatatcatgtacacatgaagcattgccgatcattgtgccgtctcgttcctcttgcgttgatctttgataaccaccgttaggtaagtagtgtgtttaagtagcttggttgaaagacgagagaagaaaggaacacaaaacatatgtaggaagattaacctgatatatcatatggaaggacctaaatgttagaatttgggctatctcatctttataactgtgtatgacggtaagatctatgatacactaaagtatgtggaggtactttctatgatctcctggattaatgatagaactcaaaaaaaggcatgagtacatatgagggtgaggaaccccaagatgcttttaagcttgcaaacatagtgacgtcgagtgatagtcatagtacatctgatggagacccatggagccagtaagtgttaggggcgaacagattgctccaatgctcgggtatagtgcaaatattgataatactggtagtgggcattagaatgtggaaaaggatccattaggaagtgttcgagtgaaacggaaagaaatgcttctaaggactgatcatgacgtgggtgttacgagagacagtgggtaattctagtgatattttgatatggtgtatgaatgttgtgagaatcaggataactttggttgggttccaaaagattaaagggtttaggatcagatatgacctgtgtcattgatcgtttcctgggggaaaggttatcgggagtctgggcgggaaagtggctgatgaggttagatggcatgagattgggctggtatgacgaagagtggcgcatgtcaggtcgggaagctgtggttgaaccttggatgtgaagttaaaacgttctgggggatttcacctttttgaggttggcggtaaaaaggaacgtgggaaaaggaaggaaggggaaggaggaaggaggattggggaagaaggaataaagcggggaaaaaaattttaaagca

SEQ ID NO: 617786 - DNA, 218 bp, Homo sapiens
gggaggaaatagccacctgacgccaaggaagggcgaaggagaaggctttgtgaaatcacctggactgcgaggtacacgcccgggctgctactttgctcaaaaacaagtaactgaacagacgtacgagcttcagcttccagaaggagaagaaatccgggcagcagtgacactggcctccagcctcaatctgttccgtagctcagagcctgcctgccagg

SEQ ID NO: 617787 - DNA, 558 bp, Homo sapiens
tgggcaggtgatcatttggtgtgacgatctcgattgaaaggaatcgggtcacgtctgatccagtctgtgtccttttacaggatgtgtgagggggcagctgggctgagcttggatggattgacctgctgcggaacctgctcacgccctgagttctccaaaagtctacagcttgagtaccgctgttgcgacattccagaagctacgcttgggaatctatgacatagacaacaagacgccagagctgagggatgatgacttcctagggggtgctgagtgtaccctaggacagattgtgtccagccaggtactgactctccccttgattgctgaagcctggaaaacctgcttgggcgggggaccatcacggtctcagctcaggacttacaggacaatcgtgtcgtaaccatggaggtagaggcagaaacctagataagaaggacttcctgggaaaatcagatccatttctggagttcttccgccagggtgatgggacctggcacctggtttacacctctgaggtcatcaagaacacctgaccctacttgaagcgttctcagt

SEQ ID NO: 617788 - DNA, 578 bp, Homo sapiens
agcggggctcttaggctaggtcagcaaggaggcggaactcggtgatctgactggcggtttcccggcggactgagaaggggagcgcgctgcgcgtcgaggagtaacctacttggtctcctgcttcgcgaatggcttcaatttggggctccctcgggcacctccggtaccgctgcagacaccggtgccccgcgggtgggttggaggatttgggacaacatctacaatgcaggttctgcattcagcttttctcccccaataaaacaggaactatggatctttggtggtactcagaacaaaggtttggattggtacatggtttggaaaacaaagggaactagtactggtttaggtactggtttgggaactgactgggattggaggattcaatacacagtagcagcggcaaactacataaggtggtctcttcaagtcagactacaaatgtactaccagtcaacagatgataaatactgcgagtgatcttactgtccaagctgtaggcagatgagagagctgctatttggaaaatgcaattacatgacgcattatgggaccaggaaaagggtatacaaaatcat

SEQ ID NO: 617789 - DNA, 90 bp, Homo sapiens
gcggccgcctactactactactgctcgaattcaagcttctaacgatgtacggggacatgttgaaaagaaagcccggaggagcgaacagaa

SEQ ID NO: 617790 - DNA, 256 bp, Homo sapiens
cgcttccccaccaagggtgacagcccatccatggcgatgaagcattcatagcagccgactagtgaaatcctggccatcctttctgagctctcaggcccaggcagcacgccagctcctggcacgcgtgagctcattactgtgcggcttagagtgttgcacgagcgaactggagctttgcacgggcttgcagcctctggctaaacggccaccccaagcctcgagctggccaggctcctgctgctgcacgacgccctag

SEQ ID NO: 617791 - DNA, 347 bp, Homo sapiens
tacaggatcccgtccggccacgctccgtgtcgggccaacgctaccgtgttgtgccaacgcaccgtgttgggcctacgcaccgtggtccagcagtacgccaaactcatcagtgggtgctcgtccttgcgcccgtatgctggggccgcccaataaagatgccgggggccttacaccgcatggcagtgtcgttgatcacttcgcatgttttggtggtctcaatgccgcgcgctacttgagcacgcaccccgggctcctgaaccgtcagcacgtgggtcccactcacagtgatggcagtgcttccattgatgatgctccaggtgggctcaaggcgggtgacggtgcgttgg

SEQ ID NO: 617792 - DNA, 339 bp, Homo sapiens
ttctctgactcgctcacgtaacgatcacgaacgattgaggacgtgctgccgaacgcagacggagagtttctacctgtggaacactgtgtggcaacagcacgaactgccagaggaacgagacggggcagctctgcggaactgaaagtaggttggtgtgactggatctaaataagaggtaggcagggcgagcgaggaaaccgtgtgaagctgtcgaactggcaactaattacaagggaggtggggcacaaccaggggcaacttggagctttcacttggtgcctggtccttatagcctccccagaattattcgttggatggctggtggagcggtgcgagggt

SEQ ID NO: 617793 - DNA, 182 bp, Homo sapiens
tggtctagaggatcccagtgatgctcaccgctcatctgcagctcactctctgagggtctgaggctgcatgcatcacataagtttatacaaaccagaggcaaacgacccagagatggtggctgctggccagcttagcttcttccatttaaacagagatgtgaggcctgctggttggagcggtg

SEQ ID NO: 617794 - DNA, 1002 bp, Homo sapiens
ttgtgcccgcccccccctgtgcaatacgacgggggggggaaaaaaccggtcgcttatcaaacagcacagctgtgttttcttcagcaggggcccccctactccagcgggtgttgtggttcgaagacaaaccgcgcgggtggttttggatttacccacaccgacgcgctggcgtcgtcaccccctccctcccatgaggggacaaggaaggcaggagattttctttgggtgggaccccacgccccccagtgggttatttcttccattggtgcgcgtgcgggtcgggcggcagcactgttacgcaggtacagtatagatagtgctgttgtgaaaaaacccagacagagccgtcgtgcttttcctaggtggggggagaaccacacaccttgctggcgcccacaccactgttgtcggcacacagcggattgtggagggagcgccctcctccaagaaaagaataagcagagaggagaataaaacaaatacaacatagaataaagaacgtgaatatgaacccacacaacccagcacacactgagcgggggagactctcccacgcgcgctgtcgcagaaaaaggagcaccacggatggggataaaaaatcgcgggggagacccagcgaggagtgaatcaccccccccggccggcccaagagagagaccccctgcgcccaccgcgagaagaacgagggagagaacatactctcatagaaaccctcggggagaggtattctctcccccccgtccttctgttgcgagcacaccccgctgcggatatatgggagaggaagaagacaccccccccccagaaggtggcaaggcgcgacaccacacaaactgcgtgtggaaacacgggcacactgccgcccggaggaccccccgcgcgggggggtttttataggggccccccccccatcgggggcccaaattttccggtttcccccgggttttttaaaaaaatttttgtttggaaaaagaaaataaacacccccctgggggtgggcca

SEQ ID NO: 617795 - DNA, 252 bp, Homo sapiens
cccatttcttctagttcgctgtctccatgccttttcttggcagttcaaacattcagagagggcatttattgcccttctttttgagacggagtcttgctctgttgccaggctggagtgcagtggcacgatcttggctcactgcagcctccaccttccaggttcaagcgattctcctgcctcagccttcccagcggctgggattacaggtgatagctaccacgcccgctaattctgtatttttgtagagatggg

SEQ ID NO: 617796 - DNA, 384 bp, Homo sapiens
gtcacgtgggagggataggaagtcatcggtactgatctggacgcagtgcgaacacagagccttggaggattccgaagcgtgaggaccaggaggtccccaccagaaacgagctgcttacaagtgggtggtggaggcagtaacctcctcatccccgctgtgggtactagcctctctgaaagccctggacttgatcgaggtcgggaacctgatgcttggtgtgaccgtgagtcaaatttgaactcacctgaggaaccatactgcagaggacagtatcacacaacaggctagatgcaagctgcaagcgtcacatcagcaagcaagtcctggcaccccgccagacttacagcctgggtgcccagtgtgaccgagtaccggcttcgcacg

SEQ ID NO: 617797 - DNA, 407 bp, Homo sapiens
  misc_feature (407)..(407): n is a, c, g, or t
acgcggttgtggggatgtcatagattggaaagtgggctgtgtcgcctccagcagaccctttccttactgagctgtgtggcctttactagtcactgcccctctctgggcgacaggggtctgtaagtccattgcgctcatcctgcacccaggaggctgatgtttccggagcacctgctgcgcagtgaggtgccttggggagggagcaggacaggccggcctcttatcttctcactgagcctggctgtggtttgtggggtaagcctcctttctcttctcacttttttctgctgagaacattgggcacattgagtcctgcacgcccgtcttgtacatcgggaaagggacatacagaacctctgacccacttggttagaggtgcagccatgcagtgctggaaccccttgccn

SEQ ID NO: 617798 - DNA, 239 bp, Homo sapiens
  misc_feature (13)..(13): n is a, c, g, or t
  misc_feature (132)..(132): n is a, c, g, or t
gtaggtatatatnatcgtgtaaaacaatgtatgcttttgtacaagagcgtcattaaaagacataggcatgaaagacaaggtccctctaggctgacatagtgccgtctgccaccaatcaggtacacaactttntgttaaatgttcagcaagccaagccactaccctgaagcttccatttattatttcagtttctcccacttaaatataaatagccatcaaaagattaccaaacatctgaa

SEQ ID NO: 617799 - DNA, 229 bp, Homo sapiens
ttcctctcacactgtatagggttttttttattttgtttgtgttgttttggtttttaactttttaataatctgagctggggctgggcatggtaatcccagtagtcccagcactttgggaggccaaggcaggaggatactttgaggtcaggagtttgagaccagcctgagcaacatagtgagaccccatctctacaaaaactaaaacattagctgggtgtggtggcatgca

SEQ ID NO: 617800 - DNA, 398 bp, Homo sapiens
cacgatacggcgactccaaacaggacggcctgtggtatccctcccctacgtctggagcttacggggactggtggagctgagaaccaaacgtagaggaaagaggagaagagcgatgtgggaactggctgggtagcgtgatcttcttgcccccatcttcctcagtgggttggggggtacaaagtcggtggtgtgcccatcccgccaggccccgctgtccctcagaagaggcctgagaccttcaggatgttcttgatgatgacatcggttgaacgcgtgtcaaatcacgatactgcacgttcttgtgtgtcggtggcgcatgtgaagtgcgtgtcgatctccttggtgtctttgcgcttattcaggtcctcaaacttactctggatgtatcttgctgtctc

SEQ ID NO: 617801 - DNA, 273 bp, Homo sapiens
gagggagagtgtcatgtggtagcaaatatatgctggatgctaaaaagggggtgttcgcttggagagagaaggctcagggattggggacagtgtcaccttccatgtgcagggctggtacctgggagaggaatttgggctccgtttcaccgctccagagggaagaactgatgcttttagctactgtaatgatgatgatgctaatgaaaaatgtatcatctactcttttttgaggggaccgtgcccgtggcttacaaaagttcctgggccagggat

SEQ ID NO: 617802 - DNA, 208 bp, Homo sapiens
attatacattttgcacttatttgaaatattatctcacggtacgaaataaagtgtctgtcacctccatgctgtgttgtcatctagcatgagctatctaagttctcatgttcttcagtatctgcatctgtaaaacgaagacaatgacagagccaacctcgcttagaggatcacatggcaaaagaaataaaagttaggcaaaaagaaataa

SEQ ID NO: 617803 - DNA, 590 bp, Homo sapiens
  misc_feature (58)..(58): n is a, c, g, or t
  misc_feature (65)..(65): n is a, c, g, or t
  misc_feature (67)..(67): n is a, c, g, or t
  misc_feature (130)..(130): n is a, c, g, or t
  misc_feature (250)..(250): n is a, c, g, or t
  misc_feature (266)..(266): n is a, c, g, or t
  misc_feature (272)..(272): n is a, c, g, or t
  misc_feature (398)..(398): n is a, c, g, or t
  misc_feature (486)..(486): n is a, c, g, or t
  misc_feature (506)..(506): n is a, c, g, or t
  misc_feature (509)..(509): n is a, c, g, or t
tggccaggtaacgtgcgcccctgcccccccccgctattagaagcccccaagtgtccgngcccgcntnaaccgggggttcagcgggcaattcagcaggggggtttcggagatccggcacactgcggaccgntggggggtgtccctggatgtcaaccacttcgccccggacgagctgacggtcaagaccaaggatggggtggtggagatcaccggcaagcacgaggagcggcaggacgagcatggttacatntcccggtgtttcacgnggaaanacacgttgccccccggtgtggaccccacccaagtttcctcctccctgtcccctgagggcacattgaccgtggaggcccccatgcccaaggtagccacgcagtccaaggagatccccatcccagtcncctttgagttgggggcccagtttgggggcccaaaagttgcaaaatccgatgagactgccgccaagtaaagccttagcccggatgcccncccctgctgccgccactggntgngcctcccccgccccctgggtgtttttttgaaacatttattttttgtttttttcaaataaagttcaaagcacccccctgtca

SEQ ID NO: 617804 - DNA, 263 bp, Homo sapiens
tttggttcctggggggccccagttgggaccccttccgcgattggtacccgaaaagccgccttttggaccaggccttggggttgccccggctgccggaggagtggtcccagtggttagggggcagcagctggccaggctaggtgggccccctgccccccgccgccatcgagagccccgcagtggccgcgcccgccccctgggtgtttttttgaaacatttattttttgtttttttcaaataaagttcaaagcacccccctgtca

SEQ ID NO: 617805 - DNA, 416 bp, Homo sapiens
tacttcacaggtggattccccttatcaaaccatcaaagtctcatgagacttattcactaccatgagaacagtataggagagaccgcccccatgattcaattatctccaagctgggtcccgtcccacaagcatgtgggaattatgggagtacaactcaggatgagagttgggtgggggacacagagccagaccatatcaaggagttagttggaagtgaatgagaggcatgggaatgtagtgatatagcgcctggtgatggattctatgctgagatatgtggaccaaaaggacatgaaaaggtaaggggtggtgaaagggtgatgggatcaatcgtgttgtaagtcttggtggacttaacctgattgatggagaaatgaatattggcgagagtaagctggaaactcagggggtggtcg

SEQ ID NO: 617806 - DNA, 107 bp, Homo sapiens
  misc_feature (107)..(107): n is a, c, g, or t
caagcagcccacgtggtcttcacgtctttcatgtttgaacagccagatacaggagttaaagaggcttagctgtatccaccagaatcttgatggcatatttgcaaggn

SEQ ID NO: 617807 - DNA, 1324 bp, Homo sapiens
  misc_feature (865)..(865): n is a, c, g, or t
  misc_feature (1324)..(1324): n is a, c, g, or t
ttaatcaaaatttaaatataaacaggtcataatcccatattgtacatgcagaacggatttcaataattccaaaaaacacaaggcggtcttctggtcaccatggtggctactgggctctggtcaggcaacaacattagaacaacatatcaatcaattggcagctggtgaggggggttttggtggtatctgcagttggttttcgtgacaaaacgcgtgacagcaacattgtggacctccgtggagtggccaaccgcacacaggggcacgagggccaccccagggcaccaccaaaggggaccagacggaaaaagcaaccatatacagggacacaagggtgagtaacaagaccatacacaacagagcgcgtgtgtctcacgtgaaatatatgtgtgtgacatgtgaggtgtgcacaacaacttaatatatatatgagcagaggactatctattcatcactatataccgatatctatcacacgagttgggaaacacaaaagaactgacccccgagacatcattgtgggtgatatcagtggggtattattatcacacacacgagggtatcatatcgcaaatgttgagtagcaaccgagaaacaccctcacacatataatacgacacactattttgagagaatgagagagagcgcatgagggtatccgtcggcgcacacgatttcgacatctatatgttctatccgacgacacgagtgtgcaaaacaatgtcaaaacgcttcgaaaacaacacacgcacacatctgtggtgatgataacaaccatccatcaccacacctcatgtacaacttatacgcacaattattatcacctaccaggggggaggaaacaccctatttacaaaaggggacnaaactttatttatcacgacactactattataacaccaattctgtgggagccaacctagccccctgtggaaacaggaatgttcgaccaccgacaaatgggtaacacctataatcaaggagccaatgaggtaaaccctaaaagaagaaaacaaaagacgatcacaacaagtaggttagtgaatcagaacaacacagtatgtagcgacagtatagacacaataggacccaccaaaaacagcagttaacaacgcatgtccgggaaagttaactaagaactaagagaataagttaccaggggaagaagaacaaacaatggggcagaagaccaaagaatataatcagcaggaaagagatgaacacaaacgaacacctcagtcagatgtgtgtggtacccaagggatgtagtaaatacacaaacgtcgcgcgaaatctacccacagagatgacccccacaacgcan

SEQ ID NO: 617808 - DNA, 315 bp, Homo sapiens
  misc_feature (27)..(27): n is a, c, g, or t
  misc_feature (43)..(43): n is a, c, g, or t
  misc_feature (163)..(163): n is a, c, g, or t
  misc_feature (179)..(179): n is a, c, g, or t
tgagttactttgccttagaataaatgnctctggctcccatcanagttgctgcaaaaagacattgtttctttttttatggctgaacagtattccgtggtgtgtatatataccacactttctttgtccactcattggtcagtgggcacttaggttggttccatanctttgcagttatgaantgtgctgcaataaatatacacatgcagattttttttgatatattgacttcctttgggtagatacccagtagtaggattgctggatcaaattctatccagtagcatttgaaactgctttaaattaacaatgagggac

SEQ ID NO: 617809 - DNA, 321 bp, Homo sapiens
cgaggttgcagatggccgctgtccttcgctcgagctgcgaccctggctcctgttgcagactgaacagaccacccagtgccgccgctgccaagccctctcctgccgaccagactgcgagacgactacatcattctgccgacagacctgcgctgccacaggcatcgccatccatcgcatcccagcgacagactgctgctcctagtgatctggactcacctgggaggaatctgggctggccacaggccctggacagggatccagacagctggccgccccccaagggatctgtcaccttgagcgagacctatttcctccccaccc

SEQ ID NO: 617810 - DNA, 309 bp, Homo sapiens
  misc_feature (153)..(153): n is a, c, g, or t
tcctgatggggcctgttaccagggtgggcactcatgctttctcttgagctcgatttaaagactcatcaaaactcttccccctaaagttttatattgaaccttagaactgaatcacctctaattgaattgaacaagcagccaataacttagccngttctttgaatccagtttcccaggtgttggaacagactgctgtcctgtgtgctgcagagtctgtcccttgttggcacttaggaagatccagtttctccctcactggaagtctgcacttctcaagcagaaggattaagcctctggggttgcttgcag

SEQ ID NO: 617811 - DNA, 250 bp, Homo sapiens
aagttatgtagtagaatgccttaagattctagactgaattctccgtaggggaatagcgactaacatcaacatgtataatacgccctctacgtagattccatggaaatcctgtataatgcgttaataatatgaatatactactgtctcccacttacagatcggattcatatgacacaatgaaggaacttttatctaagccctgcacaagtactattaatactgacatccaggaaagacctacaggtaccga

SEQ ID NO: 617812 - DNA, 795 bp, Homo sapiens
  misc_feature (760)..(760): n is a, c, g, or t
  misc_feature (786)..(786): n is a, c, g, or t
  misc_feature (793)..(793): n is a, c, g, or t
tacaattcaagatgagatttgggtggggacagagccaaaccatataattcttccccggcccctcccaaatctcatgtcctcatatttcaaaagcaatcgtgccttcccctaagtcccccaaactcttatttcagcattaactcaaaattccatagtccaaagtctcatctgagacaaggcaagtcccttccacctgtgagcctgtaaaaccaaaagcaagttagttattttctagatacacagggatacaggcattgggtaaatacactcgtttcaaatgggagaaattggccaaagcgaaagagctacaggccccatgcaagtccaaaacccagcaggcaaatcttagagctccaaaatgacctcctttgactccatgtgtcacatctaggtgatgcaagaagtgggttcccagggtcttgggcagccccgcccctgtggctttgcagggtacggcccccccttctggctgcattgagtgtctgcagcttttccaggcacacagtgcaagctgtcagtggatctaccattccggggtctggaggatggtggcccctttgtgacagctctgcttggcagtaccccagtggggactctgtgtgggggctccaaccccatatttccctttgacactgccctagcagaggttatccatgagggccccccgctcccgtgcacagcaaacttttgcctggatttccaggcattttcatacatcttctgaaatctaggcggaggttcatgaacgttaattcttcgngcatctgcaggcttaacaccacctanaacctgnaa

SEQ ID NO: 617813 - DNA, 1088 bp, Homo sapiens
agcgggagcgcgctccgcgctagccgcggagagcggccccggagggagccgtggagggcggggcgaggggctcacggccggcggcggtggccggggagctagcagcgcctcaaaaagagtgaatgaaccttgtagcgagtgcgtcagcagaatgtcgagtgttcatgaacggtcaggagatcgtctcgtctatgtgcagacagactccctcgatattgatgcctgtgcactgacgtcccggtgcatctgttgatgcaacgtttagtacctaaggtgattctaacgtttcggggcatgttcgaagcgtgagaacatagagcattcatgagtaagctggtgaagagtacccccagccggcctgaagataaacgatcatctcactgtcataatcacatagcgcctcttacggcatcgggccaggttgcaaggcgcgactctttggattgcatacgcaggtgctcttcagataggggtgcaaacggggtagtcaccgcgttgacctcaggacgaccggaaatttgtgatcgggggtcattgggattgcagtgctacgctcgccatatcctccagcgaggaaagccataagacgtataattggttccataggaatttgcgcatagtagtcgaaagagcatcaagtagagggcggtaatgatgtcggcctggcgacccctccctttgcgcactcaaggatgaaaaccaactaagacatgggaacacatcttttagtgaaaggcattactaccctattggagggaaatcggcactgacttgtgtagagaacagaaaagaacatgggttgtcccattcttagggaaatcgatccatgcctagtttccattggaccatagttcgcaacgaataggcgataatggacgatttagcaaatccaacacgggggcgcgttcggggaatagtcgagacggatggggcaaagggcaacgcggacattcacgcgaaacaggtaggcccaacaaggaaagacagccacccagggcggcaaggaaacccacaacagaaaatggaacgtagcacaagcagccacctagggagccacaccatccgtacaattgacggagaagcaacag

SEQ ID NO: 617814 - DNA, 1109 bp, Homo sapiens
ttgaatcatgtgtggcaccctaaacggatggtacattggcaagatttccgcgtaggtcacaataaaagcgctggtcgtgaacccggtggcccgtttgagcccctctctttctggataatggattgtcccagccgtaatccccgcacttcccggttctcgatgcatattcttccggggattgcacggatccctcacgctgtcatcattcacaagaaagagggcagggcctgtcattaatgtgctccggcggttccaacgagaccagtcccgctctatcgtgggccaatgtcaacgccatcttgcgcccctcgtagcgctcaccttgttgggaatactgcgatacttgtcacgactcgtgtacactacacaggccaacgcgactcacttagttcaggagcaacgacctgctggcacctggcggacaagcccaagattcaggaagtcaaggagcagcggttacggggatctgctggattgaccctgcttgattgggaccatcgtccatagtctatcgagggatcatgcctccaggcaagatccccctggccgtgctctcttgggaattcttcctgctacactgggagtcaccttccccttcacgggatccagtttcctatgagcggctgcatctgctgctcatgccgcccaaacaccacccagatgtcacttacgtcaagaaggtccggaccctccgtatgcacctgttcacggccctgcagctgctctgccttggcctctgcatcatgggccagtcatagtccacatgcatgcctcctggccttccccttcatcacgtcatcctcagcagtgccggctccgacatggtggtgctcacccgtatcttcaccgaccgagagatgagatgtctggatgctaacgaggcagagccggtgtttgatgagctggagggtgtggacgagtacaatgagatgcccatgcctgtgtacctgcctctcgagggacagccgagggaccgatggatgaggggacaggctggtgggatgggattccccctcccatgcccgtccctccttattatctaagtgaataacttataaacgtctgtcttcacataatcccccccctggctccctgcaggtaaagtgcca

SEQ ID NO: 617815 - DNA, 603 bp, Homo sapiens
  misc_feature (341)..(341): n is a, c, g, or t
  misc_feature (468)..(468): n is a, c, g, or t
  misc_feature (478)..(478): n is a, c, g, or t
  misc_feature (518)..(518): n is a, c, g, or t
  misc_feature (590)..(591): n is a, c, g, or t
atgatgtgtcttaagattgtggaattctaaaatattgaaataaaatcatgtttggcttacttttcaaggaaataaaactgctgtactttcattcacagctgatgaaagaattacagaagaatatgggcaacaacaattgtagtagatttttaagtacctagttaaaaagtgttctgggccatccagatatatggaaagcaatattccttaatcttctctcctggagctcatttgctcacgtaaaagttaattataaaacattgctatatgacttctactggaggagaattcaccatgctgggaatggcagcaggttgcagtggagaagggctctgaatcgnaccatgagggggctttgagagttcaagaggcaaattacccacaccactctctggtgccgtgttctcaaacacaagtcaaacaaataggggttggacaatgatgaacttaaaggggtcccttctcatntttgaaaaantgacacaaaaaaaggacaagaaagacaccattcagattcntactttgggttttctaaagataacacccaacacactttagaaacctcccccccttcatgttgttttcaagcnnaggaggaaagta

SEQ ID NO: 617816 - DNA, 889 bp, Homo sapiens
ggaggacttccggagtcctgcgcagggcgctcctcgaaatgaggtggtcggacagcatgtgtacaagaaagcgttcccaggtacaggccttgggtagagaaaacgcttggatgtaacactgttcgcaggcgtgtctgtgacccagggaggaggcgagagtgaactgctccagggtctcgtgcaaccgcgcatcacataggctggtgggattccgtgaccggtactctgccgaggcaatgctgggtcgtctctttccaagaaaattgccactcgaaaacctcaaaaacctgctgagaaaggatcatcgctagaacagtgtgtctacttggagaacgcgagatggccaggctaaagtcaagagatctcctcttgggcaacgtctctgtggctgagtcgtggagctggaggagtggatactcaagaacctcgctcagacacgcagtgcgagcacgacatggccgtccccacctgactggcgtgccgagatgaagatccaatgaagatcccagcctgatgcggagacaaaccctccatctcagcatgtgcaccgtggagctgagcaaagaaacactggacaccatgttagatggcctgggccgcatccgagaccaactctctgccgtggccagtaaatgatccagccagctgccagggccactgccatgacccagctggtcatgagtgataaatgtctccccagtatgcaggctgcccttgcagctgcagctgacaacaggcaggatggtggggacagcagcgcggctactgggcatccgggaagatgacagggggactgggaagaaggccgcggatcccccgttgttcgtcactcgatcttggtaacgtctttctgaaagctggagagcagaagcccccatctttgcaaagc

SEQ ID NO: 617817 - DNA, 1226 bp, Homo sapiens
ctagaagtagtacttgcatcggtcattttgaaaagcactgcaatcagtgaacttgtggcatctcaagaagaacattgaaaaattctatgaatttgttgtagccggtgaattgagtcgtattgctgtcacataatatttagaagaaacacttggatgtcgaacacattctcttctcgtctgcactgctgcgttgaatgtccttggaggctgtctctctatgtatgggttggtatcaatgtgagtcccttcattctagaatattaatggcttttgccattcaagaatcagagtattggggacaatgccgatcagatgtatgaagttcaggtatccacatcataaattcagatgtgatggtttcatgcatgtaagatcgaatattgttgaaggtggatacgagcagactgtcgtttccgtcccgcgagcaaagactttttgtaaatcgggaaaaacagagacctctttttgctttaggatggtgccaccgtatgctccacctacaagcagagattttaccatggaaatcggggctcacgtgaagaactgatttcctgcccaatacttggtcgttcggggctgtcgtctagtgagctacttattagagggaactcctagcgtgggttatacaaggttcaagggctttctaatgttagttccatcgaaccttcgaaaagtaggccgttgaagaatctgcacaatacaggcacgcaggttgaccaatgcgaaacacggtgaggttcgcatttaatgttaggacattcagaaaaggtgaggttgtggactttggggcgaacattttcaagggaattgtgaaaggattctgttgggtagctttaaaaaaattaaatacactgggtgacttagagaaaacaacaatgatggagaataacacagagaaaatcaaaaagaaaacaaagggagataaccagcccacacaacgagaaccaatgaatgaaccaaaagaagaggaaacaggcaaaacgggatacaaacagaacgggaacaaaagaaagagaagagggcgagcacaaaggcagagaacgaaggaaaacaaaaaacacgaacgacgcacgccgacacgacagagcacgacgcaaaggagaagtgagacgcagagaaagaaatagaaaggaaagaagaacgcaggggcaacgccagcgatagacgcaaccaccagacgaaatataaagaagaaagaagaaaagaataagcagacagagcaccgc

SEQ ID NO: 617818 - DNA, 916 bp, Homo sapiens
  misc_feature (22)..(22): n is a, c, g, or t
  misc_feature (154)..(154): n is a, c, g, or t
  misc_feature (333)..(333): n is a, c, g, or t
  misc_feature (339)..(339): n is a, c, g, or t
  misc_feature (602)..(602): n is a, c, g, or t
  misc_feature (606)..(606): n is a, c, g, or t
  misc_feature (617)..(617): n is a, c, g, or t
  misc_feature (635)..(636): n is a, c, g, or t
  misc_feature (646)..(646): n is a, c, g, or t
  misc_feature (651)..(651): n is a, c, g, or t
  misc_feature (654)..(654): n is a, c, g, or t
  misc_feature (740)..(740): n is a, c, g, or t
  misc_feature (749)..(749): n is a, c, g, or t
  misc_feature (762)..(762): n is a, c, g, or t
  misc_feature (772)..(772): n is a, c, g, or t
  misc_feature (789)..(789): n is a, c, g, or t
  misc_feature (792)..(792): n is a, c, g, or t
  misc_feature (826)..(826): n is a, c, g, or t
  misc_feature (890)..(890): n is a, c, g, or t
ggcgacccaaagagccagtggntctcgcaggctcaattccgttcgccggttcgccacctcaggggaacgaaggccatggagtccacagccacggccgccggcgccgcggaggcggggggcggccgacaaaaaagaagaagtacctgcacctacnacaactgcagaaaaagtggagagtctggatgtggaaagtgaagcaaagaaacaaagggggttaggacagaaacaactggggaggggggagaggccagcagctgtcaatgcattccaggaagcagccaggccttgagggaagaaggatggagagacagccaaagagggtggagaagcctncttttnctatgggaaaacacttctggagtaggcaagaatggagaatggggtgtagggaaacgccttggaaggtgtgcatggggaagaggaagaaggagaaaaaacagaagaagaatctctgggagaaaaaaaagataacatagatgaaactgaaggctcggaagaggaggagaaagaaaatgataagactgaagaaatgccaaatgtattcagtccttgaaaacaagtctcttcaagaaaatgaggaggaggagattgggaacctatancttncctgggatatnctggatttagcaaagatnntttttaaaangcaanaancaaaagaagcacagctttatgctgcccaggcacatcttaaactcggagaagttagtgttgaatctgaaaactatgtgcaagctgtngaggtgttncagtcctgccttnacctgcaggnacagtacctggaagccnctnccgtctccttgcagagacccactaccagctgggnttggcttatgggtacactctcagtatgatgaggcattgcacagttcagcaaatctattgaagtnattgagaacagaatggctgtactaac

SEQ ID NO: 617819 - DNA, 982 bp, Homo sapiens
atgctgcccccccgctgtgacgcgcctgagagtgtcctggggccagctccgacacgcggagcagctccccccctctcccgggctgggggcgcacgggttgcctggtgctcttgtggtgcgatggtgagaaaccctgtgtgaatgcccggtccaggaagtgggtcctgcgctgtgagtgttttttggtggcagccccctgcgcacgacagtcgcctccctgaggcgctgaggtgtagctgggtggcttcccctgggatggcttgagtgccgctggtcccggtgatggctcagcagcaacagctgcctgtgtgggcaattgaggggccgatggatggcctaaggcgcccccaggaggtatccatggggccacccgtgtcgccacacacctcctcctgtcaggggtccagggtcctgacaccccattgcgccccagtgcaagggctctgctggctggcaaggaatgtacagctgaccagagaacgagatccgcggtactgtgcctgaaatcccgggagattaatctgagccagcccattcttctggagctggaggcacccctcaagatctgcggtgacatacacggccagttactacgacctttctgcgactattttgagtatgggcggttatccctcccgagagcaactacctcttactgggggactactgtggacaggggcaaggcagtccttgtagaccatctgactgctgctggcctataagatcaagtaccccgagaacttcttactgactccggtgggaaccacgaagtgtggcagcatcaaaccggcatatatggtatctacgatgagttgcaagacaacgctagaaccatcaaactgtggaaaaacttcactgacctgacttcaactgcctgccaatcggtgacataagtggacgagaaagcatcatctgctgcacgagaggcatgaaccaggagctgcaggacaatgacaccagatacggcgcatcatcaggacaa

SEQ ID NO: 617820 - DNA, 192 bp, Homo sapiens
ttgtatataaaataaaccataccctagcaagcaaattattttaatgggtttcaagaattgaattaacttctgtaatggaaattaaaaacaaaggagaaaaaagcaacgtgcagaaaattaattaaaaagagttaggacacagaaacttcgaaatgtccataaaattacaaatcaaaagcaacaaattaaaaa

SEQ ID NO: 617821 - DNA, 425 bp, Homo sapiens
gtgcggtgagggagggccatagtgtgtgcccggtgagggagggcggcgtagtgggtgtgcaggagaggtgggtgactgtcctatgaaaggctcaggaggctcctcattccccgccttactggagaatgcactggacttcctttaatctttggcgcagaagtgcagagagacaaggcggcggtggctgttgtcgccgggtgcagtgaggaagaggccctcggtgggtgcccatggctggccaggaacctgcgctgagcacgagtcaaccggactacgacgtggccagacatggcctcctgcacgtggccgggcatgaccgctttgcaagaccggttgtcacgttcagctgctgccggaatgccaccctcccacgagctgcaccaacagcggctgctggactaatccgccgtacccactgcaccaat

SEQ ID NO: 617822 - DNA, 481 bp, Homo sapiens
agaaagccagatctctagtcttgccctgagtagggatgtgccagccatctctccagtgtgtccgtccacccatctctattccagtgtgcccgtccacccatcgtctatttcatgttcttgttcacccatctccccatgtgcctgtctcacccatctctattccatgtgcccttctatccatctctatttcatgtgcccatccatccatctctatctcatgtgcccatccaaccatcgtctccatgtgtctggtccacccatttctccatgttcccatccaccgatctctatctcatgtggccgttttcccatctctccgtggtgcccgtccacccatccctagttccatgtgcccatctatccatctctattccatgtgggcgtcccacccatctctattccatgtgcccatccacccatctctatttcatgtgcctgtccagccatctctattccatgtgcctgtccacccgtctctatt

SEQ ID NO: 617823 - DNA, 311 bp, Homo sapiens
tctggtggtctcctcccctgccgggcgacgctgcccggcccagtcggcggctggcatgtcgaacagccagttcaaaacgccggggcgcagcagcacggtggtgatggacgggtcgttggcgtagcggcgtcgggccggcgtcaatcgcgggccggccagttccagttcatgcagcgaacggtccgtgtcggcatccacccagtcgccgcggtgcagcaccgtcagcgcgccgagcaggttggcgggaaaacactgcacctcgggcagcgccgggccgcaggcgctcgggcggtgcacggcaatggcatgga

SEQ ID NO: 617824 - DNA, 421 bp, Homo sapiens
  misc_feature (1)..(1): n is a, c, g, or t
naaactcagcaaagatccaaatattgtcatagccaagatggatgccacagccaatgatgtgccttctccatatgaagtcaagggttttcctaccatctacttctcaccagccaacaagaagctaactccaaagaagtatgaaggtggccgtgaattaaatgattttattagctatctacaacgagaagctacaaacccccctataattcaagaagaaaaacctaagaagaagaagaaggcacaagaggacctctaaagcaacagccaaatgcaccactttataaaaggactcttacaccagagaaggcaaaaccagagaggacagaatggatatactctgaatcctgttaaattttctctaaactgtttcttagctgcactgtttgaaaatacaaggaccagtttatgtttgtggttaaaa

SEQ ID NO: 617825 - DNA, 295 bp, Homo sapiens
  misc_feature (1)..(1): n is a, c, g, or t
ntgtcaaggaagacttcttaaaagaggttacagaagatctgggcctacatctgtaatcccagcactttgggaggccaaggtgggtggatcatgaggtcaagaaatcaagaccatcctggccaacatggtgaaatcccgtctctagtaaaaatacaaaaattagctgggcttggtggtgcatgcctgtagttccagctacttgggagactgaggcaggagaattgcttgaacccgggaggtggaggaggttgccactgcactccagcctggtaacagagcaagactctgtctctat

SEQ ID NO: 617826 - DNA, 150 bp, Homo sapiens
cagttctagtctattcgtcggggtcacatgcagtctggccaaggtcgcttgcgtccaaatcagcgatgacagacatatattggaactcagtgggtctgaggttacaggtctccactaacccgtaggtctctttccgatcagtagcgtaga

SEQ ID NO: 617827 - DNA, 812 bp, Homo sapiens
gatcttcgaatgcaaccacgctgtgctcctgctggatgtgaactgccgaaatctgctgtctgtacagaatggtctcagggcaatggctgcagctctacctgtgacttgcggtgacatggtgctggggctgtgctggtccctgcagtgacatcccaccatggcacctttgtctgctgagtatgttgtgtggagctgatttcatgactcatgaatgccgactgttctgagatggaatgattcttacctctttgatctcgacaataaggacggggaggtttacttgcatcgacgctgctggttctacgggaactgtcagcctgttcatcaaccaccactgctgagcccaacctggtgccctgtgcgctgtgttcatggcccaccaggacctgcgggttccccctgtgatctgccttcttcagcaccctgcctgatctgaggcctggctgatgcatgctcgggtttgactatgtgagagcgcttctgggacatcaaaggcaatgctcttcagtctgcctgctgcgtgctccccccaatgtgcctggctactcgatgctgctggcctgtgcccagctgtcatggccagcgcgtgccaggaggcccaggaggacggcttgcctcgacaccagctccgcggctgctgctgacccctatgagacgccgcggcagcggggcgctcgggagccgggactgcggtcgcgattagagacacagaggaaaattcgtgcaccgaaggtctcgggtggccgcgtctggagggagaaaaaggacccggggggtgggcccacacatacaatgggcccggccaccgtgca

SEQ ID NO: 617828 - DNA, 1007 bp, Homo sapiens
gaagtgccgacgggactcttggctgtggtgaagtgtgttgtgtcagcttttgcgtcactcgagtccctgtgtcgctgcttgctaatgtagcccgagtcacgctggtctgtcatctattgtcgcgttacggcggtcggtacggaggcagacaaccaagcgtgtattgtgtgtgtaacctgggacactggcgctggtctagaggagagttagacagtggctttcaagttattcatgtgtcctttatagaagctgtatggattgcgacgaaatcctccaggatttgcctttgtgtaattcgaagatcctagagatgcttgacctatgcagtaccgaggcctggatgtgaaaaggtcattttgttggctccctgagttgagtggttgaactatcgatcgagtgccatgcctcggagatcacgttttgatagaccagtctggccctgatgtccctttgatccaagatgatagattgctatgagttgttggcgacagacagggacgatttattgcttattgattgtctatcgttgaccagccggtcgaagaaggaaggcaggtcacggtctaagatcacattctcgatccttgagtgaatggcgactactgctcgcttccggtggcgtgcatgggaaccaggggaacgaaggttcacacgtcggcattttccttcggaacgatcaagatctatctctctttcgttgatcaagatcagatttgttcagaaagatctaggtctggctctatcacacgggattgcggtatttcaatccccgttgagggtcgaagattcaagaccagtcctttttgaggaacgaagaggaggcggacaaggtcagtattccgttccaataaaacgttccccacagagtccccgaagtgagtgtgtagaggtggtggatccgacacttgggagagattgtgaccacacagagagtgggtgttgaggatagagagaaaacaaagggcgcgactgagagaacaacgcttattggggggagggattacaac

SEQ ID NO: 617829 - DNA, 603 bp, Homo sapiens
gtacgttgacaccagacctcttacttgttccctgtttgatgccatatttctcacactctttccttatacgatgcctcatagccccacccccatatctaggctgagaccttatagccaaagtcaaagcttctatcaccttttctagcccccttcaaccagagtcccctcctgctcctctccgctagtccggcccctgacccctttccccagtacccacttcctgcctctctcattaacccttccgtagctgctcaccatgaccccatcagaatccagttaaaagactcttccaaatttcccaacgttcctcaataccccatctctctaacccaccaaaagggcctacagcccatcgtaaacaagctctgctcatgcagtcttcttagaccaacacactctccatataacacccctatcctccctgttaaaaagtctgatggctcataccgactcgttcacaacctccgagccatcagtcaagctgtcctccctattcatcccatagtccataacccctatccacttctctctctcgtcgctacaaacacacctctaaactgattgactgaaggtgcttcttacattccctaacctgatccaaac

SEQ ID NO: 617830 - DNA, 316 bp, Homo sapiens
tacttggttgggtgaaaccttctatctttactaaatacaaaaattagccgggcgttgtgacgcacacccatagtcccagctaactccggaggctaagacaagagaatcacttgaacttgggagacagaggttgcagtaatctgagatcactccgctgcactccagcctgagtgagagtgagactgtgtctcaaacaaacaaacaaaaaacaaacaaaaaaatttgcattgtaaattgtacctcaaatttgagccagttttggtgtttgtgtacaattaaagtaaaaagcagtccacaataatgttttgtaatactg

SEQ ID NO: 617831 - DNA, 304 bp, Homo sapiens
gaccggccagcccactttaaggcgcgcgcaccccaatgctccatcttcactacatgcagccgctacgtttctgccgcattctacacacgcttgtgttttacttccccaaagagagggtgggaagaggaacatttggctatagaaaagttgtctttttctttagaatctgccacggtgatctcatgtatgtgctgccagtgcctagtagtcccgcgttcacaagtactaccagttaaacccacatcggtgaggctgtcgtgtcatatttcatttctcgtcccctctcctctctcagtttcttttt

SEQ ID NO: 617832 - DNA, 343 bp, Homo sapiens
tataaaggatgttgggagcaagtgagaggctccctgtgttctattttattttcatcccagcaggagctacagtatatagtcctattgcaaagagtatggttagtatgctgcttaataacatgatgaaatagtaaaaggattccattaaaggggcaaggagaggtgttaaagattatgtagggtttcacttatcttttttaaaggaggaaggggtttttcttcaggatcagtggtaggagcctttttaatctgggatgattccttccaaaataggagatgcaagtcctccaatggttcacaggtatcaaggctggtctgggtgatcttgggactcctgagctga

SEQ ID NO: 617833 - DNA, 842 bp, Homo sapiens
  misc_feature (160)..(160): n is a, c, g, or t
  misc_feature (311)..(311): n is a, c, g, or t
agcgggggggcgggacaggcgaactcgcgatgagtggtctcggtcaggctctgcggagaagtgggaataacggagaaagggccaagccctgaagaaacaatacagaaactgaaggagactcgagtaagatacttgatcgaaggaataccaggaattttcnggagccagaagattccaaccagcgagctgacaacactacgcccacacgtaatgtcatcggcgagccaacgatatcaatgacgagcgtgctccttcgcagtggctattggcggatgcgaaggaacataggattccgacactagctaggttgnggctacaaatacggtgacaggtgacacttgattcctacacctagggaggtttcatgctgtcgacgagcacattggaagaattgcccactgacctaacgtcctgcaattgtcaacttcggtacgcaataggaatgctgtagcgttggtcaaaagagccatagaacgaaaggcgctcaccgatgaccactgttgggtggaccatctcgacaacggtaagattgaacctagatagacatgataatcacaggaaacatagcagcggaggtggcggaacgacagatcgtctagtatgaccttagttatctagtgcatatgaggcgtttggagatgatgtaggattgaggatagagacttgctgtgagagagctaagaggaaggctggaagcgagtgaggaaattgggccacaggagttgtttaaatggttgggcctgatcataggtagagaagaaccctcaagtcaatttttgtctctaatgtaactttctacgtctatcttggcggcagggacagttcccaatagtggtcgaaga

SEQ ID NO: 617834 - DNA, 265 bp, Homo sapiens
aagggaagggaatggggagaagggaaaagcaaccagtgtttgagcctcaggaggttccccctccccctttgcctatcccctcccctttggttgagccttgagccttgattgggaactgaaaggagttgcagctgttggcatgaaacctccttttccccgttttggggaggtggggaccagcaaataaatcccccccttccttgagctgttggtggactttgaagttcagccaggtcagattttataaaaattaattaaaatttca

SEQ ID NO: 617835 - DNA, 375 bp, Homo sapiens
gcccgaggtttttactaatagtagtgaagttagatgggccaacccatcaaacttatttttatagaagttattgagaataatcttttttaaaaaatatatgccctttagatattgatatagtttgagaaattttattaaagttagccaagggcctaagtttttaatattggccttgagtatttatatattgggcatcaactttgtgggatacgagacccctgtaaaagtggccgatttgttttagcccctttgagaatttcctttatggagggtatgtaagttatttatatccaaggaaatttattttaggtcgttgtttaaaaaaattgtgtgaaatcaggtagttgcaaataaaaaatagtttggggcatgcca

SEQ ID NO: 617836 - DNA, 332 bp, Homo sapiens
atagatgatgatggagacttagagcaaaggaaagttgggaaaaacaggtagcaggtgaggtcagtaacaggcagaagagctgggaacggagacacaaatacagcctcagagagaaagtcatggattactgtatgaatcccacaaccgagttagccacttctctactgatgggttcatatgcagactatctttttaactatgagctatggaatgagatttcagtctatctgcctatgcccgatactagaatcctagttttccctgcctccactcaaaaactgggaagcagaaaatatggggtgagcatttaacccaggaatatctagaaattc

SEQ ID NO: 617837 - DNA, 216 bp, Homo sapiens
ttgctgctgaggtgatctagaggaccccgagtacccactgctgagattacatgcagataccagataccttaacttgtattctttatcatctttggcttggaagtttcctctgttgtcttgctgaatccttcgctttacctccccttcttcaggaggaatctgtgcggatagattggctggacttttcaatggttctgggttgcaggtgggctacgt

SEQ ID NO: 617838 - DNA, 111 bp, Homo sapiens
ctgaaagaaagtttattgggccctagttaaagttttctgaggcagcttgggccaaggtttcccttgcaattttaggccgcccttttgttggggaacaattttttttttaaa

SEQ ID NO: 617839 - DNA, 719 bp, Homo sapiens
agcggggtctgtgctcaggccccggtctttctcagcgtgcgacgtccctacctcggtcgctccgccgcggtggtacgcatccaggccgagaggcccgaccgtagcggacgccgagtggagtgacccgcggcgggggaggaggagatagcaatcgaggaacaatgccagacgtcgagggaaggagtgtgacccagaaatatcctggcgactcagagggcaggtcctgataaagcatcgaaatctcaggaacccgcaccgacgaagacgagaggcggctctcgaggaccggccgcttcctcctgttctattctggtacgaccacgggtctgaactaggaacatcccggttgacagtcgacagggtttgtcccaatgcgtgacgcgaatcaagcactgtggcggaatagaaatctgtcgatttacctagggactggaaaagagaaagcgggttgttaacccatccctgaggccagtcttggcaaaggccaacgggtcaaaggggacacgagtggagctagatagccttgtgggcgggacctagtctgtagaaggaagccagacgttgatcgagcaaaacttgctcgcaccctggaactgtcaggggttgtttgcctactttggaacctttcttgaaccatgacattgtgagcgcggaaatgcttgtgcctatgcatctgggttaattaacccacgctcaagaaaacccgacctggaggaaat

SEQ ID NO: 617840 - DNA, 261 bp, Homo sapiens
gaccttcatcgcttatacttctcaactctttatacttctcaccgcttatacttctcaacgctattatactatactcacatcgctttatatcttactcaaacgtctatactacgtcgtcaatcgcttaatacttctcaacgtctttatacttctcaacgctttatacttcctcctcgcgctatagttcctcgacgctttatacttcctcaactctaaatacttcctcaactcttaatccttcgtgcgctcgctctctactca

SEQ ID NO: 617841 - DNA, 144 bp, Homo sapiens
tggccctgagctcaaagcaaggtctaactccgaaggctccctgatcagcgaccatcttccttctgggccttttatctacacaaaaccaccggttacaggaatagagaaatttggcagcttggctccagagagggtagagaattc

SEQ ID NO: 617842 - DNA, 510 bp, Homo sapiens
aatcctcacatatcatgatggggacccagggagaggtaattgaatcatggaggcagttacccccatgctcttctcatgatagtgagtgagttctcacaagatctgatggttttataaggagcttttccccctttgcttgcgcttctccttcctgccacctcgtgaagaaggtgacttgcttccccttcacattctaccatgcttgaaagtttcctgaggcctccccagctatgatgaactgtgagtcaattaaacctctttcctttataaattacccaagcttggttatgtctttattagcagcatgagaatggactgatacagtaaattggaactgaggtagtggggcgttgctataaggatatctaaaaatgtggaagtgaatttggaactgggtaacaggcagaggttgaacagtttgcagggttcggaagaagacagaaaaatgtgagggaggttgggactttcctagagatttgcagaatggtttttgaggaaaatgcctaatag

SEQ ID NO: 617843 - DNA, 130 bp, Homo sapiens
cttatgcacgcttactcacttcaaccaagctttgcagtgccagagattgaagagttcaaatctgaccaagatgttgatgttggataagagaattctctgctccccacctctaagttgcccgccaatcgaa

SEQ ID NO: 617844 - DNA, 841 bp, Homo sapiens
gaagcacggcgtgagttcgtccctctgcgcactgccccggttttcctcgtcggtccgtgggctgatcacgctcgacacatccgagatgactcgtccagtggaagtttgtgaaacgtggctcagtctccaaccagagaccatttcctcgttccccagggaggagtgcatagcgcggatgcttgatagctgtgtctagccaggactccgagcgtaccgtacttccatgagccagtcgcacacgcgacggtctggatgactgcataggtccagtgcatagcgcgggggaggacgcgcctggcagcggcaggaagtgacgcgctcacttaccccgtcccgcggccgccagccaatctctccccgcgagggcggaggcgccgaaatcaaagcgagagcgcctcggcctctccagctgtccgcgggtcttgctctgttgcctaggctggagtgcagtggttacaagcacggtcactgcagccttgacctcctggggatccaaggtctggctggaggtggtaacattcattaatctttttcaaaaaccagatccttggctggggtgtggttgcccacacctgtcatcccagcacttggggagactgaggcaggaggatcgcttgaacccacgagttgggagaccaggcctgggcaacatagagagattctgtcccctaaaaaacataaatttacacaaaatcaaccaagccctggtgacaccacatctgtggtcccaaaattactccagaaggctgaggtggggccgaaatcccttgagcatgggaaggtgaaggctgcagtgagctgtgatcgcgtcactgcaactccagcctgggtgaacagacca

SEQ ID NO: 617845 - DNA, 682 bp, Homo sapiens
gaagcacggcgtgagttcgtccctctgcgcactgccccggttttcctcgtcggtccgtgggctgatcacgctcgacacatccgagatgactcgtccagtggaagtttgtgaaacgtggctcagtctccaaccagagaccatttcctcgttccccagggaggagtgcatagcgcggatgcttgatagctgtgtctagccaggactccgagcgtaccgtacttccatgagccagtcgcacacgcgacggtctggatgactgcataggtccagtgcatagcgcgggggaggacgcgcctggcagcggcaggaagtgacgcgctcacttaccccgtcccgcggccgccagccaatctctccccgcgagggcggaggcgccgaaatcaaagcgagagcgcctcggcctctccagctgtccgcggcctctgagcccaagtctgcacgtattcatccagatggcctgaagtaactgaagattcacaaaagaagtgaaaatggcctgttcctgccttaactgatgacattccaccattgtgatttgttcctgccccaccttaactgagcgattaaccttgtgaaattccttctcctggctcagaacctcccccactgagcaccttgtgacccccaccccagcctgccagagaacaaccccctttgactgtaattttgctttacctaccca

SEQ ID NO: 617846 - DNA, 734 bp, Homo sapiens
gattggtggaggaggggtggggggccctaatggagaggtgtgggtttggcaatgaaagaagcaacacagatgtcgtccccaaaatgccagttcaagacaccttctccctgcccccctggtagtaacagtcagggcctggtctgtgctcaggtactgggtcccaagtctgggactctgcgtgctgaatgttgccacagtagaggtccctggcttatgtccttatctccctacggggcttgccttggttttcagtcttctctctctttctctcttttttttttttttggccattttggcccttccttgaccccatggtaataaccaattccatatccaaggggaggggggttgctctcagcccattgtgtagaacgatggtggcttataacctgacgtgtctaaaaatttcccagcttaagccttttcctctacatctcattcccttgtcgtgaatcattgtcttcttctcaggccaaagttagccatggtaaggaggctccagggggcagaccctgaaagatcaaaaacggctttctgcaaaagaccctccccgtgttcccaggacaagagttgacgacttgcacggggtgatgtggctcaataggctccagatctgagtaaagaccttgggcttggaagagcgtcccttctcaagtcaaccagagtgaaccttctgaagcttgtgcccagaatattaccgccaagaccaagggaaccctttaaagaagctccca

SEQ ID NO: 617847 - DNA, 301 bp, Homo sapiens
tcgctattcatcggcacctcgcttatcatcggctcctcgctattcttcggcgcctcgcttttcatcggcaccgtcgctattcatcgccctgccgactggtagtcaccggtcctaccatggctgaccacgtggtcacggtgaatcatggttcgtttctgtagacggagcctgcgaaacggctcacacatccctcgtgagcctgagtgcgcgcacattaccctctcccgcacccgagaaggtcgtgacaatgcaatgtgaatatccgactcattccgagagccctattaggtatccatgaagc

SEQ ID NO: 617848 - DNA, 97 bp, Homo sapiens
gctttcctcccccccttaccccgctttttgaaagcctttattttggtgggggttttttcataaaacatttgaaaataaaaggtcttttttcccccca

SEQ ID NO: 617849 - DNA, 390 bp, Homo sapiens
  misc_feature (28)..(28): n is a, c, g, or t
ggcctgaggccaggaggattgccttgtnccccccgaagtttgaagtcccagtcctgagtaaccataacaagacccctgtcctcttaaaaaaaaaaaatggcctgggccgtgggttgtcacgccctgtaatccccagtagtttgggaggcccgaggtgggtggatcacgaggtcaggagtttgagacccagcctgacccaacatggtgaaaccctgtctttactaaaaatacaaaaattagcccaggtgtggtggcgtgtgtctgtaatcccagctactcaggaggctaaggcaggaaaatctcttgaacccaggaggcgaaggttgcagtgagccaagatcatgccactgcactccagcctgggcaacagagcaagactccatctcaaag

SEQ ID NO: 617850 - DNA, 955 bp, Homo sapiens
  misc_feature (522)..(522): n is a, c, g, or t
  misc_feature (532)..(532): n is a, c, g, or t
  misc_feature (647)..(647): n is a, c, g, or t
  misc_feature (650)..(653): n is a, c, g, or t
  misc_feature (656)..(656): n is a, c, g, or t
  misc_feature (659)..(661): n is a, c, g, or t
  misc_feature (664)..(664): n is a, c, g, or t
  misc_feature (668)..(669): n is a, c, g, or t
  misc_feature (677)..(677): n is a, c, g, or t
  misc_feature (679)..(679): n is a, c, g, or t
  misc_feature (687)..(687): n is a, c, g, or t
  misc_feature (689)..(689): n is a, c, g, or t
  misc_feature (726)..(726): n is a, c, g, or t
  misc_feature (729)..(729): n is a, c, g, or t
  misc_feature (739)..(739): n is a, c, g, or t
  misc_feature (744)..(744): n is a, c, g, or t
  misc_feature (750)..(750): n is a, c, g, or t
  misc_feature (753)..(753): n is a, c, g, or t
  misc_feature (831)..(831): n is a, c, g, or t
  misc_feature (877)..(877): n is a, c, g, or t
  misc_feature (946)..(946): n is a, c, g, or t
tgccagctctgtgctgtggcaagttacttcctctccccaggtctctcggtttcctcatctgctgcctctccagacttctgccagaacattgcacgcgacagtttcaggcacagaactgactggcagcaggggctgctccacgagtgggaatttgctccagcacttcacggactgcaagcgaggcacttgctaactcttggcctccctgaacataggaaacccacctgggcagccatggaatgggacaatggcacaggccaggctctgggcttgccacccaccacctgtgtctaccgcgagaacttcaagcaactgctgctgccacctgtgtattcggcggtgctggcggctggcctgccgctgaacatctgtgtcattacccagatctgcacgtcccgccgggccctgacccgcacggccgtgtacaccctaaaccttgctctggctgacctgctatatgcctgctccctgcccctgctcatctacaactatgcccaaggtgatcactggccctttggcganttcgcctgcngcctggtccgcttcctcttctatgccaacctgaacggcagcatcctcttcctcacctgcatcagcttccagcgctacctgggcatctgcgacccgctggcaccctggcacaaacntgnnnnccnccnnnctncctnnctagtgtntntagccctntncctccccctcacaaaccactccctccccacacccatnttncctcccacanccatncacccnaancccactctctcctatcaactcaccccccctcccctccccacccactatatcccctatcccatccctctcactctcatnccctttctcctcccctttcctcccctcctcccctcctaatctctcntcccctccaccctctcccccaccatcccacccacacctctcccaaaccacccccctccaaccccccacnatcccctcc

SEQ ID NO: 617851 - DNA, 735 bp, Homo sapiens
tattattcggcgcatgagctggagtcctaggcacagctctaagcctccttattcgagccgagctaggccagccaggcaaccttctaggtaacgaccacatctacaacgttatcgtcacagcccatgcatttgtaataagtcttcttcaggtagtaatacccatcatatatcggaggctttggcaaactgactagttcccctaataatcggtgcccccgatatggcagtttccccgactatagaactagactataaagctgtctgactcattacctcacctctctccgtacgtccttgctctgcatctgcttatagatggaggccggagcgaggaacaggttgaacagtgctacccgtcccttagcagggaactactcccaccctggagacctccgtagaccctaatccatacttctccttagcatccgtagcaggtgtctcctctatcttaggggccatcaattttcatcatcaagcaattatgcaagtataaaactcccctgactcagtaacccaagtatccaaacgccgcctcgtttcgtgctgatccgatccctaatcacagacagtcctagccttctcctatctctcccagatcctagctgctggcatcactatactactaacagaccgaagctcgaacacaccttcttcgaacccgccggaggaggagaccccattctataccaaatctaaaaattaacaaccgggggggcgtggaaagtttccctcgag

SEQ ID NO: 617852 - DNA, 387 bp, Homo sapiens
cccttttcccttttttgccccttccccccaaaggtgccctttagggcgggaaaaggttaatccccccgcctaatccattactcgcctattaaggaaaaaaggaaactgtgaaagggggggacttttgggcagcccggttttttttgccaaaaattatgccctttttccattttttatttaaccggggttttccaaccaaagggaacctttttttttttttttttccggttagggggtttgggttttaccagggaaacttaaccccaggtttttggtaaaagggggttttgcccccttaaatttaaaagccgcccttttaaaattttcctaaccatggtttttccggattggttggttaatttttaaaaaagtcctggtccgggtgga

SEQ ID NO: 617853 - DNA, 1070 bp, Homo sapiens
gatgcagctgacctgtagcacgcctagaggtggcccgaatgcttactcgtagatgcggctggccctatccgctgatgatgtctagagattcccaggtcccgcgttaaggaaggaacggcaaaaacacaggcagctctaagtgtacgacgagggaggtctcatacggcgtgagagtgaagcccaggacggagatactccgctataccgcatgctcgaagatgggagtaacgacaatatatcacatctagtcgcccaaggtctaggaaactgtcatgatagtggcgaattctctggtcattcactagataaccctccagcctgccctgtacgtacacattatagattgcatcctcatgctcttctgagcccatcctctgatgctaccgcatacggggactaacacgtgatagaagtgcctaccaaactacatcaccaagtcataaatgtcaagggtaacttagtattactgatgaagaagcaccaagaggatttacaacctaagtgatctagcggcacaaagaggcctggacatacatctaactctggcttcccgtggaaacccgtgcgcatgggattcctaataaccttggatccatccgttgggcaccgtttacgcgacataagcctggccatggtggagaaagtatgagcacggtggccagttgaaatgagcctaaccacgtgctagagcccacaaggtggaacccatatatatggagccttgataaagaggaatccctgtataaacaatagttaaggtgacgatccataatcacctctgaccccttaggtacgataaaagatcccgtaccgcaaagcactatatgtgctgactaagcgggacataccactaacattcagcactgaaacgtccacatgacacccaagatcgtagcaagtgcattgcacaactatcaagcggcacaagggaccacacaacgagttctacgcataccgcatatgatagacgaaacaaaactcaaatacgcgcagacgacaaagtatacatctgatgtgcgttcagacatcgcaggcatgagacatgcccatcacagcgaacgaacaaacac

SEQ ID NO: 617854 - DNA, 227 bp, Homo sapiens
attagcaagatggaaaatggcacactcatatgtggaaaataatatgggagctcctcgaaaagttaaacatgaagcccccatatgacccagcaataccactcctaggtatatatccaagaagaaagaaaaacgtgctcccacataaaaacgtgtatatgaatctacacaggcagcataattttgtaacatgccaacagggtgaacacaacccttgtcgaacgttctca

SEQ ID NO: 617855 - DNA, 1053 bp, Homo sapiens
ggagaaatcaagaggacaggtgcctccgggtggagagtggtctattaacgagggttacatgatatccacttgccttccagcaatacatggtagtgccaagttctttagcagaccaagatctaaagatcttgacccatgctttatcgttgggagaaggatgccacgtctggtgctggagccgactctaacggcatgtgcctcttgtgcgaatggccctcatcgaagagacgatgcatgctagcgagagcgaagattgaccacgaggatcttggtagtcgcaatcacactaaaagtcacccacgagagaagtgatgtttacaaatcagatttggataagagcttgccggtacatattcaagaagtacaggcagaatgtcgtaagagacttgaagcagccttcatgtggtcagagtgaggccctttccgatggaacatcgtgataggaagaagactgggttgatacttcaccgtggagaaaatccgctcgattgtgtctcgtagactactcgtatggaggccattgccatgcaagccagtacacgctggaaccttcgtcactagcgatagctactacagacgcgacccattgtgcctcataatacttcgtaacagaagcagcgaggaacgtgacagaccatgttagcaagactaggggtgaaatgcctcgcagcgcggaagcgaaagccacacctgcgtgcgaaccaggtagaccaacacggcgcccaattccctggaacatgaaccacgacgtgcgatagagcaccaagagcacgcatgtgggaaggagcacgggacaacccagctgtcaccatagaagtgccgagactcatagagtgagagcccaatcgacacaggaaccctcactacagatactactactcacgaagcacctgacactacccagacacaaagtcagacgctaccaaacactgcctactgcaagggaccggcacgaagggctcagagaaaacgactacgccctccatacacagacacacaaaattccgccgatctcatcttagccccgcaccacaggaacccaacactgccaaa

SEQ ID NO: 617856 - DNA, 178 bp, Homo sapiens
gtagatttcataagagatgcagtctcctcttgccacccggaaccgcacatcagtggatttcaaagacgactgactacaagcggcaccagctgacacggacaattagtgagattaaacctcccaacctcttcccactggccccccaggaaattacacactgccggaagaagaaaatgat

SEQ ID NO: 617857 - DNA, 752 bp, Homo sapiens
cgtctatgggacggttccctggttacgcccgggttttagacccattagtgtgctctctccacagacggcccgatctttgtcggacccgcccaatctgggtccgcacactaacgaggttccattgcggtcccgacatatcccgcggctctgcctatatcagcgcggggggccccgcgcggatgtgtttctccacccatcaccggggttcctctggtgcctttctcccaaatatgccgaaggttcttcgggaacaaccaagtgccacccgcgcgctcctcccagagggtttacttccaggggacaacccaccacaaggggcaatgcccccgcccaaggccccccaccaaaaatatcggggcacaatggtgtcccgaacacacacataggctcctttcggcggtccccagaacacgcgtggcgttgcaagccgccgcaccagcactcgcccaaaatttggcgggggctcgaacacgcccgcttacaagcagaactgctcggctggcccctgtccgccgagccacctgcgtcgattccacccccgacaagcggttaccactcaactgtcgagccaatggacgccgccccaattggggtggagagcaagaaccccccgtcgccgtaaagagagccgcgcggggcggcaccccgcgggtcacagcctggtgctccaccaggggacaccccccccccgtttttttggccccccccccccccaccttttgggggggaaaaaaaacgggtttaaaaaccca

SEQ ID NO: 617858 - DNA, 729 bp, Homo sapiens
  misc_feature (76)..(76): n is a, c, g, or t
  misc_feature (84)..(85): n is a, c, g, or t
  misc_feature (121)..(121): n is a, c, g, or t
  misc_feature (157)..(157): n is a, c, g, or t
  misc_feature (184)..(184): n is a, c, g, or t
  misc_feature (228)..(228): n is a, c, g, or t
  misc_feature (232)..(232): n is a, c, g, or t
tggtcttggtacaaaattttattaaagggtctttagaagagcaacatccagactccaaaatacagctgccaagganacccgttnntatgctggggggacgggcgggggcatggcaggcggntctggtttcccacccttctgttctgaaagtgggggntggggggcagtatctcatcttggggtnccacaaggctcacggtggtcaggcaggggcttctaagggccaantctntaccagtggggctcccagggcagcagtgatcttcaccttgagtgcccagaacacccgtgtctgagcaacacggtggcgcacagcagttgtcaacgtagtgagtaaacaggggtcctccgcgggggactcatcagggcgcatccagcaaactctcagggattatagcccgtcggtcctcgggagttcccagacaccaaaacctcgcagcctggggccccactctccatggatgaaccggagcacaccatagcagggccctccggacagaaagccctcctaggagttggtaccgcagagactctgccggggccaagggcacacagacctctaggggccaccttttcagcataaagctctacatggccctctggaaagccaaacctcttcttgaactacagcagtcagttcccgaatccgcgggccttctcaccaagacacatctgtgttctggtggtacgataaggatctggactggtggttgtaatcgaacctcagtc

SEQ ID NO: 617859 - DNA, 113 bp, Homo sapiens
cagccagtcgcagggggctctgctgagggggcaggcggaaggtggaggaaaccgcagataagttggggcctcttggaaagatagagattaatacaactacttaaaaatatata

SEQ ID NO: 617860 - DNA, 295 bp, Homo sapiens
  misc_feature (64)..(65): n is a, c, g, or t
ggggggggccccccctttgttttggggggggaggagggaggccccccccccccccccccgtttnnaggggggtttttcccccccccggggtttttttaaaaaaggcccccccccggggggggggcccccccccacgggtttggtttttaacccaagtgggcccccccggggctggtggggggtttccccccccctccccccttttttttggccccggggtttccttggccccccctggcccccccccctttttggggggggggccggggttttttttttgggggttttggttggc

SEQ ID NO: 617861 - DNA, 269 bp, Homo sapiens
tgacccacacagggctctccagtgatgggaaccagtggttagtggtttcaaaggcccaggtgacaccctccacagacctaatggggtgtcctaaatgtgcgctcccccctgtattccccttcccagggcagcccctgcccagcacaaaagcccaggaccggctgtgctctgccacgcctggggcagtgacttctgagtttaggatctgtatattctaagtccccagttctccgtggctctcctttctgaaataaaggattgaaaacggt

SEQ ID NO: 617862 - DNA, 260 bp, Homo sapiens
cggaccatttgggtgagcatcgggatcggcatgggcgatgcggtgatgccggcaacggcgagaacggtgagtgcacggaggctgaagcgaacggcttgaagcaccctgacctcgattcatcttgaaacggaaaatgcgatcttgagcgtggtagccccacgctcccggtttgagaagggggaaacagttctttgcccgcctcatacggttcaaggccattgaaatgtgtcaatccttgggcttagggatggctcaccgca

SEQ ID NO: 617863 - DNA, 328 bp, Homo sapiens
tccccgcctcacccggaaatttgcccacagaaccctttaaatccccttgtaaatttaactcgaagtccaaagaggaacggctctttggacactaggaaaaaaccttgcagagagagtaaaaaatttaacaccctagcgataacagcgcactcctattctagaggccatatcaacaataggacttacgacctcaatgttggattaggacatcccgatgctgcagccgctattaaaggttcgcttgttcaacgattaaagtcctacgttatctgagttcagaccgaagtaatccaggtcggattctatctactaaaaattcctccctgta

SEQ ID NO: 617864 - DNA, 929 bp, Homo sapiens
tgctgctatcgtttaatatagtttaacggatgatgaacagtgactcgacggctgcttcatcgtcagtatgtgagctctaatctggttccgagttacgagaatgaccattgtaggcttaccatgtgcgaagacggggagagtgagcctgagagtatgtgagccagtcgtccaggatggcgtgcgagtggagacagtacgtacatagcctgctctgcagacttagtctcgtgtgctcgttctagttcgaatacctgaggttgctcagtcgctgcatgcggggtttccctagcggcgaatccgtgttaccctacatagcaccgaggtccacctgatccactcctgttcagcgcgagtacgagagatgcgaatgaggtggccagcgcagatggatacaaggaagcacataaactgacgtatgagcgcggtagcgtacgggagggggcttaagattcgtatacgaacgtgccggtgactatactatacacgctcgctataatattttttcctaagcataatcagggacgatccctcgaagcacctcccttgtagtaaggatttgaactaaatctggaggatgaggtgaaatcactctgatctgaggcaccgcacaagttgccgtgtcattgagttacatcgacatatacgtcgttgttagatcgatgatgcgtagtgggccacgaattgagaagttttgaaaaaatagatggggaatgaccacttggagtgtcttgaaacctagaacacaatattatacactgttacgaactgaaacgggtgggtataatctggcagggtctagatgcgtcatggaagattttgttgaggacgaaaggccaagcaagtggtcaatagcgggatctgtccttacgaattaagttgtgacgtagcaccatgatttaggtttataagggcccagtatttgaactcta

SEQ ID NO: 617865 - DNA, 301 bp, Homo sapiens
tgaccctaaatatgctgtctcaccatggtgcgctgggatatgtctgaattttgtctacgatggcctctggtatgacttttgtcttacccgaccagataactcccaagaatttggcagacaacccaggcccttgcaaccttgtgattcatttgacagcccaacctacatgctgccaacatgttgttgcaaagaggggcaccacatgcttctaaaatactgcagtgagaatacagaggttaacataattatcatcacatgtaattggaatatggctggatcccacttatggaaaatttccatg

SEQ ID NO: 617866 - DNA, 866 bp, Homo sapiens
gcacctggcaatgcctagctaatttttaaattttatgtagagacagggtcttcctatgttgcccaggtgtcttgaaactcctgagctcaagcgatccttctgcttggcctcccaaagtgtcgagattacaggcatgagttctcattctttagaaccattgtgatgtagtgtgtacagtccacagacatttatcgagtgaggtcttgctcttgttgccccatctgagttgcagggtgtacaatcaatagctctctgcagtttgaacctcctgggctcaaggtatcctcccgtctcagcctcccaagtagctgggatggagggtacaccatcacgctgaccatttgatgtcagttttatcttgtgccatccagatatgggacgcagtttgacagttactctcaggcttcatctctcttcactcatgtaagctttttttctttccaaacaatttctactgggaattcacaccatcacctaaccactagagaatacgttacttcatgattccaacacctagtttcaacaaagtctcctcccatttctctgtgtcatacacgtcgctccttccctccatagtcaatgtattcactccatccatttatcacttgttgaacaaagtttgctttggtagcaagtactgtttgacggggagctcagtaactggattttggctccgggttcagcaatatcctagccagttcccgcttggtggatatgaggtttgaatatgctggtcattggggtgggaccgatacacatgcatggtcacttgacagttggctgacaatgatgggatgatagcagtactgtagggcattaaagaaagcggagtaataaagagaaaggaggcccgacaaaacctcgtg

SEQ ID NO: 617867 - DNA, 124 bp, Homo sapiens
tccagtcagccacacagcagcctgtaactgctgacaagcagcaagctcatgaacctgtctctcctcgaagtcttcagcgcggaggagcgggagaagtccatcacccgggcccgcccttgacttg

SEQ ID NO: 617868 - DNA, 432 bp, Homo sapiens
  misc_feature (188)..(188): n is a, c, g, or t
  misc_feature (191)..(191): n is a, c, g, or t
  misc_feature (196)..(196): n is a, c, g, or t
  misc_feature (200)..(200): n is a, c, g, or t
  misc_feature (324)..(324): n is a, c, g, or t
  misc_feature (337)..(337): n is a, c, g, or t
  misc_feature (387)..(387): n is a, c, g, or t
  misc_feature (408)..(408): n is a, c, g, or t
  misc_feature (429)..(429): n is a, c, g, or t
ctgtctcagggtatgtatctgcctctgcctgcatcagcactaactatacatagtttatttcattgtggctgtattttataatgtccagtggttctaggctttgggatagaggctcagccgaactgagaggagaatgactgtgattagcttgatggaatcttccttggcccttgtgaaccttgagcagnacngggtnaccnactaagaatttcaggcttttaccagggctcaggagactaattcattgtttcctaatcttctcacttctcttaagccttaagtgaagaattgaaaaatgcattatccagatttccctgatgtgangttctggggggtntatgtatgtaaagtggttgaaggaacaagctggctcaaagctctggattngaggagattcacgatggtaanttgtccaacataaattggggnaac

SEQ ID NO: 617869 - DNA, 232 bp, Homo sapiens
ttcaaatttgtctggttaaaaaataggtggtatatatttaggccaagaatattgccaaatacattaagcttcatgcacttaaagaagtatttttagaataacaatttgcatccttacctagtgaaacttttttagaaatatttttcactttaagtcatgtatgtttctctttgattatctgcatgttatgtttaataagctactagcaaaattttccatagcaaatggccca

SEQ ID NO: 617870 - DNA, 172 bp, Homo sapiens
agaaaaatttttttcccatgcaagggaagggggggcatggtctttttataaaacctttcagaatgtaaggaataaaccatttttaccccccttaataaaaccttttttaataaatgtttttggacctttgaatgaatttgaattaataaatgtaattgaaggtcctgggcca

SEQ ID NO: 617871 - DNA, 355 bp, Homo sapiens
  misc_feature (28)..(28): n is a, c, g, or t
  misc_feature (91)..(91): n is a, c, g, or t
  misc_feature (164)..(164): n is a, c, g, or t
ttttctatttgattggttagagctcttngtatattaataacatacgtttattttttcatataagtacaaagtatttttttatcccagtgtntcactgttcttctgtttatcagatcctggctccaaagcagtgcaacatccttctcagggacacagcattttanatcttacaaagcccctcatttcccatctgtcatttatgtctcaggacatccacatgaggcaagctgatgtatttttcagtaaagaaggagactttattgaccaggcagtgcaacatccttctcagggacacagcatttcagtctgtacaaaccactaattccttctgtgcccttaggcaagtcactcgccc

SEQ ID NO: 617872 - DNA, 875 bp, Homo sapiens
  misc_feature (1)..(1): n is a, c, g, or t
  misc_feature (41)..(41): n is a, c, g, or t
ncaacagagagttattaaaggcatggtcgatgtgtgttgtncgcgtccgactcattcaatagttggcactgcttgcctgtgccctagtgaaacgggtgcccttttatcattacaacaagggtgtttttccttcataggaaaactgtgtgtcccggtccctcttcacgtgggggtgcccccccccgcgtttgtatgtgcaaggctacccccttggatcttggcagcctgcagcagtctttaacggggcgggcaaatgagtttccgaaccggggtcgggcatctgagcaaggcccgtttcttggtagacgcgtttattttctccagatgccaaagggttctggatcaaatgctctctatgaaatagtgtttttacccctcgcagcgcgaaacaatgggaaaaatttaggcttcagatgccatcaataatgtcccgccactcttcccgttcggttcaaatctccaaccgtcacccattatgggcagattacgccatagacgctctgtgctagaccctagtgcggagaatgctcccataatctgctacccgctggcgatccccaaaaggtgtgcaccaaagcgtccggtcaccaggttgtgcaatagccgaccttcgtgactacaccctttcgctcggtgcatcgaaccccctgcagaaggggtgtccgggcactctttcagcccccgcccccccatagtttagttttagctccaacgacctagaccgcgccactgtcaccttgtaggggctgttcgccgtgatcacccaggcaaggctgaacttcccagcaggattggcatgtacagtagacatgtggaacccatctgcccccggcggttctaaaaccaaaggcaaaaacggatttcccaacaaaaca

SEQ ID NO: 617873 - DNA, 694 bp, Homo sapiens
  misc_feature (161)..(161): n is a, c, g, or t
gtctgtctacacgaatatcgtatatgtgcaacagagatcacaatactgcaatacttgtagtctttagtgagtgcatacagatcagcacggaagcggctgcatgacagacactagccagaaaggacgacaccattgcagtctaagtagagtgaggcttagantagctctggcgtatgccagtcgtgactgcaatatagtggctgacatcgatcggtgcttggcaataccgttcacgattgagagctcaacacgttgactctatcgagagcaccaccatgtgaaaaggtatacgtcacaagtagagccattacagagcttggagaaagatatcctatagtatagattacccacaaaggatactatactacgggaaatcaattcgtcgataaccagccgattcgagaggattcagatagctaatatataatagggaaacttatccaaatcaaggtaggacaaaaattggctcgaggtttgtcacaggcgctttgtgtacgccacgtcaacatgaccaacgcaaaatgtggcgacctctttctccgttcacacagcggaggactgactggccccacgccagcgggcgatagacacttgtaccaatgaccacgaagggacacagcgtgccagaaacgaacatgtaaagcctcaaaccatggcgaaaagccctgtacaacacattgaagtggatactgta

SEQ ID NO: 617874 - DNA, 130 bp, Homo sapiens
tgatatctctgcttccaaggggggatagtgggcatgacactggccattgctcggagatctggctcccatagtgtatccgggtgatgaccattgcgcccaggtctgtttggcaccgccacatgactgagca

SEQ ID NO: 617875 - DNA, 328 bp, Homo sapiens
ctcggcccggtcagtacggatgtgggtgagattcccaggtcactggagttgtgtacctaggaggattatggctgcctctgctgagtcatgcaggttgtcagggaagtgggggaaaaccggcagtcacaggtctcatccagatcccatgcaaacggaagggctggtctcactctaatcatgcctcctctaaccgccccaagtctgtttccaggcaaagggcaagactggcttgaaaacttgcctgaggctttctgcctcccagctgtgaaagaaaagggctttagtttttcccctgcatgtgaaatctgcatgctggattcacggcccg

SEQ ID NO: 617876 - DNA, 115 bp, Homo sapiens
ctcaaatggggagatagttggtattaggattagggagatagttggtattaggattaggattgttgtgaagtatagtaccaactatctccctaattgaaaacaaaatactcaaatg

SEQ ID NO: 617877 - DNA, 84 bp, Homo sapiens
tttcaggagtactcacataattacccgccggagtctgtaaatacacatttattttatttctttttttattccatatattaatga

SEQ ID NO: 617878 - DNA, 309 bp, Homo sapiens
atgagatattgtgtgggtgtgccagttgcaggtaggcacatggattggacttagtttccttaaacatctaacaagtaggccgtttttgagcagcatgtccatgtttaagatgcttcctcatgcttattaaaagcattctctgtgacttagtctcacctctatataaatctgaccaaagagaaattcatgtaaccatcccacatactcgttttgggtttgcacaaccaaattattattttttttttaaaattttaaggcaaaaggtttatttaaaccaggaatatgttgaggagcaaatgtatctaggga

SEQ ID NO: 617879 - DNA, 152 bp, Homo sapiens
tgatttaatctggtgcaaaccacctcttgtggttttcatctggatatgtgtgtcaaccgttacaactagtaagttttaaaccatctgttaaaattagcactttatgtaacatttggctgtaagcacaccattaaaaaggatgtaggtattta

SEQ ID NO: 617880 - DNA, 1471 bp, Homo sapiens
gcccctccccccgtgcgccgttccgcctgcgccgcgctcgctcccagtttcacgctcgtgctaggcttgcgccgccgtcgtctctcttcagtcgccatcatgattatctaccggggacctcgaagttcagccaccatgcaacatgttctcgcggaccatctaccaagatccgtcgagatcagcggacgcgcgtatgtacctggagtgtgagtagcgcgaagaatggatctatgtagcgcacatgtaagtgtaacgattgtatagacatcgactctatcgtgtggaaaatgcttatccgtctgtaatggctgccgcacagtgacgagagtacccagaaaatgcactcaggataattcatctgtggtgtcgcactactccgttcactgaatccaatgcatctctgacggagtataatcaacgtttgcaacaaaagacgaaaagcccctatgaccgaaagctagccagttcacccagagtttacccatggacacattcagattcgacatagagtgcgagaaagctatgtaaacgaaaagcgagacaaaccccaggaaaccgtagcttatgataccctgttgtcatggcacaagggggaggcttggcccaccgacaccaaccattccagctcacgattccctatgcccttcaactggtccaaaagaacttaccaagttctttcttctcccacttgggtgcaaagaaagcgacttggactgttcccagggacttgcgaccagttgtgctgttgccctaccttacttctcgagcacttagctccgctctgtatgcgcaacttgggcttggtagcacccgccccagattattacttggacttttcttgccttgtctagaggtgacctgcgcttccaatacacacccttgtgggcaccccccaacgttggtttccaccctgggatattttgggtcctatcctgactttactctttggggtagtccctttataccgaaaactgtcggtttcgcttcccattggcaatcgtagcatcggggtcattgccgtattgggtacccttgcgctatacacacacatttcaaagcacgcggagattgtcattggcagccatagtcggggccacctttgggttcgttaccctttctttcgcaagaacgtgcttctcccccttttgtgtgtttgcgccacttggtcctaaaatgaacctccttaagcaagggttgagacctttggacacttccccctgggaaccgaatctcatagagaaaccaaattggatcctatgtggaatacgaaccagaagttatctccccttattcaatggcaagtttttcaccttggacctatctctggtagatagaaaatgaaccccttatcaacgcataaagtttcacaagttttaaagcagggaacattaccatggagattcccaggaacattgttggtggcctagagacacacaaaagggggttatagtcacttttaccttggataatc

SEQ ID NO: 617881 - DNA, 1311 bp, Homo sapiens
gaggagtcgtagcggtcgaggcttttgcggctccggcgtgccggacaagtatgttatgcataaaagtggaataatttacatgataaatgaaactggccaacttctttcacgaggacgaacgtactaaaacctttataaaaatctgctgtatcttggacgagactatccaacaaggagcagactattttaaacacagccgtctcgcagcacccattttccttcaacaccacacacaggatgtcgaagcaatcgcagaagacagatcaacagaacttcatccgcaaccagggctgcacatctgtcatgcacagacggccatacgaaaggcctactgataacacttcgccattagcgacacacttccacgacgcctactgcaaccacccaaccggcctactagagtcccacgaattagccacacccacacacaccctcacactctgactcccacttaacataccttcacactatacaaccccgtactacaccgctgcgccacgtctgcgacccactgggtacttaccccaagaactagtcccggacaacacttaccctatgctacaccgttctacccaccattggggaacctgacttattccacccttgctcaggcggctacacacaaaaataccccccaatgccagcgccatcggccccccgataccagtgcaagcaccatcagacgcacatagcggttatccccacaagagcgtatccttgtgtcccccaaccacccgacggcacagcaacaaagcgcacctctatgcgtcagaacaccgttataacaactcggactacaacagtacgtactggaacgccacaccagacaacacatatcgcccacaccctctccacacgctatagcttcgacgacaacaccgacatgccacacctaataccacctatactcatcaaacgcccacctcccaacactctatctacttgtcgaacacaaactttacaacaacaactatactattataataatctcataagcagatattactaaaattccagcttccacatataacaaactcttaaaaacactaacgacaacaccataacatgacgacgacacacaatcatatcaatatcgaaatacacatcaacccatctcaacgattaatcccccatcacccaacttatcttacataataacactggcgaacaaacatgatgaaacacacacacacttgacacacatatcttcaccaaccaagaaccaactacatgatattaataataataaagcaccaagaaaccacactctacacagatcacctctctctcaccacgaaaccgatcgaacat

SEQ ID NO: 617882 - DNA, 1046 bp, Homo sapiens
tatagcaccatatcgtcaggcgcgcggggcccaggtaggctaagtgaacatggtcataggctgttatcctaggagcatcacgtggtccatggactcagtgacttggagtctctgcgacctacatcaacacaaatgccacaggacggccagagcggagcgtcgtgagacacatagtcccagatggcagtacgtgagggtcctagagagtggtatctagtcatctaggtagtccgaggacgcagctcggaagatcagaattacgccctcggcggccgagcgcacggacggagaaaccgaagaaagacacccaaggaaaccaaaaaagcaaaagaaaaaagagaacaaaaaagggagaaaaagagaagaaaagaagacaaaagcgaaagaagaacaaaacgacaaagaacgacggagaggggagggaaaaacgacaggagacaagagaaaaacggcagaggggaggcaaaagaggacgaggagagcagacgacagggacacacgacggcaagcagaaagggcaggacggaagaacagaggaccacgacagacgacgacgggacaagagcagaccgaagcaggaaggcacaagcggcgagacaaaaggcaacaggcacgacaaagacaagacccaaggcacaggcaaaagagaagaggcaagagaaagcagagtgacacacgagggggaagcagatacgccggacacacaacggagacagaggacgacgggacgacgagtagagaagaggcgcgcaccgacagcgcaagcacaagaaaagagcgagaagaagaagcaaagcacggagcagcagacagcgagcaacggagaagaaagcagaggaagacagagatacgaagtacgagagacgaagagaagaggcgaaaagggagaagcagacgcgggaggcacgcgacaacacagagaaacagggaagacgagaacattgagcacagagagaacgagaaggaaggacagacaaagagcaacgagcagaagggccggacagccacgacgagcgacagggtcaagcgccgacgacacagacagc

SEQ ID NO: 617883 - DNA, 229 bp, Homo sapiens
ggttttgggctccctgcccaaaaacctggggggttttttgggccccccctaaaaaaaaaccaagggcccgggtcccagggccctgggtttgcttaaccccccccccccccaggggggggggggtggggccaagcacccgctccccttctttggccccccccccaggtggggggcccccctttttgccccccccttttttccccggtaaaggggccttttgggcccccca

SEQ ID NO: 617884 - DNA, 209 bp, Homo sapiens
  misc_feature (77)..(77): n is a, c, g, or t
gaaagcgcggggcagctttcagagctgggtgtgattttaatagcttctttctggcttcaaatttttattaaccctantttctttctttttttcttaagggtttatgccctttttataaagctccttttctgttgttctagtgaaagtttaggagagattagaagatactagtgttcaagccaccatcttttaccagagtggctgtcttg

SEQ ID NO: 617885 - DNA, 107 bp, Homo sapiens
gcccagtcagtttctttggttctcatgcagtgcagtgcctcagacctaaccatttgttccgtgctggcttgaaagggtctgcctccctcccagtgcttcaagtcctc

SEQ ID NO: 617886 - DNA, 316 bp, Homo sapiens
ctgtggtttagagccctctcgggggaggtgactcctttttattttattttttttgagatggaatctagctctgacgcccagcctgaagtgcagtcgtgtgtttcatgcgcgcccgtgtgaagagaccaccaaacaggctttgtgtgagcaacatggctgtttatttcacctgggtgcaggcgggctgagtccgaaaagagagtcagcaaagggtggtggattatcattagttcttacaggttttgggatagggggtgaagagccatgttttgcaggcaggggtgtatctcacaaagtacattctcaagggtgggga

SEQ ID NO: 617887 - DNA, 473 bp, Homo sapiens
  misc_feature (402)..(402): n is a, c, g, or t
  misc_feature (435)..(435): n is a, c, g, or t
  misc_feature (465)..(465): n is a, c, g, or t
acaactgtcttgttacaaatgtttggtccttgcttctttaacctcttagtaaagtttgtgtattctagattaccacagttccagagacaatgctggcacaaggcttccagccattcctgtccactgacacggagaatgaaatcgtcctgcctctgggctccttagatcaggtatccagagatttttactcctccagtgccaggcagggctacgtccataaactcagcaggaagtagttacggaaaacagatctccgcccttctgcagcccccttaagattaaggaggagtatctaatctctggaagggggaatgaggtagggaggtggggactcaacttctgggaagtgggggctcagggcacttcaggaccaaacttgaggcactagcttaaattagggtnccgggggcagatgcttagttttcccttaggggncacaccgacccgttgttcaagttcagtttnaccttggg

SEQ ID NO: 617888 - DNA, 964 bp, Homo sapiens
gatcgcctacttggagaccactcgcgaatgaagttggcattttcctctgtgtcttgagcccagtcttcttctcgtctccgcatgcccaggacttcccgggcactagtgatacgcaagggagccgctcctcgttccttgttcttggagcagcccaagatcctggatactcgcaagagggctttgacacggtgaccgtgaagtgtgcaggcactcgtaacgggttcccgcagcttaactcgaacgaccggtagagtacgcaagttaactagcacacagcattccgaccgccggcattgtcgctatggcggcgaagttcccccaggattcctggccgaggccatccaagcgtttactttgggattacccagcgatgggtaatcattgtgcttggagctgtactggaatgcattgctccaccagacctgtcatgaaccttcgtctgagtgtgcgatgcgtcgagggtttacctagcaatgcgcactgagaaattccgaccacgaaatttattcagaggaacctatcattgtattccacacggaggtgacccccaacgagggacaaggtcgaaggttggtcgcagtctagtctatgagcagacaagtttgcaaggatgacccttcattccagatcttgagaattccatcggaggggctggaagtatctcgtcaatggcgcaatgcggggccaagatagccaattggtcagagcagttctatttgtgacccttcgtccccatccagtggctttgcaccggcaaaaccaccatcgcgatctattggggtccggagttgttgttcatgggccataggcactgggtggaattcgacagtttgcgaatgtggtagcaaaccgaactacccagggacccgtccctgttggaacacaccgtgaacgattcattacggcataacccttctgaggtacactttgcatacctctgagagcagtcttctggggatgcccc

SEQ ID NO: 617889 - DNA, 1089 bp, Homo sapiens
  misc_feature (583)..(583): n is a, c, g, or t
gtgagaacccacggcaggggaggaacgaaactccgatgaagtcagagccccttacccggcgcgacggacaggtccccccaacatggactgtctctgtatagtgacaaccaagaagataccgcataccaatgagtgaaagacatcggccccgctcgtggtagtcagcagcccgggcacctaccgtcccacaaccagagccatattcatccccacaggtgcattgtcgaatcatcaggattacgcgcgtagaagtccccaaggactaatgatgattgcaagtgtgacccgggacctgaagtggtgagtagtggaatatcgaggagaacatcaacatttagtgaacaagggagtaagctgctagcgtcttggaggcgttgcaggcaatcggctaagtgtggtcatctagtagcaaatcccagcagcatccggatggagcgagccccatgccatgtttcagtcaccagagatcgattcctggctgtggctagcggcccagggtatgtgggccggcgtcatggggtcatgcggacttagtgcatccgtgctttgctagaattgacatgtggaccagtgcgctgacggntgatgccatgtccagcgggcggctgtgtaaaggccctcagagagagggcagggcttccactcgttcggtgctcctatgtcgagtgcggccgagaaggccctccggctgaatgaagggtcattgggaaggatcaaagctcatcaagggggcctaacacggtcgtctgggctttgagcactctgcacgggggggcgctagcggaaaccagtcacaatcccaaggagtactacactagcatcgtatgttgtacaccaagatcatcgaaagggggtgcctgcccaccacggatggggacgtttgcatgagttggagacaatagagtccatggggggattcaaacagatgctggagggctaagaaggagcgataatgcatgtgaaccaatggctggtgggtaagccgccttgaacgaaccgccgttaatgaatggtagtctagccgtaaaagggtgtgccaaaggccagaaaattgaccatacctgcattgacaggattatgtctccacca

SEQ ID NO: 617890 - DNA, 244 bp, Homo sapiens
aaggagtctggagatacatctctctccaagttactatcttgtgttcttctaactcatagatctgtaccaaggttgattaatagtaacggtgcagggatattgatgagatcagtgatggtcagcatgcccacaatactttgcttcttacgtatcccataaaggggcagctcgtacaccgttagttcaccaaagcaataaaagctttcttcacctgcaggcacgtatcagatccgagctaatttgg

SEQ ID NO: 617891 - DNA, 718 bp, Homo sapiens
gcctattcctgcgacgattgtctggggagttcgttgtcaggctgtcctgggctgctctggggaatgctcagagcgtgacatgcgactaacatccccttggcgacatcataggtctggactggcaccatctgcgaactgctggacttcgatgtgtgttttgcctcttccttggctatgaatcgtgtgagcttcacccagaggcctgctctcctcacacattgtcgctggtttgggcgcttaatgatcggagggagacacctctctcatagacggcacggtgcccacctttcaagggaagtctcccatgcatgggctggatgccgggcatgagctgctgtaaactatcttgtggctgtgctgcttgagtgacgtctgcctgtctgtgtgggttgccaagtggcttgtgtagaaactgtagttctgagcccccttttctggactaccaactgatgtcctgtgaatgtatcgctacattgtgagccagttccctgcctagcacagggccatgtcttaggtgcagctgtgccacgggtcagcagagccacagtcgccagaacacaagctctcggtgtctcagggccaccatccgcaccacctcgggctgaccccaccgtcctccatggacagtgtgagccaccgggccgtgcatcctgctcagtgtggcgtcaggtgtcggggctgagccccttgagctgaaaaccgcgaaggacagtgaccc

SEQ ID NO: 617892 - DNA, 112 bp, Homo sapiens
caggatacctgggcaagctgggtcttactctataatttcagctggtcgtcccaccccacttcttccaccccactttcttccttcaccaacattgcaagttctttcctatccc

SEQ ID NO: 617893 - DNA, 329 bp, Homo sapiens
ctggtgtgtatgattgtcttaaaattttttaatagatatggccgagcgtgatggctcacccctgtaatcccagcactttgtggggccaaggtgggcggatcacttgaggccaggaatttgaaaccagcctgggcaaaaccctgtctctactaaaaatataaaaattagccaggcatgatggcacatgctggtaatagcagctactgaggtggctgaggcacaagaattgcttggaccctggaggtagaggctgcggtgagccaggattgtaccactgtactccagcctgggctggacagtgagacttttgacagtgagactgtcaaaaa

SEQ ID NO: 617894 - DNA, 138 bp, Homo sapiens
  misc_feature (33)..(33): n is a, c, g, or t
  misc_feature (98)..(98): n is a, c, g, or t
gactggcagggaagggctgcagcagcctagggnctggcaatccagagcctgccccagagcccaaggtcctggcgacctccctgctgcagggggccctnccagcgggccaatgcttctacaaccctgctcagtggcaca

SEQ ID NO: 617895 - DNA, 933 bp, Homo sapiens
  misc_feature (39)..(39): n is a, c, g, or t
  misc_feature (81)..(81): n is a, c, g, or t
  misc_feature (111)..(111): n is a, c, g, or t
  misc_feature (206)..(206): n is a, c, g, or t
  misc_feature (209)..(209): n is a, c, g, or t
  misc_feature (239)..(239): n is a, c, g, or t
  misc_feature (241)..(241): n is a, c, g, or t
  misc_feature (243)..(243): n is a, c, g, or t
  misc_feature (256)..(256): n is a, c, g, or t
  misc_feature (258)..(258): n is a, c, g, or t
  misc_feature (261)..(261): n is a, c, g, or t
  misc_feature (283)..(283): n is a, c, g, or t
  misc_feature (334)..(334): n is a, c, g, or t
  misc_feature (356)..(356): n is a, c, g, or t
  misc_feature (378)..(378): n is a, c, g, or t
  misc_feature (396)..(396): n is a, c, g, or t
  misc_feature (420)..(421): n is a, c, g, or t
  misc_feature (425)..(425): n is a, c, g, or t
  misc_feature (429)..(429): n is a, c, g, or t
  misc_feature (469)..(469): n is a, c, g, or t
  misc_feature (483)..(483): n is a, c, g, or t
  misc_feature (510)..(510): n is a, c, g, or t
  misc_feature (523)..(523): n is a, c, g, or t
  misc_feature (543)..(543): n is a, c, g, or t
  misc_feature (667)..(667): n is a, c, g, or t
  misc_feature (800)..(800): n is a, c, g, or t
  misc_feature (833)..(833): n is a, c, g, or t
  misc_feature (859)..(859): n is a, c, g, or t
  misc_feature (867)..(867): n is a, c, g, or t
  misc_feature (870)..(870): n is a, c, g, or t
  misc_feature (905)..(905): n is a, c, g, or t
caccctgatacctgcactggggggtgggtcacgtgatcnttctcatttcacagatgagggctctgtatgtggtggggtganaatggaacccaatctctggttggcgtgagntgagtgaaggtgtaaagacatgaacctggcagggaaagggaggggaaccgtctcgttattggttgggcatggccatctacacaggctcctgtagngcncgggtaaagtggggaatctgatcagggcangnanaagaagagtaaanantgnaaacagccttcagccacagcanacggccacgctgtccactacggccacggctacctagagcctctgccatgcnaggcccttgaagtcacccaaancgcctccacacactaattgganaaaaggcaactccattcnaagagtatttaactaaaggggctnnatgnaggnacaatttctaaagcgaggaaatttccacaataaagagacncttgccggttgccntaagatagctgattgaattctagctcnccaagaactgganaaaatcagaggagcagaaanaactggatctccaggaagaaaaacagcaaaaccaggctggaagcaatggagataacgccatagaggagaggaggcagcaggggcagggcttggcggctcatcaggatcaggggacccatcatancccccagccggcccactgtatgcagaatgccatctgctgtcatccgcactggcgttggaaagagttcagccttgtagatggtgaggcaggttaggcttatcccaaaacatccctttcccagcacagcaaagancacacgcagggtctgcaaatcttgcggcaccancatgttggctagaatggcgaggcggncatggctnggnaaccgcctggatggtgcggcggccaaggaactgancaagaaggcattgtggcccgcccaggaa

SEQ ID NO: 617896 - DNA, 288 bp, Homo sapiens
ttgaaatgatgttagctcctgctagacagctcttgcttctcctccagggtttatgacaacagcacacggttaagaagggaccctgaggtcgcgcacggtggctcacgcctgtgaatcccagcaccctggacagctgaggcgggaggatcacttgaggtcaggagttcacgaccactatggccaacatggtgaaatcccgtctctactaaaaatacaaaaaattagccaggcgtggtggtaggtgcctgtagttccagctacttgggaggccgaggaggagaagcagca

SEQ ID NO: 617897 - DNA, 918 bp, Homo sapiens
ggggggagacataagaatttcaactatttaatgtccatttctgttgtttgtaccctttcttatccaatagatggaatgcacatgacaatgcaccgatattaacggcctcgtctctagtttacatcccaggctcacttgggatgctcggtctacctgcagtttcacgaacttgtctctctgataaccggatttactggtattagcacccttagaggacaagtgagtaaacgagctcagtcttactgtctaacagttctacattatgtagctcagttttcagggaacggcatgttcgacggacttgctaactcccgttttacaagtttcgttgcatccagactgtgcaaaccacacgtaacacgacaaacactattaagagctcagcctgtcggtctctatactcagtctctctgctgctttcgcgtattgaccgaacagattttatcctacttcttcaccgatcgaacgacataggagcaatggcttgtgcgaattaggaatcggcaaaatactacggacaatggatagaacatatcatccgaacactatcaacgcttagggaacagacacaaactactgccttgacctatcgcacgaaattactgcaccatcgacgtatcacgggctgaattgtatccccaaggcacttacatcttgtgcgcaatacgcgctggccacctgcaacgggtctgcccacgcgattcatttgggggcataagcgtgatagaacgacggcacgcacgatttacgccccgaattcacagtcaagaaaaccctattgtgcaagtacctaacatcctcctaagttgctcgaacggacacacagtggtatgtgtcaagccagtcacccagctagcactttggtacactacggagctccaactgcttttacgcaggcccccccccacggactcgcaa

SEQ ID NO: 617898 - DNA, 200 bp, Homo sapiens
ggatcccgtttatgtggtgtggtgatgtagtatgtgatgtataagatgtgatgtgatgcatgatgatggtgatgatggtgatggtggtgctgatgttgatggtgatgaccctatgatggtgataatgactgtgatgacgttgatggtggtgatggtgtgatgacagtggtgatggtgatggtgatgatggtgatggggag

SEQ ID NO: 617899 - DNA, 765 bp, Homo sapiens
ctacatctaaagaagcacagggtatatgatgatatgagggatcatgagggccaagttgtatctgtgagtgtctttgataatgttgtgatgtagaataatcctttacgatagtggacgattgctatagaatatcagtagttaaatgttagtattaatacaagatcggaccttctttgtggcattgcagaatgtatctggtacgacacacaagttgcatgctaagtataatagggtggaggaggaaatggtcgtagtgccggtatgaaaatgtgtctgactagaacagttcattcaggagtgtaattattttcccgttatcccaatccctgtgtacagtggtgggtatagttacgacagttgatcgcggattagcgaagtagacaccaacttttcagtcttaccctgtgatgtttaagagtgatagactgttgtcctcttgctggtggaaaagttctaaggtggagcccactcttctatgctgaagtgcacaggcagagcagttttcttacaagtcagctactctgcttggttaatatgaggttcggtacttcacgtaagcactgttacaaggtacaagtgtattaatatcactagtttgaggcgctgggtacatctgttttaatatattagaatgtgcagaaacttttactcatgacttcttttagcaactgttatgtacgtccattatgagtggacagtcaatgggagatgaaggatttctggaaatgcacatgatgatgtattgaacctaacacgggttccatt

SEQ ID NO: 617900 - DNA, 111 bp, Homo sapiens
tccctcttgcttatttcttccattgtgagtgaatgacacaggtgacagctcttattctggaccactcaccatgattctgtggctgggaacagatggccagagctgcctggc

SEQ ID NO: 617901 - DNA, 211 bp, Homo sapiens
cagttctctcctgatgtgccctctgcgactgtgcctgtcttagtttgttccttccctgaggaatcttacctgtctctgtgtaacatgcatccaccggggccaaacagggatgacgtgcagtgtgtgagtgagggcgaggcagcgcccccagagggggtcagttctctgtctccttggtagcctatgcccccgtggcctccacgcccagcac

SEQ ID NO: 617902 - DNA, 286 bp, Homo sapiens
atgacaaactgttgtacaaaatacgaaagttaggcatatgtggtggcatgcccctgtagtcccagctactcgggaggctgaagtggatcaccgtgagacccaggaggttggggctgtggtgagccgtgattatgcctacttactccagcctggcgtcacacgagtgacccgtgtctccagtgagaaaaatagaaaacttccccagtagagccggacagtcccgcagatagccggaaattcgggggatccctgctagagatcgaccgtgcacggcatggcgagtctt

SEQ ID NO: 617903 - DNA, 172 bp, Homo sapiens
gtaattaaaatagtcagaaaacggagaaaacgtatttatggtcagttcttgtttttgttagtaaatggactcttgctctgtcacccaggctggaatgcagtggtgtgatctcggctcgctgcaacctccgtctcccgggctcaagcaattatcctgcctcagccctcagagt

SEQ ID NO: 617904 - DNA, 199 bp, Homo sapiens
  misc_feature (43)..(43): n is a, c, g, or t
gatctacagagcttagctcccacttggttgccaggtgaggtangaggatcatctgaggccaagagttcaagatcagcctgggcaacgtggtgaaattccgtctctgctaaaatacaaaaaattagccgggtgtagtggtgcatgcctgtaatcccagctactcaagaggctgaggcagagaattgcttgaacccggaaa

SEQ ID NO: 617905 - DNA, 445 bp, Homo sapiens
gctcgacaaagcgcttgaaatctacacttgcaaattgcacaaatagagtgtttcaaatctgctctgtctaagggaacgttcaactctgtgagttgagtgcacacaacacaaggaagttactgggaattcttctgtctagccttacatgaaaaaaaccaattctggccgggcgcggtactccatgcctgtaatcccagcgctttgggagaccgaggtgggcagatcacgaggtcaggagatcgagaccatcctggataacatggtgaaaccccgtctctactgaaaatacaaaaaaattagccaagcgtggcgacgggcacctgtagtcccagctacaaaggaggctgaggcaggagaatggcatgaacctgggaggtggagcttgcagtgaactgagatcatgccactgcactacagcctgggtgacaaagcaagactccctctc

SEQ ID NO: 617906 - DNA, 443 bp, Homo sapiens
cacgaggagtagtagtagtagtagtagagagagagtagtagagagagagagagagagagtgagtgagatcgagagcgtgttgctggccagtccggtgccctctgctgccccttctgttgccattgccccatgttaattctcttgtccatcccatatcactggtctctgtcccctcatcacctcctttttccactctttatgcttcaccacttctctctccatgtgcaccatttgtatcctgcttcattttcctctgttcacttctgtacacttagtgtcacccatcttcgcctctcttcttcctgctcatcatcttccccttctccttttggctgctcattcttcattttttcttctatgtccttatctactacctctctctgcttgatctctcccgcctctctcttccttctctcttccttccttttcctcctctcctcccc

SEQ ID NO: 617907 - DNA, 633 bp, Homo sapiens
  misc_feature (11)..(11): n is a, c, g, or t
  misc_feature (69)..(69): n is a, c, g, or t
  misc_feature (86)..(86): n is a, c, g, or t
  misc_feature (89)..(89): n is a, c, g, or t
  misc_feature (161)..(161): n is a, c, g, or t
  misc_feature (166)..(166): n is a, c, g, or t
  misc_feature (294)..(294): n is a, c, g, or t
  misc_feature (303)..(303): n is a, c, g, or t
  misc_feature (350)..(350): n is a, c, g, or t
  misc_feature (381)..(381): n is a, c, g, or t
  misc_feature (439)..(439): n is a, c, g, or t
  misc_feature (487)..(487): n is a, c, g, or t
  misc_feature (501)..(501): n is a, c, g, or t
  misc_feature (535)..(535): n is a, c, g, or t
  misc_feature (563)..(563): n is a, c, g, or t
  misc_feature (617)..(617): n is a, c, g, or t
attccacagtnttctttaaaagagtatctttcaaacacaactttgctagaaactggtccaaagatcganagcgcgtgggaatgctnaanaggggtggtgatcagggacacgtattcctgggtgccgctattgatgatgtggtccacacgcagaatacaccnctgcngcttcagctgccctcagaagaacctgtcgcttcacttgaaaactttctgtgatacccaggatagccatatctccaatggtgccttcccatcatatccaatccagtcagtggtatatgccttcactgtnagcggcccngagctgtgccaccaggtctgcactgtcatagcctgcaattgtcagcnatgatggattgagcaacattctcagtgcttnagcataagactccattgcaacagcttctttgcctggggttcaattggcaagctgtgtnaaagcatgagccatcaacaactcagaacagcctcctccataaactgtnctagagttctttanagtttgcgcaagaacacaaagagcatcatgcaangaactttcagcttcaactaaaatatgangagtagcaccacgcaaaacaatggtacaagcgctcaccaagggcaaccccaganaagtgaattagtgtgt

SEQ ID NO: 617908 - DNA, 395 bp, Homo sapiens
cacgaggggcagtgtcgtgggggggaccctgctttcacattgacaaatgcccatctgcacgtatctgaggagttcatagactatgacccatcagacatctccttctttgctgggggctctgaggcgttattttttccttatggctctgtacacccacaagaatctcaggcctctgcccagcctctggtggcccctcctttgtgtgagcttccagggtctgtctcggtccagcccagacaggtactccatggaagcagttgatatgaacacataagacggttttgcatttgatgaggaaagtgacttcaatggaaactcacacccctcacacacctcagaactattttcggtgaatgcgcaagccacacgaattcatagcctgctgggtccttctg

SEQ ID NO: 617909 - DNA, 87 bp, Homo sapiens
gtgatagagtcttgccctgttgctcagactggagtgcaatggcaccatctcagctcaccgcaacccccacccttctgtcgtcttctc

SEQ ID NO: 617910 - DNA, 277 bp, Homo sapiens
cagagatgatgccactgcactccagcctgggcgacagagcaagactccatctcaaaaaaaaaaaaaaaaaaagctgctgaaatcgggcagcgcttttaaaattccgggcccaggtgatttcgtaactcgggggcacccgggttagggcccttcttagggcccggcaataaccctcttcctccatttagcattgggcccaggtctctaacattctccttacccagttttaccaggggccgtgtgagagccttcacccatgggaacagtacaaccggcg

SEQ ID NO: 617911 - DNA, 1156 bp, Homo sapiens
ccgttgtttttggcttttttttgtccctttttctgttgtttctgttttcgtgcttttcctttttcgtttcttttgcctttgtttgatcctccgttcctccttgcgttttgttccttttgttttttttgtgctttttgctcgttctgcttgtttcgggcctctcttgtggggtcctttcgatgtccttccttctgtcctcgttggtgctctgctttattgattgtgctctgtcgtttcttttctttcgccttgttgttcttcctctttcctggtggtgcccctcatgccgtgcgccttcgttgatgctctgtcccttgctatctcctgttgtctctgcttgcgtagtttcttggtactgcttggacctgcttgtcaagtgcatgcgctcctgtgccagccatcccttgattagtgggctacatctcgtgtttcctgttgcccgatccccaagtagttttggtacgttctagttctcttcttccttgtgcacttgtggggccttccaaggttcgtctcggtccatggaccttgtagacttgtaaggcttcgacttttacccattttgcggtgtggatgtttgagtcatctgtccccctttagatctgctgatgctcactaaataggatgtcttgggaagactcctagctgtccttttgcctctccacacagtgctcaaggccagcttatagtcatatatatcacccagacatcaaggtacaatgacacattttcttaggaaatgtttgttaatatacagcaaaattacaccacagaaattttaaagacccctaaccctttgtgtgctctccattctgctccttcacccatcagttgcccccatttctgaggtgcactgggaggctccccttctatttggggcttgatgactttcgttctgtagctggggctttcgatgttccttccagtcgtcatttctcatcctacactatcccgtgatcctggccccctcagtgttgtcaccacgagtctgatttgtaacccactgagaggacagagagaaataagtgccctctcccaccctctctcctacgtggtctctctatgcctctctacagtctcgtctcttttacctggcccctctcccttgggctctgatgataaaattgctgactgtaaacctttggaagtttagcta

SEQ ID NO: 617912 - DNA, 154 bp, Homo sapiens
tgggtggcggaagagggctggctgggacagagggagccggggaatggcagcaggcaggtttggctggcaagggggcctcctacccggagtgttggagaggagagtggctgggtccctggctcgctcgcatgcacgtttctccccttcttcccca

SEQ ID NO: 617913 - DNA, 903 bp, Homo sapiens
aggtctccctggcgtaggggtatattctcggtggtgtccttccgttgcgctatgtccgcggcgccgggttcgcgcccgtgttggtggggttcccaccgggtcacgactagtaggccgatttgcctgtcggtgttgaagcaatgtttgtctgccgcctgttttgctggtaaacacctggggaagggcgcgccccaacttgttcgagaaattgtccgctaagtgcccgccctcttggggttaagtgggcgctccggcgagaaaccccacggtggtgctgggagaggcctttttctgcgccgatgcacgcccacctgagggaggcgccattcccggtgtctgtggaatagatagggcaccacacacggaaccagcgggggggggggattccacaacagaccacaggggcccaaaagagacgaggcgcgctctcgagaaggtcgaccaaaggggcgcgcccccaagggggtgcgcccccgagaatcacctccaaagggagggcttagccagcgagtgatgtatacgccgccgatagctaccgccgccaccccgccccgggttgtactcccgtgggcggcgaaagacaccgcgcgcttccacaggacgcctcgtgtgtggctaaccaatcggggcgccgccttcaagtctcaagatgtgaaccaacggggtgcttaattgagtgaccacacgcgtggcggtgttatccgcctccacgaagggaacaagtagataattttctcggcgccgcacttgagcgttttctattgtgcgagcgagggccgatagtaattatatatgcgtgtgttcaagacccggacatcttttggtgatgaggaccaccaccgggacccccaaattgtgcccgccaaagttcgtggagcgcccaaaaaaacaacaaacaaaaca

SEQ ID NO: 617914 - DNA, 378 bp, Homo sapiens
tatctgctgtctcacgctagcagatcgacctcaccgggctgcactcataggaggtcagggagaaccccgaatagatcagtcatcataaagaatgaaacatggaccgggtgcagtggctcacacctgtaatcccagcacttagggaggccgagccaggtggatcacttaaggccaagagttcgagaccaacctggggaacgtgacaaaaactttatctctactaaaaatacaaaaattagctgggtgtgctggcacacacctgtaatccctgctactcaggaggccgaggcatgcgaatcacttgaacttgggaagcggggattgcagtgggccaaaattgtgccactgcactccagcctgggcaacagagtgagacag

SEQ ID NO: 617915 - DNA, 590 bp, Homo sapiens
  misc_feature (90)..(90): n is a, c, g, or t
  misc_feature (100)..(100): n is a, c, g, or t
  misc_feature (116)..(116): n is a, c, g, or t
  misc_feature (136)..(136): n is a, c, g, or t
  misc_feature (201)..(201): n is a, c, g, or t
  misc_feature (207)..(207): n is a, c, g, or t
  misc_feature (229)..(229): n is a, c, g, or t
ccgtcctctctgctcaagttatagcatacatgtatcgggattgtctttggagcatgagattttcctccctcaggagcttttttttttctnctcatgtctnactgcctactctaacnttctcccctcaacagattgngaccctaaaaatctttgagtttaggggcactgtgggtcttccgtaactgcttcctgctgacatgngataangaactcatcagtgtctcattgntttgtcctttgtcagggaaagatatcctccatgttctctcaggtttgacttgcagtctccagagaaaatgtgtagggacacagttttccagcagggaaaaaagtaggttaatattcctgttagaggaccatttgaactctgagagtttctaggtgagaaggacacaaatctggttagtagatttagtgagcaaggcccaaaaaggagaaaaaggaagacaaaggccagggatcccaacaaaatgagatgtcatgaggtctgggaccaggtggcccccaggagactagacctaagtggctgtttctgaagggaagaggctggtgtataaatcttcactgatctggattgcttattgtaacca

SEQ ID NO: 617916 - DNA, 523 bp, Homo sapiens
  misc_feature (4)..(4): n is a, c, g, or t
  misc_feature (212)..(212): n is a, c, g, or t
  misc_feature (286)..(286): n is a, c, g, or t
  misc_feature (358)..(358): n is a, c, g, or t
  misc_feature (362)..(362): n is a, c, g, or t
ttanttcccttctctctactcatccccctccaacctcccccttggccgctgtggttaatctccctccacacacacatgcacacacaggtactaatgaagtcctagtttgtgaagtgagcagggaccttggaataagtcctttcctaaggtagggtcttaagttgctatccccctaggagcctgagtgccttagagggagggcgaggagaacnaccacaggcaagttgcaatattttctctacatattctgcctggaatcaagatgctcaggaaacggccgggcgcnggttgtcacgcctgtggtcctggcactttgggaggccaaggtgggcggatcaggaggccgggaattcggagnacgnctggccggcatggtgaagccccgtctctactgatagcgcagaaattagccgggcgtggtggcacatgcatatagtcccggctactcgggaggctgaggcaggagaatcgcttaaaccagggaggtggaggttgcagtgggccaggatggcgccactgaggg

SEQ ID NO: 617917 - DNA, 673 bp, Homo sapiens
  misc_feature (615)..(615): n is a, c, g, or t
  misc_feature (639)..(639): n is a, c, g, or t
tgaaagcagctggttgcctgtagctgtccataagagcagcattgatgtagttactgctctccccatcaattgtaattaaaaaaggcagacatctgtcaggtggcagcatgtccatgaaacggttcttgtcatggttccttggcaggcacgctatactgcagtcttcagcttgtagtcgaggggtgactgaattcagagtctgaaattcatccttgagatgtgaagagttagtctgggagtctattctaatcatatcaaaatatgcagctttaaattcacagacaggtatggcagtttctccacataagcaggcttctaaaatggcatcatgaataaaaatgtactgttcctctgtctggaccatattaatacgccgagatcttaaggctttgacacaattgtaaatatcaacaacaccctctctttcagccatgtctagcatgatgtcaatcacaatgtagcagccagttcgtccagcaccagcactgcaatgtacaacgatggggccagcactgggagggtttgataacttgactcgccggataaaggaaagcagccctgtagcatggtagggcactccatggtcaggccagcccgtgaaatggaactgtttancttcacggatttcattgtaccccntcctttccagggtgaatgtcctaactctcgtgcc

SEQ ID NO: 617918 - DNA, 486 bp, Homo sapiens
ggagttgagcatgcacccggccggccctgggggctgacagtcggcaaatgtttggcccgaagaggaagtggtctcaaaccccgtgcaggtggcgaccagtgcccgtaccaggggctgctcgctgcctgcgggcgggctgtaggctgagggcgcgccccagtgcctgagaccctggggcttcagtgagccggcctctgggagagaagatgtgcggcggcggacggagaaatacaactccaaagttggcgaaaggcacctgctcctactccctgggctgccgtcggcactgtccacgaaatccacagaagccttggcaagtccaggaggtactgggtcggagccacgtggccattgggtagcccccaccatgtggtgaagtgcgtgcacacatggggagccctgggtcagcacaggaatcatcccgaaagagaatactccagttctggtaacacaagcagaaagcatcgcggtggaagcgaacgttta

SEQ ID NO: 617919 - DNA, 225 bp, Homo sapiens
agccgccccccgttggcttctcaatggggcagctcagaacaaggtaagtcaatttccattttaacgttatgaaaaagctatcagggacaggagccaagatggccgaataggaacagctccggtctacagctcccagcgtgagccaaggccaggttcctgacccataggaactgtgagataataaaattttttttttttttttttttttttttttttttttttttt

SEQ ID NO: 617920 - DNA, 204 bp, Homo sapiens
agaagtgaatgctgggactcagccttcagacagagaggactgtagggagggcggcaggggccttggaggatcctcctgccagaaccacggcccgttcctgtcctgttggcgtccgttcttccagggggctgctttcctccttggaaaatttgacggaggggttgttttttgggccagatccttggctttttagccgccgttcca

SEQ ID NO: 617921 - DNA, 102 bp, Homo sapiens
ggtggtgtcctccccccactggctgctctgaaaaggtatctttgcattgttcctcatcctgcctccttgctctgcctgagcctgctccgctgtgcgcctcct

SEQ ID NO: 617922 - DNA, 151 bp, Homo sapiens
tgaatcgaaacctgcggtactatatctattgcgcagggttcaatttctatcgcctatacttatttgggtaaatggtttgtctaaggttgtctggtagtaaggtggagtgagtacagggttcgatgaccatggttgatgagggtatcgatga

SEQ ID NO: 617923 - DNA, 1021 bp, Homo sapiens
taaatttctggtcattcttggccctgtttcaaaaaaaaaaccccattttcccaaccaaaaagccacaaaaggtgactttgggccttcaagagaagtttgttaccctcgaaaatcttacgcgcctacgcaagaagaatctccccaaactcttactgcagcagatgtcacacaggggtgttcaccacagagaaggagaatctgcctctatataacagtccctcacccgccatcacggcctgcacgcgaccgacacgctaactctcacaggagcccgctctcctctcgagcgagaacaggttagacccccttctcgcggggtgtgccattgttccctctccaggggaaatatacccacacctttaaaacaccaacttgatttctcgacacaatatacgccaccagtacgcccccgtgcgccgccccttgcacaccccctttgctgcccccctttgtttgtctcaaccctgtgttgccccttgggttcggtcacaacctagggagaagcaccgcacacaactcttttgtgttccccctacgtgctgggcctacacagcagaacgcctctccaaacgtgcgctctcagatcccctgtccttccacccctagtagacaaccgctcctcgttgatcaacaaccccgtcgctctccacagaccgtcccacacaaactctcagctccttccccgacatccatcttttgccccccaccttctctgtagcggcagacgcatctaccctgaggtccacgctgtcttgccgacaaccccccccccaccgacgctgttcaaagctgacacgctttgtacgaaaatcacctcccccgctcattatagacgacactgtgtttcccccacgcccacacgcgactttttggaacagcgccccctcaccgatacaatcttgcttgcgacgcggacattattcgcgaggccccctcctcacacatgagtatttgagagcgctcgcccctgacaaaccttcgccccgccccctataacaagaaggcgctccccccaacacat

SEQ ID NO: 617924 - DNA, 904 bp, Homo sapiens
  misc_feature (385)..(386): n is a, c, g, or t
  misc_feature (440)..(440): n is a, c, g, or t
gtaaatctagcacttgggggaggctaagccaaaaaattgctcgagccaggatttcgggacccaggcctaagcaaatgaacccctgtttttaccaaaaaaaacaaaaaaggccttagtcatttatatgacctccttagaattatagaaagttagctggaagaaaaatttgtctaacagatgtaaagatagaagtatacatagattatgacttgtcctaggttacctaatcagtgagggacagaactagaactgagatccagaccaccgtccccactccagtggatgcatcctggaaccaggaatggggaaggtggagccactagcaaatacagccctcatttgggccagtggtatgaatttgctgatatagtatttgatttcacanntctaacaagttttattaagattgctatggtttcttaattttgataatatttganatctcatttttctcagacctataaattataaagcaaaattagaaccattttagcagttcattcaaatcattaacagcctgcatatgtatatagatagcaacattttcatttgaaaccacagatttgcaaattacttcctgtttcatttatccaccccagtgctacgaggtgttctgttcagaagtccaaaagggtagaggaaagatgactaatattgagcaatggtcttagtattttggcttttcaactactttctattcgtcattctcacatttggatttggtttacagttgtcaagggtacactctcagcgctgatcagtggaatttgtgagagcagaattctcaaccttgacactgttgacagttttgggcaggataattttttgtcatagggagctattctgggcgttgtagagcgtttagcaacatcctctaccagctagatgtcagtagcatcctcca

SEQ ID NO: 617925 - DNA, 288 bp, Homo sapiens
atgatttactgactgaagtatgggcctgtgactatagattgaaaaataaaatagaaatgctaaaaaaaaaaaacttagctacatatgtttaatatctaaactcaccagacaatccaatttttaaaggaaactgactggaacaaatgcttccccttaacgtgaactataggttagcatagcattgtctagtcaggaaaattcaccaatttcagtagctgatctttattgtggaaaccaaaaatagcggctttgtcctatattcataagttacagtagatcgacacaacg

SEQ ID NO: 617926 - DNA, 525 bp, Homo sapiens
gccacccggtccagtccccttccatgctgtggaagcttggttctttcgctcttcacagtaaatcttgctgctgcacactctttgagtctgtgccacctttaagagctgtaacactcgcagcaaaggtctgcagcttcattcttgacgtcagcaagaccaagaacccaccggaaggaaccaactctggacacattacacactacatgtaactccagttatctcacaaagtttacgacctggctggatctgataaaccaaaagataacgagctgtataaatataccccagtgtgcttataagagtttgcactcttgtaacatggaccaatcagaactcttgtcaaattggcccaaatcagcgggctgtgggtggggtcaagtaaggggactcaaacagctggccactgcagctagcagttgcaaaccgggtccagtccccttcccatgctgtggaagctttggttctttcgctcttcacagtaaatcttgctgctgccactctttgagtctgtgccacctttaggag

SEQ ID NO: 617927 - DNA, 485 bp, Homo sapiens
accagcttcatagatcagctgtgtggttgggtacatttccaccttgattgcttgtgtctccaaagcctggaggctggaacagctaagttgcccaaacagcaaagatggcagcccacctctccctctgggagctctgtcccaggaagttttcaaatctctgtcagccagagaacatcggtatgtgtggctggaggccccagttgtgagattctgcccagtgaaaaggaacgggatcagggacttgtttaaaggaagcagtctggccatgctttcatggagcaactgtgctgtgctggggtactgcttctgtcctcgttggcttgggctctccaaagcccacagactggagtggctgagtcacccaaacagcaaagatggtgtgctgcccttccctgttctctgtcccagggagaattcaaatctctgtcggctggtgaacactggcagggatggctgaaggcccagttgaaatggtcgccaatccg

SEQ ID NO: 617928 - DNA, 696 bp, Homo sapiens
cgccgggttccaccccggggtgttcttccggggggtgtttttttggcagttcgctttttctttgttgttttcatgtgccttctttgtcgttatggggggtcatattatgtggggtcgcctcttcgccgctgttctaacatttccctttatgtctcgtcgggcgtttcaggtgaagattctggtcctcgagcgggtattttgcggcgtcttctctggtggggtggcggcgctcctttttagaggtgcgcggtcacactcgtagtggtaccctcctcatggttgtcgccggggttggtttgggcgcccggtgggtacctactcggggcgcccaccacgcctgtttggtctcgcccccgcacgctttttttctcatgctctctttccttgtcgggtactctcacacgagtcgtttgtaacacataactcgctaatattgctctccctggcatctctcttcacagaaggttccaggaggagcgtccactgagtcgcattaagccagatgtagctccgcgcgtggttaggggaaccagatattcgtttctaacctccgcctttggtggaggaaaataattagcgttcctcctgcgcgtgtttaatatgttttatggtgggccacctatggatattttttatgcttctgttccctgtactgaggacaactggtaaccgcgccatcaatagaacaagaaatat

SEQ ID NO: 617929 - DNA, 264 bp, Homo sapiens
gttttttttttttaaaaaaaaaaaaacccaaggggggggtttttgaaggccggggcttaaatttccttggaaaacatggggccccccataagcggggttcccaatccgggccttaggtttggggccaaagggaattatgttcctgggggaaaaattaacccaagggccccgggaagggattaaggggcccctccttttgtttaaaggcaaaggttcaaatccccttttttttttttcccggttaaaaaaaggggggggttttta

SEQ ID NO: 617930 - DNA, 1258 bp, Homo sapiens
taaatttattcacaaaaagcagtcgggaaatcagaaaggcagcggccgctccagggtctcaaatccattaaaaccaccacagaaacaattaaaacaatcagagaagagaaaaggaaaaggaaacaaggtccaacattgggcattgggtttaatccacgaggttttccccagaagctcctctgggaatgtgaaagcaaaattattttgtgggcaaacacgtggccttctcaaatacacaggaaaggggagccctcaggtgccctccgtggccaacagaagggcggcctcttggtgccagctcagaacgtggtggggtgtgtccacaaggcgagctcctctctcagagcgtgggggttccgtgggccctcttgtctcccactccacattcaccccttctccaggcaaatttcagccagccatatccagaacagcgtggggccttcgtgccgtgggagtgccccttattccccccgaggacagaagggggcccttggggcattatatgttaccgaggcgacaccgtggccgagtcccccgagagagcgagaaataccgcgtgggtggggaatcccctttcgctttcatatacaagcgcttttggggtggttgcgagagagaggtgcgctcaaaataggcggcgattcccaaaagctttccccccgtattccccaaagtgccccataagggcgtacccaattttgcttcacccaaccctataccgcgatggaacaagtccttaaattttccccaaggtgtgcacaccacacgccagcaccaggagaaggcttttaaagctcacgggggaggggggaaccctaactcaattcaaggattccgtatacccgcccgtggtgttaacccctttttttgccgcttcgcaacaaagaaatttcacacgccgtgtggggttctcctgtatactacattacaaatattattcaccaccctatctcaaatcctcaaaaattttcccatagcgcaacaaaagtttctctccaagaagacccccttgtatgggtctggagaatgagggccccacaaaacaaagacaagcagaggagctaacagagctagccccctacaaggggaaaacaccaaaaacaagcttgtggcgtttctgccctttcggcccccccaggtgacaacgcgtacacgcaatatatcgcgtataaggtcgcccgcacggcttggtgcacacactcttggcgagacaacctggacgaatatgggggctgtagaacatatacgagaaaaggcg

SEQ ID NO: 617931 - DNA, 415 bp, Homo sapiens
ataccaacctgacactgctgttctctttcgcccaggctcgtgcctgcgccgaagccggcgtcttcttgatctctccgttcgtcggccgcatctatgactggtatcaggccaaacagcctgccgctgactatgatgccgaccaagatccgggtgtgaaatcagtacgcaacatttacgaatactacaaacagcaccgttatcagacggtgatcatgggagccagcttccgcaaggtagagcagatcctggcattggccggttgcgatcgtctgaccattgcaccgaatctgctggaacaacttaagcacagcgaccagccggtcgaacgtaagctgacgccatccactgaagccttccaccaacctgccccgctggctgaagccgaattccgctggcagcataaccaagacgcgat

SEQ ID NO: 617932 - DNA, 848 bp, Homo sapiens
ggaaaacaaggaggggagtgaagcagggagcatcagcgagtgaagcagggggcatcagctcacctctgaggagagctgaaatagaaacaggattttcagctctccccctccccctctccctctccccacggtctccctctccctctctttccagcggtctccctctgatgccgagccgaagctggacggtactgctgccatctcggcgtcactgcaacctccctgcctgattctcctgacctcagcctgcctactgcctgcgattgcaggcgcgcgccgccacgcctgactggttttcgtatttagttggtggagacggggtttcgctgtgttggccgggctggatctccagctcctaaccgcgagtgatccgccagacctcggtctccctgaggtgccgggattgcacgacggagtctcgtacactcagtgctcaatggtgcccaggctggagtgcagtggcgtgatctcggctcgctacaacctccacctcccagccgcctgcttgtgcctcccaaagtgccgagattgcagcctctgtccggacgccaccccgatctgggaagtagaggcaccagtccatccgagctggaccaaccacatcgtccagggacctagtgaacggacacaccgtcaggccatgggaaagccccggagacaaggaagaagcggaggaagccgacgcacagggcccggaccgacggaccacaggttctcaagccaaccagacgcgaacacacactccacaccacgacgcaccacaaccacggggaggaaaataacagagaccagtcccgagacaagacccccatgacccgacaaacagaaggagacacccagcgcaacgc

SEQ ID NO: 617933 - DNA, 280 bp, Homo sapiens
cacagattcgtctggtcggtacagacccagaatctgcaaggtctgcccaccacctccatatctctgccccttgataatactagatacagaggattagggtgaaactaatggaaccccatattataccacgctgttctcatcagaatgaaactacaaaattcactaacatctctcttgtgtataatatataatatatacatagtactatttacaatcacaaaagaaatggaatacacccaaatgcccctcagtggtagactaggacccagcaaacattgta

SEQ ID NO: 617934 - DNA, 728 bp, Homo sapiens
  misc_feature (11)..(11): n is a, c, g, or t
  misc_feature (76)..(76): n is a, c, g, or t
  misc_feature (126)..(126): n is a, c, g, or t
  misc_feature (137)..(138): n is a, c, g, or t
  misc_feature (141)..(141): n is a, c, g, or t
  misc_feature (165)..(165): n is a, c, g, or t
  misc_feature (169)..(169): n is a, c, g, or t
  misc_feature (232)..(232): n is a, c, g, or t
  misc_feature (235)..(235): n is a, c, g, or t
  misc_feature (255)..(255): n is a, c, g, or t
  misc_feature (258)..(258): n is a, c, g, or t
  misc_feature (261)..(261): n is a, c, g, or t
  misc_feature (272)..(273): n is a, c, g, or t
  misc_feature (287)..(287): n is a, c, g, or t
  misc_feature (390)..(390): n is a, c, g, or t
  misc_feature (414)..(414): n is a, c, g, or t
  misc_feature (470)..(470): n is a, c, g, or t
  misc_feature (495)..(495): n is a, c, g, or t
  misc_feature (517)..(517): n is a, c, g, or t
  misc_feature (529)..(529): n is a, c, g, or t
  misc_feature (559)..(559): n is a, c, g, or t
  misc_feature (561)..(561): n is a, c, g, or t
  misc_feature (567)..(567): n is a, c, g, or t
  misc_feature (570)..(570): n is a, c, g, or t
  misc_feature (642)..(642): n is a, c, g, or t
  misc_feature (717)..(717): n is a, c, g, or t
cgacaaatccnctctaccctataaaacacagatcatcacattgacagacgaaaaacaaaaacaaacagcacaagcnaacagaaatgataatcatactctatcacttcatgcaacagcctggaaaangatcagaattnnggnctacgtgagactgtgtagactgtntatngtgacacccaggttttcagtcccttttagtggcttacactgattctttgaagcctacagggcngcnttgcctcagccccaccatangtnagngcacctgaggnnctgggttctctacnaggctttgccgcacctttacaatggttccaactcaacactccacccaggaagcattctttgtaattgtgggagccctccacactctttcagacttattattcncccagtgtactttgtaggaatganctggaaaacttggtgaggactgactcaccactgaagactgtgatcatcaatcaggntcccattgagaggactctatgaccngccaaggctcccattccacccnttatatgcctcncccacgatgcctatctgaaacaagtggccngnaaaacnctnaatactaagatgtgttattacctattgtcactgtttcctcaaacaatggcttagaaaatgctgacttaaganaactgattgataaactgggctaagatattagacaaaaattaaatagaaaaaaaaatccaggttaaacagtaaggngggtggcaggg

SEQ ID NO: 617935 - DNA, 388 bp, Homo sapiens
gctggaagtaccttaggacacatggggttggggtcaggactgctagttctcacgcgaccagctggatgagccctggaccagatgaactggacgtctactggcctcatactcagtgacatggcgaacttgctcgtgagacagtggagaggctcctgtgaatgatcctatggacttaaatgattgatgcatgtttgctacatgggcagaatactgtaagtaaggtaaagtgggatcctcaggtaaagcgggatccatgaactaaagactgtgctatttcctgatgggcagatgtgtggtttctacctcatcttggacagtatctggatatgctgggcggctggttcatcactggagggagtcctctggtattttgagcacctcgggacat

SEQ ID NO: 617936 - DNA, 821 bp, Homo sapiens
  misc_feature (1)..(3): n is a, c, g, or t
  misc_feature (26)..(26): n is a, c, g, or t
nnnggaaagcaatggcagtgtcgcanaagtttgtagctaaacttcctgggccagcgagaccacgaacccaccgggagaaacgaacaacttcagacgcatcactttaagaactgtgacgctcaccgcgaaggtttgcaacttcactcctgagccaccgagaccacgaacccaccggaaggaagaaactccgaacacatccgaacatcagaaggaacaaactccagacacgccgcctttaagaactgtaacactcaccgcgagggtccgcggtttattcttgaggtcagtgagaccaagaacccaccaattctggacacaccaccttgcccttctacttttcacaggtactaaggtctcaaactaataagtttttacagggttttctgcattgaacaacttttagtttgtttggcggaggtatagaggaatagaccttgcccctttgaaagcttgcattggttattttaggcagactatccaccacgcacttaagattctgcttactcgcctctagaagtgactcctgttaaagactatacaattgattcttcaatgccgtggtgctcctggaggcccccggtgtgttctggcgagggaagaagaagaggtgcaatatcgcggcgtgtattattcgagccggatacaagcgataagagcccttgttggccgacgggggggggggtcttatgttccacccaatgtggcgtgcgacgaacaattcggccgctgtgcttaattaaataagaacagtatatataagatcttcaaagggtgacgtgcgtagtgaggtagataccggatgatgaaaaatatggtgtgga

SEQ ID NO: 617937 - DNA, 300 bp, Homo sapiens
tatcgagttgtctcttgtaaaagtctgaatattacaattgcactaaaaggctgggcacagtggctcatgcctgtaatccccacactttgggaggccgaggcgggtggatcacctcaggtcgggagctcgagaccagtctgaccaacatggagaaaccccgtccctactaaaaatacaaaaattaactgagtgtggtggtgtgcaccgtagtcccagctactcgggaggctgaagcaggagaatcgcttgaacctggaggcagagattgcagtgagccaagactgcaccactgcactccag

SEQ ID NO: 617938 - DNA, 1494 bp, Homo sapiens
accccagagagccctgagcagccccaccgccgcctgcctgtgcctagttaccatcacacccctgtgtgatggatgcctgcatgctgcctgcatgcctgtgccccatgtcaccatcacctgcaacccatgatgcatgctgatgtgcctgatgacccatgcatgcctgccctgctgaacaccacaacagcgaacagacccacacagacccctaccacgacaacacgcaacgaccaacccaacaacccctgagcacctaaccgagcgacaagacgagccgccacacggacagcaaggatgaaaacacagagaggacggacactccaacactccaggacaggacagaaaatgcaccccggccgccagggcacccagccaccacgcggtccactacccgaccacacccgaccacccctctcacccgggcgcccaccccgcctcacccccccccgcctccccaacaccaggtcaccccaggacaaccgcgccccctccaccccccacacaccccaacgaccccgcgaagcccgcacgacccaccggcgcaacacacctgtcacataaccggccaacgcaccacaccaccaactcggcccacccgcaccaccgacaccagcacacccccacgaccgcgcgaggcgccacacgaccccaccacccgcccccaccgcacaacgacgcgcccaccggcgcatccaacggaacactggatgacgcccgcccccgccgccacgcgccacgcgacgcaccacgcccacgaacacacgagcgaccaccccgcgaaagcgagcacagcacctcccacaccgctcgagacggcagacccccaggggcctgcaacaaccaccccacagaccgcacagacccggaccgcaccacagccgcctcccaactccgatcgatcaccaacacgcccgaaaccaccgcaccccaaccgccacccagcgcgacgcgacgaacacgccacccacagcggggagcggcggctggacgggcagcggctacggagacgcagacggcacgagagcctgaggctgaggcaggaggtgaggagagcgagcgcacgagagcccccccaggacgccccgtgcagcgcaaggccagggaccagagacacagcgctacagcgccgccaccgtgcagcgcgccgcaggcaccccgcggacgaaggcgcgactgaagaacgccgccgccgaacccgggcacacgcgcaaacacagggcgcagagagacaagaccggcgaaggagtcgaaaggccgacagccaggacacaacacaagacaaatcccacaaaccaacaaaactacaatataaaacaatcccaaaccaacctcaccacacaacacgaccaacccaccatcactcacccacaacacacaagtaaaaaaacaaccctacacacaccacagataccacaacacaaacacacgcagcacaccacgacatccaaccaacccacaccactacaagacactaccccccacaccgaccaaccg

SEQ ID NO: 617939 - DNA, 422 bp, Homo sapiens
  misc_feature (58)..(58): n is a, c, g, or t
tcatagccgatatctagagtataaccgtcgcatattctgaactgtccattcacatagnacaataccttgcggctacattcatggaacttagccacgaggtcctaccaactcctatgtgcttatccaaggtgcccatttcatgcctaggtgctggtcacgcctgtgccatacacctctaaaacatccttcattgtcctcatagactcatcatactatggctgcaagaccaaggaagttataggagcccatgtagatgacatctttgatgactctatccagtaaacctaaacgtccagttatagtcgtccgataccctctccatacacatcaaacagaggccctggggcactgcagatgggccggttccagtagtctctgattcgcatgtagaggtttcttgtataaaaattttcaaagtcttg

SEQ ID NO: 617940 - DNA, 231 bp, Homo sapiens
aagttatttttgtaataaggaaaaagacctaaggctgggcacagtggctcatgcctgtaatcccaacactgggaggccaaggtgggaggattgcttgtacctaggagttcaagaccagcttggtctgtaatgggagaccctgtctctacaaaagcgaaacaaagtgaaacaaaattagctgggcatggtgatgtgtgcctgtggtcctagctgctcgggaggctgagacag

SEQ ID NO: 617941 - DNA, 794 bp, Homo sapiens
tggtgcggcgacttgaaattgtttacccaaaatctgttgagctcgcttgtgcggggggtggggtcccggtgggctttccccctgtgcgccttccaggccaccgaggttccgatatctgccctgttggtggaatttcaaccccaactttcggtggcgcgtatatgataccataaaggtggaggtggctcggcagtccgttggaggcggccgaataactggcgttctgactccaggtgccgaaagggccggtttgagggatatgaaggagaaagtggaggcagtttctcgtggaaggcacccagtgcaccaaccgtgcgtgctgtggcagggtggccaagtctgcactagagaggggccacccgtgcaagtttgccccggaaaactcgggggcacgttttttgttccccccaaaatccaaggcgcggcgggatactcccccaaaaacagtggcgttgcttgaaagggtggcaagagagcgaaacacgtggagcaagtcttgcatgtggtgccccgaggggcgccccagattttccctggggtaatagtgaaccgtggggatactttggcggggtgagaattcctaaataccgcgtggtttctcccgaaaatttcgtggcgcgtgtgggtgttttattccccaaaaccctcgtttggaaccccaatagtgtagaccacgcaaaaaccacgcaggtgttttttgtgggaaagaccttcgggatatataaataattattgattgttttcctcaatctacaaggggctttttaaaaacacctttaaaaaaaataaatata

SEQ ID NO: 617942 - DNA, 156 bp, Homo sapiens
gtcagggaatgcatgttgtgtgcgttgagccatggtctgcctgtggtgagagtggtggacttcttcactgactgccatgagcttcgtcgtgctggcagagtaaacagtgttgatggctaggtgatactaggggctactgctggaacacgacaggcg

SEQ ID NO: 617943 - DNA, 139 bp, Homo sapiens
ggtagttattcgtcagacgtgacattaatgtcgtgactggtgaatacctgtggcgcattacaggtgtagttgttgtacagccccgttcacgtcctctcttcctccctttctcctttcatgaggctgatgtatattagtc

SEQ ID NO: 617944 - DNA, 173 bp, Homo sapiens
atctcaatcctccactccactctgccgctccactctcgctcgcttcccaacccgccggcggcatggcgtcctccgcgcctccctcctgctcgctgccgtgatgtgcgcgctcgcggcgtcgtccgcctccgcctcccgcgacctccgctcgcgccccacccagttcgtcgtgc

SEQ ID NO: 617945 - DNA, 253 bp, Homo sapiens
agtaggtcagatgatgactggttgaagaagtttactgggaagacgcttgaagagaataaagaggaagaagggtcaaagcctcccaaagcagagaaccaggagggagagcccattgctaaaaaggcccggtcaaatcctcaggtgtacattgacatcaagattgggaacaagccggctggacgcatccagatactcctgcgttctgatgtcgtgcccattacagcagagaatttccgctgcctgtgcactcatg

SEQ ID NO: 617946 - DNA, 1344 bp, Homo sapiens
cacctcttccccatctttatctctgcctcattacttaattcttgtccttatttgacattgggatttctaaaataacctcttactggtgttcctgcctccagttccttccttttactgttagcagtgtagtctttgttaaaccccaaatttagcacgtcaccctaacttaaactcctgactgcatacaggtagaaatcaaaattccccactaaagcccatagggcctttaatgatgtggtctgggcctacctctccagcctggttctctaaccactgtcccaccctatatctttctgttcagtcttacaaaactatttcataaaaattttctcacttctctgcctttgcacaggctgtttgatatacctggagtaatccccaccattgattcttttcttggcaaaaatctatgtaaaacttatcatctgtggcctggaaacaatccataacttctactgttctggattacgtgacttttagatgttctgtagttctttgtatagacctctctcaaaactggtcatatgacatttaaatgtctatttcatttgtgttgttttgccccttttacactgtgaactctctaatgggcgggcccctttttcatctatttctgttgtgttcaaacctgggaacataaagtcttaaagagtgtcacttctcaagggtatttaacctcccgaggttcacatccatgtgcggacaaggtccgcgacagcgcgcggtcggggaggaagtcgtccgccaaacaggttattctgcagaaccacacacaacagcaccttcgtcctgggggacacacaccaacaacaacaaaagacaagaacgacacaaagaacgcacgcacaaggacaaactggagacaacgccgcggcggcgcgacgacgaaaaaggaagaatgagtgcaaaacgaagagcacaagcgacagcaaagacaacaaggaagcacacgaagaacgagcacaggaggagaagcgcagagcgctaaagaagcggcatgccacggagcgcagcggagaaggggaagacgagcgacgacagagcaagaaagcgcagaaaggagaaggcggacgggcgagaggacgcaaaaagaaacacgaaagaagagacacaaagcgaaagaaagaaaagagggaggatgacgacagagagggacaagacagacgagcgaaggagaagagaaagaagaggaacgagaagaagcacaagagagggcgaaacaaagaagcagcgagcgagaaggaaagagagagcgaggacacggcgaggagaagaagagagaggcagaagagagaaagacaggagagagaagacataggaggacgagagcgaggaaagacagac

SEQ ID NO: 617947 - DNA, 350 bp, Homo sapiens
tcgtcgaatgcagattctagcccttcacaactcacttctcctcaccaagggcttcacttgcaccactgcagtctgcctttcaacagtcgtgggagacacagaccagtccccattttacagatggggaaaaaggaggcttggggaactccttggccagaggccacagaggcctcccagtgggactctgtgctcggcaaagaagggaatctggggagcaggcaccctttagagaaataatctgcatcgaacatccacaaaatccagcaggaggccaccaggagctgacccccatgcagagaggaagcaccagcactctgggtgagtgaggccaaggtcacggtcagtcccca

SEQ ID NO: 617948 - DNA, 279 bp, Homo sapiens
  misc_feature (28)..(28): n is a, c, g, or t
aaggggccccttttcccccctagaacantaattccccagcccccctgccagcagcagcaggtgattggaccaggccatttttccgccccctccttaaccgcacaggtcaggaggggcccttgggttttgtgataagctgatttgcggatttcagcttttaaaagcctttagctccagggaatccaagcctccccagcgagggcaggtggtattttttttcctaaaaagaggatttttataccaccccccccaaatggaataaaagggttgaagctgtga

SEQ ID NO: 617949 - DNA, 831 bp, Homo sapiens
  misc_feature (769)..(769): n is a, c, g, or t
  misc_feature (776)..(776): n is a, c, g, or t
ataattgctagtagagcctggtttaaatcggccgatggttggacgatggcggcggcagctgccgccgggcctagcccggggtctggacctgggtgactccccagaatgggcccgatgggggaggctccggagcgtcggctggaatggctgcactgggatgctgaatgctttactactgtgcctctcgtgaagtgggaggcggcgtggacgcccctgctggtggccctgaccccctggacccgactgatctgaactggggctgcacttcgacccggaagtttacctagacaagctgcgtagagagtgccctctggcccagttgatggacagtgagactggacatggtgcggcagatccgggctctagacagcgacatgcagaccctggtctatgagaactacaacaagttcatctcagccacagacaccatccggaagatgaagaacgatttccggaagatggaggatgagatggaccggctggccaccaacatggcagtgatcaccgacttcagcgctcgcatcagcgccactgctgcaggaccgccacgagctgcatcaccaagctggcaggggtccactgcgctgctgcgggaagctgcagttcctctttgagctgccctcgcggcctcaccaagtgcgttggaacttgggctgcctatgggcaggcgggtgcgctaccagtggccgcgcgcaggccgtgcttgcaggcagtaccaacacctgccctcgttccgcggccatccaggacgactgccaggtcagtcacntggccgnctggcccagtcttgtggcagcgctttcgggggtggcggtcgtgggcccggacagg

SEQ ID NO: 617950 - DNA, 535 bp, Homo sapiens
  misc_feature (33)..(33): n is a, c, g, or t
  misc_feature (83)..(83): n is a, c, g, or t
  misc_feature (94)..(94): n is a, c, g, or t
  misc_feature (96)..(96): n is a, c, g, or t
  misc_feature (159)..(159): n is a, c, g, or t
  misc_feature (164)..(164): n is a, c, g, or t
  misc_feature (167)..(167): n is a, c, g, or t
  misc_feature (170)..(170): n is a, c, g, or t
  misc_feature (203)..(203): n is a, c, g, or t
  misc_feature (206)..(206): n is a, c, g, or t
  misc_feature (247)..(247): n is a, c, g, or t
  misc_feature (250)..(251): n is a, c, g, or t
  misc_feature (259)..(259): n is a, c, g, or t
  misc_feature (293)..(293): n is a, c, g, or t
  misc_feature (302)..(302): n is a, c, g, or t
  misc_feature (304)..(304): n is a, c, g, or t
  misc_feature (324)..(324): n is a, c, g, or t
  misc_feature (326)..(326): n is a, c, g, or t
  misc_feature (338)..(338): n is a, c, g, or t
  misc_feature (410)..(410): n is a, c, g, or t
  misc_feature (413)..(413): n is a, c, g, or t
  misc_feature (417)..(417): n is a, c, g, or t
  misc_feature (428)..(428): n is a, c, g, or t
  misc_feature (468)..(468): n is a, c, g, or t
  misc_feature (525)..(525): n is a, c, g, or t
tctatttattttctgtttttttcctcttctggnagctgattaatctagttatatactcggatgatgtacctatggtgctagtnggaaacaagtntnatttgccaacaaggacagttgaaacaaaacaagcccacgaactggccaagagttacgggattncattnatnganacctcagccaagaccagacagggtgttgaagangcnttttacacactggtaagagaaatacgccagttccgaatganaannctcaacancagtaatgatgggactcagggttgtatgggattnccatgtgtngngatgtaacaagatacttttnangttttgtcaganaagagccactttcaagctgcactgacaccctggtcctgacttccctggaggagaagtattactgttgctgtnttnagtntaaaagagaanctcctgctacttccccagctctcagtagtttagtacaatnatctctattttgagaagttctcagaataactacctcctcacttggctgtttgaacanagaatgcacc

SEQ ID NO: 617951 - DNA, 166 bp, Homo sapiens
ttaatctattgtagagacgagtctgtttggtgcctaggtttgttcagactcctggctcaagtgatcctcctgtcttggctcccaaagtgctcgattataggtgtgagccgtggtgcccagccgacaaccagaactttccgcagaccttgtgcctttgtcgtcggct

SEQ ID NO: 617952 - DNA, 985 bp, Homo sapiens
caagattgtgccactgcactccagcctgggcaacacagcaagactcccgtcaccaaaaaaaaaaaaaaaaaattaattttctttcttactatatttggcaggaatcgatattattatcttgttttttcaaagtttttttttttttggaagatgggagtcgtgggctcttttcacccagggctgggagtgcagtgggcctgatctcgtgctcactggcaaggcttctgcctcccggggttcatggccattctccgtgcctcagtttgccgagtacgctgggactacggggtgcccaccaccacacacagcttaattttttgtggatatttttcaaggtagagatagggtttccaccggtgttaagccaggagtggccataatatcctccgtgacctgtggtgtggttcttgcccaccttcggccttcccaaaggtgctgggagaatatatagggcgtagacgccaattggcgcccgggcccgaatatttatacatccttataaagcgcaaacctgtgaggcgaattcgcctatggtccctccagatattcggagatattctgggacaccctcccagtgtctcggcgctctgttatagagacaaacaccattttattataaagtctggggtccccctttataccgtgctaacaccatttaaagcaaggctaacggaaacgggggcttaatattctgccgtcgagcaaatgtgccgagccccaagacaagaggttcttacagacgcatcatgtatgctccgagccctcttcaacttcaaacatgggggagtctcgacgtgtgtcacttttgcgaaaggcgccccttttctgaatccgttaacaccctgggtgtcatagcccaaaggaaatgtctctaagaaaccgcccaagggggtgttgtacatttcttgaaattgcagtgtggtgggcaccccaagagggttcagctatttatacgagaaagccaacccccttgaagaccccccaa

SEQ ID NO: 617953 - DNA, 304 bp, Homo sapiens
gtgactctgaggatcgcctttagctctctctgacggggggcgggagagacgctcctacctcccagacggggttacggccgggcagaggtgctcctcacatcccagacgggcggcgggcagaggtgctcccacatctcagacaatgggcggccgggcagagacgctcctcacttcctagatgggatggcggccgggcagagacgctcgtcactttccagactgggcagccaggcagaggggctcctcacgtcccagacgatgggcggccaggcagaggacgctcctcacttcccaaatggggtgg

SEQ ID NO: 617954 - DNA, 121 bp, Homo sapiens
ggattcaggagactacgcgcctgttcaggtgtgatgtgcagcaggtccagtgctggtgtgtggatgtgagagcagaatgtgtgtgagcatttgagtgtgcaagtaggtgtctgagtggttg

SEQ ID NO: 617955 - DNA, 337 bp, Homo sapiens
  misc_feature (32)..(32): n is a, c, g, or t
  misc_feature (71)..(72): n is a, c, g, or t
gaaaatccgtctcaaccaggaaaaaggaaaanaagaaaaggaaaacttgactggcctttggggacatgctnntagtcccggcttcttgggaggctgaggcatgagaaaaaaaataagcctgggaggtggaggttgcagtgagttgagattgtgccactgcactccagcttgggcgataaaacaagactgtctcaaaaaaaaaaaaaaaaaaacttattgagagaataatataccactaatatttaaagaaatttttggctggtgccgtggctcgcacctgtagtcccagcactttgggacgtccaaagtgggcgtataacttgaaggtcaggaagtt

SEQ ID NO: 617956 - DNA, 321 bp, Homo sapiens
  misc_feature (283)..(283): n is a, c, g, or t
cttcatggagggtcggggttaaaataaggcattgtggccaaatcagcggtttaaatatgaggcacgcagtcggggtttacccatgctgggggctgggtgggggtcataaggctacaggcacaaatggtccccaggtggacaaaatttggagcagaaaaaggagaagaaagggtgccgcaaagcagttgggttcaaaggccgggggggccagcccagggtgaactaggcagaaagctcggggggggggttccagcagggaggggaccaggatctctgtgctctnccctttgaatctctgggtcgccagctctcccagggcct

SEQ ID NO: 617957 - DNA, 326 bp, Homo sapiens
  misc_feature (166)..(166): n is a, c, g, or t
gttttaaaaaaaaccccccccccaagtttttttttggcaggggcccccccaagagtttaaaggttcccgtattttaaatgggcccccgggtttttttggcccaaagccctttttttcccttttttaaaaaacccagggggcccacccattccccccttttttaaancccggggggggggaaaaaccccccttctttttttcccaaaaccgggcccccttttttgggtggttaattgggttgggggttttcccctttttttcaaagaaccttttttgggaatttttttccctttcccccccccgtttattaaaaaaaaagggtttga

SEQ ID NO: 617958 - DNA, 961 bp, Homo sapiens
cgtgacgcgtgggcaaacccactcctaccgttactaccagacaaccttagccaaaccatttacccaatataaagtataggcgatagaaattgataatcctggcgcaatagagtatagtaccgcaacgggaaagatgcaaaacattataaccaagcataacatagcaaggactaagccctataccttctgcataatgagattaagctagaagataagctttgcaaggagagccaaagctaagatcccccgaaaccagacgagctacctaagaacagtttaaagagcacacccgtctatgtagcataaagtagtgggaacgatttatacggtatgatggcgacaaaagctaccgagcctggtgatagctggttgtccaagatagaatcgttagttcaagcttgtaaagtttgcgccacagaaccctctaaatccgccttgtaaatttaactgttagtccaaagaggaacagctctttggacactaggaaaaaaccttgtaggagagagtacaagaaattgtaacacccatagtaggcctaaaagcagtcaccgaattacagaacagcgttcaagctcaacagccgactacctaaaaaatcccaaacatataactgaactcctcagacccaattggaccaatctatcaccctattagaagaactaatgtgagtataagtaacatgaaaacattctcctccgcatagcctgcgtcagattaaaacactgaactgacaattaacagcccaatatctaccaatcaacaaacagtccttattaccctcaacttgtcaacccaaaaacaaggcatttgctcaatagcggacaggtgaaaaaccacttcacagggaactcggacaaatcttaccccggactggttaccaggaaaacattcacctctaagataaccaggacttcaaggacacggtgaccaatgaacaatgtcaaacggcggagaaccaaag

SEQ ID NO: 617959 - DNA, 359 bp, Homo sapiens
atcgggtacatcgacagttgtgggtgttgcggttggttggggagaggatcgagctcagatttcccgtggcgcttgtcgacggcgagcattgatccttggtcggagaagctcggggtgcgtccccggccgatgcgccttcatcgacgtcttcatcccgtcctcagggacgggtgactattgcggctcgtttgaaagcaatcttgcgatggggcttctccagatctgcggcggccatgatgtcttcttcgacggcggcgaccggcgacggatcgacgatggcggtcgttggaggcttctggcgatttggggaatcacagggtccagggtcctcaatgaaatttatgtttttcttaggggcc

SEQ ID NO: 617960 - DNA, 481 bp, Homo sapiens
aggagataggccgcgtaccctagcgctaatagtagcggcgcctggactatcatacgagaagcccgactatagactacctagcggaaagttactatacaccgacctactatcgaccgcagtgggctaacgtagtatcgactaatagagtaacgactagggcccgggaagcccttgccggacccccaatcggcaccgtccacaccgacctagccctacccagcctacagctccgggacaaaacccagccgcacagcaaaaaccaggcgttgaactaccaccaacggggagctagaatagcggacgaccccacggcccggccaataccaacgccccgatcacagcgcctagcagaggtaggaggtaggccgatgaaaccaaatgctgctagtaccttcaagaggagaaagagaaaatcgctagcagcaacacaagtaaccctgggcgcgtagaagccccttgaatctaataccgtgcagcccct

SEQ ID NO: 617961 - DNA, 364 bp, Homo sapiens
aaaaatgaaagatttttcttttttccactgtgaaggccagtaacacattcttccccatgggtgcaactgaatgatttatttagtacattaatgtacttaattataagtgtttctggaaagctgaatttgcacataaccttattttgaaaaacgcggtttatgaaatttggcactaaaattattaatacacattaagtttcatataatcaaatgtgaatatcggttgtcacagttttaaacgtcacagaaaacacctttgaaaattaatatagtgataatagatatgtcctgtgttcgctgttaaatttaagcccaagcacaccacatagagtgatcccatgagtactcatattgtgatgtgtgc

SEQ ID NO: 617962 - DNA, 749 bp, Homo sapiens
gcttgatgatgcggttgagggagaggagcatgtctgcaagttcgagtcaagaaagtgaagagatggacagccaatatctagtgctcctgagtagtacctagagaggttccgtcgtgcgatgtaaagtccatgtcggttgtggtgcgatcatgaactaagctacgaaatagttttaatgtgcgacaatactcggagtcaaatcaccacgcgttctacagaaaacatcgcatgaggcctaagaggaggggaatgagagagagtaaggagaagagaagataaattctacagtaaataaagatttagaaagacagaaagaggtctcgaagtaacacgccattcagatcatatcagacgaggaagaggaagacctaaaagtgcatctgcaaaaaacatgaggacagaaagagagaaaccaggcaaccaggcaaacttgaccatctatgctaacctgtcttgattgacaaaggcttcggtggttgcagtcggccttggcaagaatgtaaatgcaaaaacttatccaatcaaagacttattctctgatacttgttttgcaaaatctggtgaaacgttcttgtcaggataacatcagcaaaattctcaaacagttatggactctccaggagcatttcttgactgcatcaaatacgggccatcgattggtttctttctcgccttgtcgtttagcctgtgccacacttcgggagccaagctgtgtaagctggcacctgtccgggaattccttgtttacc

SEQ ID NO: 617963 - DNA, 223 bp, Homo sapiens
acggcagagctgagagacaacatggtatattaaaacacacacacacacacacacacacacatatcagcagtcagatctggctgaagactaaaggtggtgtgcaggaaaacacaggtgacgcaagaaagataggcagaggctatacgtggacggtcctatagtgataagaaattaacgactttttctcatttaacgctctccggacacccactcagaatgtatg

SEQ ID NO: 617964 - DNA, 145 bp, Homo sapiens
  misc_feature (136)..(136): n is a, c, g, or t
tccgtggcggtcaaccagcgggcatttaacgaggtatgtaacccgactcatattggcatgactatgacccgaatgatactataatactatgatgcggaaatcgttatcacgatcaggttaccgaggaagactgtgncaaagcccc

SEQ ID NO: 617965 - DNA, 97 bp, Homo sapiens
catggatttgctggtgcagtacaactaggcttaatagggactcgaattcaaaaaaaaacgttagaagttgaattcgagcctagaattcgaaaaaaaa

SEQ ID NO: 617966 - DNA, 979 bp, Homo sapiens
ggtgccactgaagatcctggtgtcgccatgggccgccgcggccgcccgttgttaccggtattgtaatgaacaagcgctgtatccaggagagtctcgctctcgtgacctggaggtagtccctgcatgccgaagatacggcattttatgaccgtggggcggaaaacaggcaacaagtggatgagttgtccgctttgtggccacatgtgtgtcatgatgactatgagcagctgtcctctgaagtccctggaggcagcccgaatttgtgccaataacgtacatggtaaaaagttgtggcaaaagatgcgcttccataatccgggtgcggctccaacccattccaacgtcgatccgcatcagacaagtatgtccgtcctagtgctgggagctgactaggctccaacacaggcatgctgaaggtgccttttgtgaaagccacctagagtcacatgtggccagtggttcacagttgtgccaaagttatcatgtccatccgcaccagatgctgcgagtaacaaggaggcatgtgagttgaaggccctgcgcaggggcagagttcaaagttgtcctggccgaccagcaagatccacatctcaaggaagtggggcttcaccaagttcaatgcgtgattgactttgactgacatggtggctgaaaagcggtcatcccagatgggctgtggggtcaagtacatccccagtcgtggccctctggaccaagtggcgggcctgcattcatgagggcttcccaatgtgctgccccctcttaatactcaccagtgaattctacttcctgtccatatccacatgtgcaacgacaaatcgcgcggaccggtgactgcagattggcctgcaaaagagtatgtccagtcgccaggggcctcagggtcgtgactggaccatcgttttgtgcacccagcgtgaaactgttccggaccccttgaggaggtcgaagagtccggaaacgccggttccctcttagg

SEQ ID NO: 617967 - DNA, 431 bp, Homo sapiens
ttgaacagatatttgtacactgatgttcacagcagcattactcacaatagccaaaaggtggaaacaactgaaaagtccattgaaagataagtggatagaaaaatgaggtgtatccatacaatggaatgttcttcagccttaacaaggaagaaattgtgatacatggtgcaaaatggatgaaccttgaagacattatgctaagtgaaatagggcagacacaaaaggacaactattatataattccatttttgtaagatcgttagaatagttgattacctagagacagaaagtagaatggaggttaccagagtttaggggagagaaggagttactgtttattgggtacagaggtttagtatggtaagatgaaaaagttctggaaatggatagtgtgatgtgatggttagacatgagtataaaaagacttgatt

SEQ ID NO: 617968 - DNA, 122 bp, Homo sapiens
gtgactgcaacacctggttcacgaattaacgcgtccaggtggaaaatattccgttggatcagtcttgcattggagagtggccaaggctattgctagtcgatcattcagtagcacagtcctgg

SEQ ID NO: 617969 - DNA, 155 bp, Homo sapiens
acacgcgcatcagcagggctgggatgtagtacagtctccatcagcagtatctggatgatgactaggacgacaagaagaaaccgagcaaaaatataaagtgattcccagcgattctgttcttctgcactgtcagactttgtccccatgttgggaca

SEQ ID NO: 617970 - DNA, 172 bp, Homo sapiens
tcctgcgggtctagtctctgttcctttgcctggtccacccttgccctccctgggtcgcagccgaggtcgtgctcgtgataccccggagacagcgcgcgtccctcttgtgcggttcaccacagtatgtatttaatgtgatcgtagtgagtcgtcgttaaatgcctgtatcccc

SEQ ID NO: 617971 - DNA, 274 bp, Homo sapiens
  misc_feature (274)..(274): n is a, c, g, or t
aaagcataaagaagaaaagcacaaagaagaaaaacataaagagaagaagtcaaaagacttgaacagcagctgattttgttaaacagttgaaggaaaagaaggaaaagaaaaagccaattcagagagccagaggtgtcctctagattttatgtttcccaatctctaaaccccatttttttgggatttccctttgctctattcagtgagagagggaccccatatgtatgatgtcatattggcctttccaaacccttttccgcgttatgtatatagn

SEQ ID NO: 617972 - DNA, 177 bp, Homo sapiens
  misc_feature (10)..(10): n is a, c, g, or t
cctggggggnaatgttttcccctccccccccccgtgggggagaaaaaaaaaggggggggccccggggttttttttttttttttaacccccccgggggggggggggggggggggccccccttttttcccgggaaattttttttttttttttttccccaaaacccccccctttttggga

SEQ ID NO: 617973 - DNA, 685 bp, Homo sapiens
aagtggctggctcatttaagatgaggcttctgctgctgtctcctagtggcggcgtctgcgatggtccggagcgaggcctcggcaatctgggcgggtgcccagcaagagattacagatgcgggtacgccacggggccgcgtgtctcagatgttccagatttgtgttgtcctgaggttataggcgggtgtagagggagtacatgcgggttattggagccagcgtgtacccagacatccgctattgaaggagagaattacctccctcaaaccaatatatagaccacataggcagtctttgccttgtcaggtcttcaaactagtattagatagggcttacctaactgtgtttggcaagggatcctttgtgctgtcttgtggcatgcagagctccttaagcatcctggcagtggggccaaggaaaataaggttgatggcagtggtatgattggttttcttcctgtgagcaagcatgattgtgaagaaccacgtgtttggtcaacaggtgcatttgagataactttgaatgatgtacctgtgtggtctaagctggaatctggtccacctttccatccatgcaaaactgtgtgcaattctgtgacagtgaaatgagctcaagtgcgtatgggattcaatcccgacatcgatcataggggcaactatgagactgaaaactctttgccgtaagg

SEQ ID NO: 617974 - DNA, 171 bp, Homo sapiens
tcatagcattttctggacaaactcagacctaacggtggtggagaaccaaaggggagttgctggaagacatcaaacgtgactttggttcctttgaccagtttaaggagaagctgacgagtgcatctgttggtgtccaaggctcaggttggggttggcttgggcgtacgggga

SEQ ID NO: 617975 - DNA, 900 bp, Homo sapiens
tgttgtagatagccagtcaaccagcagtattggtgctgtggccaagagatttaagctctatccgatggggaaattatctaacatcatttgccctaagcattgacacatagtcttcatcctgatggtgcagatagtggtgcaagcatgtatagtagtctgcacgtgtgtcttgtctacagaaaagtgaataatacaggtgtttacattgaagaattttatagctttgagtaactagcgaggaattccgagtgcagccgggcgaggatgagtcatatattctataactctccgtgaagattgatccagtaccaccgagaagttgttgggcattttttcgtattccttcttcacataggcagggttatcaacagagtgtgctattcattttgtacagtgtcatattacagtgaccaaggtagaatgcctcaaatgctatttattgtattccagcccagtacgttatagaagaacgtttcaccagaatgagcctccagagctgggaatcctaccacaagatctaaagttctggcgtgtccattaacctccaactatgggcttcatttctggtggtaatatgatgtgccttatactgtggcataaatccgttcctggttgtgtgtcagcgttatgtagatgtcttctagatgcagacataagttgtaagtatgtctagtaacatgaactttgaaaacttattgattattccactaatgtgagcatggcagattaaaatgtacattcataattcttaacatacccaaaaaaaaaagaaagaacaaaatttgggcccgggcccaaaattttaaacaggtctggggggccctgtaaaaagggccgggcaaaaacggagaaaggggggtcacaaacaggggcaggctaaaacagggggggtgttacagc

SEQ ID NO: 617976 - DNA, 263 bp, Homo sapiens
  misc_feature (1)..(1): n is a, c, g, or t
  misc_feature (44)..(44): n is a, c, g, or t
  misc_feature (72)..(72): n is a, c, g, or t
  misc_feature (83)..(83): n is a, c, g, or t
  misc_feature (156)..(156): n is a, c, g, or t
nttcttttttacagccccttggttgtccggaatcgcatatgcgngatcaacctgaaatcgggagcataccanttgccttgcanactcaatactatttattttggggagggggagaaatttggaaaatttgtttttggaccacccgggggccaccantttaaccaagcggtggggggaaaaaaaaatctttctttgaaaaaacccctttggagggggggtttttttcccccgcctttaaaatttttttcaaacaaatttttttg

SEQ ID NO: 617977 - DNA, 553 bp, Homo sapiens
  misc_feature (33)..(33): n is a, c, g, or t
agctcggtacccttcctaccagcaaagacaggngtttgacatgcaagcgtatccattcttcaagatcccattatatcattcaataatacctcagcttgtgggctgtatggcacatggaatccccactttatgtccatttgctgtgcccatcattgtacctgttgtccagtgaaatgtgttcctaaaagggcacaggtggctccttgggcagcagttatgtctaaggccacttggttttgcaacaccactttttgatctgatcaacctcattcattaacaggaggagggacactcaggtgtaattcagagcctgagcggtgtgctccgcaagagcagtaaattgtgcttctacagttttgacacctgctccagggatagtcattgccaaagggtagaaacaccagggggctcatcacattcgcaaaaactgagagcacagtgcctcccagttatacaggcatctgggcaatgtggggagaacagtagcaggtacataaggccacccccagataaaacatccactccagtttgctgataggaaaggctactgtgt

SEQ ID NO: 617978 - DNA, 345 bp, Homo sapiens
tttccaaaattttttggcccccccctttttaaaatttaaaagggaaaaggtgccccatttttttgtttaattgggccaatttttggttttttttaaccgggttttacccccccccaggaaattcccccgctggccctcgccaaagggaaacttaacctttttaaaggcagccttaaaaaaattaagggcccccccccaatggtttgttattatccccgcccccgtttccctttttaaagaaacccccggcccttttcaatttcccgggcataaaaaaaatatcccccccccccgccactgccccccccgaatttttggtttttttttaaaaaaaaaatgggggca

SEQ ID NO: 617979 - DNA, 250 bp, Homo sapiens
cgggagccatggatgcgcggccctgtgtggcccgggggcgctgggccggggtggtgcttcccacggcactgacatggagacctgtggttgcgaggctccctggggctcggcttgtgaccgctgaatgggtgctggtgccctggcctcctaactggggctgctgtactggggcgtgtagctgggtggggctgctctccccgctgccctgggactcggagcagccccgacccctctgcctgcccgtggccag

SEQ ID NO: 617980 - DNA, 232 bp, Homo sapiens
cagccagccactacctacacttcctcggggtgccctggacacacacgactcaccaggaaacaaaggaacacctcagctcccacagccactctcagacctgcccttgctgcactccccaccacgggcagcctcggtctctatgggtcacagccaagcagctcccccctcgcttttctgtcctcaccacttccaccaggggccctaataaagatgtcaaaccagaaaaaaaaaa

SEQ ID NO: 617981 - DNA, 249 bp, Homo sapiens
gtcagggacccatctctacacaaaaatacaaatattagccaggcatggtggcatgcacctgtagtcctggatacctgggaggctgagatgggaggatctgggaggatcgcttgagctcgaggaagtcaaggctgcagtgaacgaagatcatgccactgcactccagcctgggctggacagagtgagaccccatctcaacaaaaaaaagaaaaaaaggagagctctttgactcctacctctccctctcat

SEQ ID NO: 617982 - DNA, 307 bp, Homo sapiens
gaattgtgtggtgttatgttctccttgtgcttgtagcagtgtttgctcaataattttgtaagaagcattgatatgtcgatgcatgagcagctcggcaagttcaccatcgccttctgcaatcgcatctaaaatacggatatgttcgtcccaagctttgcttggacgatcgggtgtgtttgaaaactgaattcggtacatacggatgagatgataaagctcatcacatagcattttttctagggttttattgccactacttttgataatgcagtagtgaaaatcgtcctgcccataacaccacacaatt

SEQ ID NO: 617983 - DNA, 216 bp, Homo sapiens
tgtgtttgtttaccttcttgtaaggtacgagtacccatcctccttagttatagcacttttaccggtatgacgggttccattaaatgtctaagttacggtatgggtagttcaatggttacggaaagaaatgtcttaatctttttgatgaaatttcaagtaataccttggtttttttctcgggcgtaacggttcagtaaggattcggttttttttttt

SEQ ID NO: 617984 - DNA, 166 bp, Homo sapiens
gcggcagactcattaaaactaggcggctatggtataatacgccgtcacactcattctcaagcccctgagaaaagacatagccgaccccttcctatgtactactccgctatcagacataacttataacaaggctccactctgccgtacagacaacacagcaccttaa

SEQ ID NO: 617985 - DNA, 575 bp, Homo sapiens
  misc_feature (99)..(99): n is a, c, g, or t
  misc_feature (114)..(114): n is a, c, g, or t
  misc_feature (228)..(228): n is a, c, g, or t
tcttaggatcccgattgacgcgtctcctgctctaaggacagaagctctctctcagacacatctcatgggcccattcaggacacttctgagtacatcatntcatgtcatcctgtngcactgatgaaagaacccttacagttcaggtttcctggaacttctaccagtgccactctgacaggcctcaccagaggtgccacctacaacatcatagtggaggcactgaaagancagcagaggcataaggttcgggaagaggttgttaccgtgcgcaactctgtcaacgaaggcttgaaccaacctacggatgactcgtgctttgacccctacacagtttcccattatgccgttggagatgagtgggaacgaatgtctgaatcaggctttaaactgttgtgccagtgcttaggctttggaagtggtcatttcagatgtgattcatctagatggtgccatgacaatggtgtgaactacaagattggagagaagtgggaccgtcagggagaaaatggacagatgatgagctgcacatgtcttgggaacggaaaaggagattcacgtgtgacctcatgaggcac

SEQ ID NO: 617986 - DNA, 888 bp, Homo sapiens
  misc_feature (798)..(798): n is a, c, g, or t
cgatgacagatcgcgcggcgcgtgccacgtggtgtggctacgggtcactccgggttgctcagaagctcatctatgggcactgtgaccactacgacggcgtgagaaagttgtggaagctggtccgccgagcatggactagcaaaactgaaacagaatattcgtgatctacgtccaggtgacaagatccagagctggatagcacagtgcttgtctgagagcgaggactctctgcttatagaagatcaccagctttgtgtctcctacacgtgggttcccccagatgggtgaccacactgaagtcttgaagggcattcgagcaacgtttcctggctatcaattacccagtccgtgaccgccacagattgtgaaaggcttcgaggcagcgggtagcatgtgtggagccagggaagtaggtcatcttttggagctgcctcagagctctttcactcaatgaaggaacatctaattgttccagtataggagagtttcagaggtttgacgctaatcctgaaggcagttgcagttcagccaatatttctgtgctgggggtacggtctcctgtgctcttgggctgcccttatgaagggaagatctccccaggctaaagtagctgaggtcaccaagaagttctactcaatgggctgctacgagatctccctgggggacaccattggtgtgggcacccccagggatcatgaaagacatgctgtctgctgtcatgcagggaagtgcctctggctgccctggctgtccacttgccatgacacctatggtcaagccctggcaacaccttgatgngcctgcagattgggagttgagtgtccgtggacatcttctgtggcaggacttgggaggctgtccctacggcaagggggggccatcaggaac

SEQ ID NO: 617987 - DNA, 161 bp, Homo sapiens
atcgaagagcggtgcgtatctcattcccttacttgaacggctagacctgaagaaggaaaatatacaagcaatggtgattgttcccactaaagaacttgctctacaggtcagtcgaaatttgcattcaggtccagcaaagcacatgggcacgggcccaaagt

SEQ ID NO: 617988 - DNA, 631 bp, Homo sapiens
atctgcaaggagaatgcccaccagccttgtcctaataaaattaagttgtatcattaaaaaaaaaaaaaaaaaaaaaaaaaaaaaaaaaacaaaaacccaaaaacaaaaaaaaacaaagcaaaacagaaagacacaaacacaaaacacacaagattgcaaacaaaagaaacaacaaaataaagacgcgagggcggcgcgcggcggcgcacgcacgcgggagcagacaccgccgacgccacacacgtgagtaagagagagagagggagaagcgagaaaaggatgatagtaggagacagaagcggagcgcgagatcacatacaatagagtgaagagacaaaaagagacgaagtcacggggagggagagcagagacggagaggcggacggcgtcaagcaacgccaagaaaaaaaaaaacaacgagggcgaggactacaaagatccagcgattcgaccattaaacaggcaaaagaacccccaaggcagctgcgtcaccgagaagaaatgaaacgatatgcgaggaccgacaaagaagagaaggagacgaagtcacaagacggcgccggccggcacgaaaaagacaaaaaacagaacaggacacacgccgcgaaccacagcaaaacccgaacaccaa

SEQ ID NO: 617989 - DNA, 404 bp, Homo sapiens
ccagtgaatcgagctcgtgtaccgtttgccagcgagtgctagcgccgccgccagctgccgggtctcgccctgcatgtcggcgggcagcttgttcggctccaggtcggccgcctcggggtggcccgggtcccagcgcgagacgcgccgtgccagccagttcaccggcgacaccaggcgcttggacgcacggtaggtcacccagctggcgccatacaccgccagcagggtcagcagcaccggcacgatgccgaaccagaacgccagcatctctgcgcgcgaacgcaggaacaccaggtacaggcggccggccgggcgcacatcgaccagcaccagctggtcgtccttgggcagttcgtggaagccgggttccagattgcgcaggttggccggtaacgacagtgccg

SEQ ID NO: 617990 - DNA, 1454 bp, Homo sapiens
ggagcaccctggaggtgggtagcgctcctccagggagcacccatgcccaccaagaagcacatgggtgaccagcgtggcagactcgggaccaatacgtactgacgtcctccctgatcccaccaccctccatcccccagaagtcacccattatcttcactatattatcgataagttatagcctctagacagataccacagggcgccaacacacgttaggactaggatagacaagaaggctacaggcaacatacacacatcgatacaacagacgacactgaacacaatgcatgataatggcacacatgggagaatccattcaccaacaagagaagcgggacccaagacgacatgacgggaccacttacaaaaaagacacagaagattgccaacatgcacataaccaaggaatgaccacataacgaactgccaccgatgagagagaacccaaaatggaccatacgagagacgaccaaggtggactagggaatgccaattcaaaacaggaaatcgcggtggccaatcgggtgacatccggacaggaacggacatacaacgaacatcatggacaccagacagagccacaaaaaaaacaaaggaccagaaaaagaaagacacatcacacaaaaaaaagcaagaccaggagcaagaggaaaacacgggccacccaaggaacaaatgaccgagatgcaaccagcccgaatccaaccacatatacacaaacaggggcaatcacaaatcattggcagacgccaacagatgcaaccgggacacaatgaacataacgacaaggagcaaaaaaataacactgaaacgaggcgaaagcaaaacaccaagggataacagaaagcgctcggaatgaaaccaccacagaaaaggaacaaccccaatggccaacaagaaaggaggaaacatacaatgaaaaaaaaacgaacagcaaaaccagaacgcacaaaccaaacacaaacaaggcagttctacagcaaaccaaaacagcaaaacagagaacaaaaacaacaacaaccacacacaccaccagaattgaaaaaaacaggaaattataagcaaaaaaacgaaacaacaagagacacacaaaaatgcacacaagacaacaaacatacaccacagcaaacggagacaaagaacaggcccaaaggcgaaacgacaacaacgggacaccagagccacccaacaagacaggaacaaacacaccacagaagagacaacaccgcacaaaaaaaagaagaaacaagacaaaaaaaacagaaaaacgaaaaaaaaaaaaaaaaacaaaaaaaaaagagaagaacagaaaaaaaacaggagaaacaaaaaaagaagagaaagaaaaaaacagaaaacaaaaaagaaaagaacaaaaaaaagacaaaaacaaaacaagcagaaccaaccaagaacaaagtagcaacacaacacaaaacaaaacgaaaagaaaa

SEQ ID NO: 617991 - DNA, 246 bp, Homo sapiens
  misc_feature (97)..(97): n is a, c, g, or t
cgggtttttttccaaaggggtgggggtggcccccccccggggcctttggttaacccaaaatttggggcccttgggggccgggttcggcaaaaggganaaaagggcaaagcccgggttcggggggttttttcccctttgcagggggccttgggcccccctttccttccaagcccccttttggaggtgcccccccccccgcccggggtggggtttgtttttggggttttaaaggcccttttttttcca

SEQ ID NO: 617992 - DNA, 298 bp, Homo sapiens
acgttaagaataaaagtttagaaagattattggttatttagcttgctggtgaagtgagggttgacaacatatctaaaggtgtatagtatgttccaaattctttctgattataaagtacaatgagcctaacaatgtttcacaaattgtgcaaggtctcctaatagctatttttcaatagcaatatgctgtccagccctgtaaacaatttttgactgtcttgcagaatagctgaccaggcctttcaatctacaacagcatgaggttgctttaccaagttccctagtatgagctgcttttt

SEQ ID NO: 617993 - DNA, 198 bp, Homo sapiens
ccgccttttgggcccaaaatttgggttttgggttttttaaaaaaaagggtttttttattgccccccccgggggggaattaaaacccccaaggggggttttttttttccgtttttggtttttaaaggggagcccccccccttttttcctttgggggcctgggggatttttttttttttccccctccccgggttttttga

SEQ ID NO: 617994 - DNA, 162 bp, Homo sapiens
ggagtcacataacaccaggtggaaaagatttgttactaattccagggaagaaccattcacatagtgttggttaaatggtcgcctgcgttcacacttcagtgcctgtagaccagagccctggaaacaaaagggttacttgtttccccaccatcgcctttacca

SEQ ID NO: 617995 - DNA, 104 bp, Homo sapiens
tagaagcagcagcaggattactctgcttcctcgaccacatcctgtgacgaggaaccgatcgtgaatagggtgctgtccgctgccctgctcctgtgtcgtaacac

SEQ ID NO: 617996 - DNA, 382 bp, Homo sapiens
  misc_feature (11)..(11): n is a, c, g, or t
gctcgtggggnatggaacaggaactgacatgatcaaagttacagtacagtaggaacagaggcagccagccaatttggcacagttaactgcaagtacgtcaagccattcactcttctcgaacccgggcatgccaactgtccagcacagcaccttaaaaagcagaggcacaaacgtaggatggttggaccatagggcgggggggtgcgggattttttataagaaatgccatcttaaaaaatacggggtggtaaaatgtggccaggtaacagactgacaggtttttttttttcaccaccaaaggttcatttgttgcaaccatgacaggtcagcatcataagggcatcctcgtgtcccgagagacttctcatcaaaatgtgccccg

SEQ ID NO: 617997 - DNA, 193 bp, Homo sapiens
tcaaaacgtatcagaacctcccgggttcagcaattctcctgcctcagcctcctgagtagctgggactacaggcccgtgccaccacgcccagctaatttttgtatttttagtagagacaaggtttcaccgatgttggccagtgagggtctcgattctcgttgaccctcacgatcctgccctgcctcggtggtac

SEQ ID NO: 617998 - DNA, 317 bp, Homo sapiens
agaagaccaagcagcagcagcagcagcagcagcagcaccttccgcagcagcaacagcagcaacaacagcagcaacaacagcagcaacagcagcacattaaagggcttacatttttctgcttcaccattaaccattgattgctattttttcctttggcagttagctaggtttctggttccccacatagggttttcacattagagtaggtgccttttggagatagttgcagtgtttatagggtagtttttggagatctaggtattttgcatttgctatttggtctgcccactggatatattccgggttatggtaatggt

SEQ ID NO: 617999 - DNA, 927 bp, Homo sapiens
cctgacatcatcgcagatgtgtaatccataagcattctgcgaatggaaagccatcacaaacggatgattgaactgaatcgccagatgaatcagcaccgttgttcgcctatgttttataatatttgcccatggtagaaaccgggcgcagaaccaacgttgaccaatatgggcacacgtaaacattcaaaaacttgagtgaaagtcacccagcgcatttggctgctcacgacaatcacctctatctctcaaataaaaccctttaaggcgaaaaataagcgacacacggttgtcacacaccgataaagcacggcccaacccattactcggccgaacgtactactgctggtaagcacaaagcttgcccgcaaatacatacgctccgcggtactaattccacttcccaagcatcgtcgtacatgaaaaacggttcccacgatttgggccctcacgtgggacacaacaccgcgttgttaaccacaggggggtgaatacagcattaatcctcaataattcacacaagcatatacacacgatctttttcaactggccccaataacgagaaaactctccacggaacttgcagccacttctcaagtaagacggcggcacacaacagtacttggtgcaattacaaagggcctggaactacaaaaccttggctcacccaaagtattatactatacacgacggtctatcatacaagacacggccccggtacattattcccaagcctgataacaggacaccgtggcattatataagtctacaaatcggactgctaacttgctatgacaccgtgcccatacaacaaagtgtcttataacagaaattgcctcagtcgggtaactatattcacaaagggaggaaataattccagatgaataacgtatcacaccatatacaagataccttatgtaatcccggaaa

SEQ ID NO: 618000 - DNA, 488 bp, Homo sapiens
  misc_feature (185)..(185): n is a, c, g, or t
  misc_feature (479)..(480): n is a, c, g, or t
gtgcccttccagcagctcggccgttccccctcatgctggaaatctaatgtcagcccaggttgctatatgacaccctgtggagctgggtttccccagggcagattaatccaagaaagggaagatgtgaccctctcaagggaggttggggctgggaaggggtgggtagagagagatttgttaaaggntacaaaaattacttagaaggcataagttctaatgttctacagcactgtagaatgactgtagttcaacaataaattacatcatttcaagtagctagaaggaagatacagaatgctcccaacatggagaaaccccatctccactaaaaatacaaaaattagctgggcttggtggcatgcacctgtagtcctagctactcgggaggctcaggtgggagaatctcttgaacccaggtggtggaggttgcagtgagctgtggtcatgccactgtactgcagcctgggcgacagtgaaannctatctca

SEQ ID NO: 618001 - DNA, 312 bp, Homo sapiens
atattttacgttccttacaacgttctgcacagttgccgacttatgacgggtttcctactagagaatatcgagggaaacgggaattttgctttcttgacatcagatcagatcgtcattgctgtttcctgtatcaaaatatttttcaagaacagggatgcacatctcttcaagaaaaagtatgttagaatttgctgtgaggtttttgaaatgtctgaatacggatggcaacagaaatataaagatattttgggattttcagaaacgtaggctgaccctgtattggtacttacaatgaatattccagggcttttt

SEQ ID NO: 618002 - DNA, 299 bp, Homo sapiens
  misc_feature (105)..(105): n is a, c, g, or t
  misc_feature (109)..(109): n is a, c, g, or t
aagccccccaacaaggccgaggggttttggaggcattgttatttgggggaccccagggggcctgttcaaaaaaggtgtcagccacaaaaaaagaggttttagtcntggnttttaccctcctttgaaaaaagttggggcttgctttgacggtttccattcccgtttgcaggcagccaggagggcaggaagcccttgttttgtgttgccatcctgcctccctcttccagcctcagggcattggggcttgggtgggagtcaacgccttcccctttggattcaaataaaacccagtgccctca

SEQ ID NO: 618003 - DNA, 277 bp, Homo sapiens
ccgttctctccgggtcttagaaaaatcgcagtcagtcagtcgaggcgagtagagaatgccagcaagcaggtcgaatgtgtatgtgggttttctgtgagagataagtagggaactagggtctcacattcacatggtcagactatctgcctacacttgagatgtgggaatggggtaacttattagaataaatcaggtaaatgtaccataataaatatgtacattctcttcaaaaaaatcaaatacttgagatcatatctgaaagcaggcccagtagtgg

SEQ ID NO: 618004 - DNA, 130 bp, Homo sapiens
tcataacaccccctgccatcaccccatcaccaaacgcccctcttcgtctgctccgtcctcattacagcagtcctactatctcatagtacactcctccaacgatcatagtacactcctccacgtcctagat

SEQ ID NO: 618005 - DNA, 94 bp, Homo sapiens
tcaagcttctaacgatgtacggggacatgctttatgtttctaccctttactcaggctatcatacaataaaaagtattgcctgttttaataaaaa

SEQ ID NO: 618006 - DNA, 1115 bp, Homo sapiens
gcctcgatgcgcacagatggtgcgcatcctgttactgggcgaggcccacgtggggcacatgacttcgcctgatcctgtccctgggtgggcgagtgtacgttccccgatgaggtccctccccgcgcgggagcgagatctaccagtcccgcgcgggacggtcagcccgggaaaagcgtgcccactcacagtcagtggaactactcaagaataccggaagctaggactggacgatggacgctgctgtggagtgagatcgcatcaacggcacaatcgatggatgtagtgttggtgtaatgaaccgattctacttgcatgcgagcgccactcgaatttgatgaaaggagttaactccaagcttaaatgcagtgagtacactcactatgcgcttgaaatggcggctgcgacctccacagcgatggaggcgctcaaaggatagcaccaatcgatcacgtagctggagacaaacgaagctccgatgaccgtggcccagtcgcggcgaagcgtcaccatggggaggattccggtgacgtcatcctccgtcgagtgcagtaccaacttgtgtccccggacgtaaatggtaataagcccgtgtcagtggttgagcttcgttacgggaccaattgagacccataggaagaaatcacattgtcgagaagcttgattcctatcgtacgaccacaagaacgggctcggtcactggaagtcccgacaacaagagcactacatgtcgtaaatgaaacccatgaaatgcggcccaaagtccaagtctaacagagtgctccacgtatgacgaaccgtcaggatcggcagtgacggtatgccaattcattccagaagacatcgatcaaaatcatggaacccttgggaacaccagagcggcgacaggatgagcgcataggaagcttcaacagcaatgttgcacgtacaagacaaggccgtgccctgtgagtggcgaacagaccatgcgagacgcagcgagggacccatcgcagagacccaggaaggaacggatggagcacagacacctgaaggccagcagtaagggccggggggagcaagcgaggaagggccaaaagctaaggagcagaaactagatacactggacaccaccgaac

SEQ ID NO: 618007 - DNA, 770 bp, Homo sapiens
gtacgcaggccgcctgggcgtgggcgcggcacccacgtcgtgatctacgacgccagcgaccagggcctctactccgccccgcgcgtctggtggatgctctgcgccttcggccaccacgccgtgtcactgcttgatggcggcctcctgccactggctgcgccagaacctcccgcttcagctccgtgcaagatgccaacctgctcccgccgatgttccgcgctcagctcgaccccgccttcatcaagaccttacgaggacatcaatggatgaacctggaatcccgggcgcttccaggtggtggactcccgaggccactggcaaggtcccggcggcaccgagccccgagccccgaaaacgctggagtacagttggcgcaatctcgggttcaccagaacctccgcctccccgggttcaagtgattctcctgcccttaatgcctccccgagtagctgggattacaggcattgaaccttggcccacttcccaggttccgtgaacatcccctttcacagacttcctgagccagtgaggggctggagaagagccctgagggagatccgccatcttgttccagcgaccacgacaagttgcaccctgtctaaagccactggtggccacgtgtgggcttctgggcgtcaccagccttgcaatgtggcacttagggggcctaccctctgcggcaaaccagaatgttgcccaatctacgatggctccttggggttggcgttggtaccattgcgccgccctggcccggaggatgtcatcttcag

SEQ ID NO: 618008 - DNA, 182 bp, Homo sapiens
cacaaacaggcttaggtagatctaccacctaaacctaccggagtagctgggactacaggtacatgccaccacaccagctaatttttttgtatattttaataagagtacgaggtatttgccatagttcctagaggtatggtctcaacacacctgtagctcaaagtgactctgcccactctcac

SEQ ID NO: 618009 - DNA, 306 bp, Homo sapiens
tcggaacgtgtatccttatgcgctgtagagcgtaagaacaaagaatcacaatgggtggtccagattcttccattgactgacaggcctctccaggttagaggcatttacatggtgaagggggcctgtccgggcagaacaatggcatgggacccggtccagtgtttggcttctcctctaaagagctactatttgccccagtgtgggggtggtggtcctttatctaagtcgtactcagccagctcatcatcatcaagcgtcctgtcatcctctgggtcaccatcctccaggggataacacgttcgcgag

SEQ ID NO: 618010 - DNA, 269 bp, Homo sapiens
tctgtgctgaggtgatctagaggatcccgtggctcatgtgatcctccccccgagatgcagaggatgctatttatgacagaaaagggaaaacaagtgggacgcggtggctccttgcctgtaattccaacattccgggagaccgaggtgggaggactgctagagcccaggagttcaagaccagtctgggcctgtctctacaaaaaattaaaaaatcatcggggtatggtggcatgcgccggtggtctcagctgctcgggaggctgaggagg

SEQ ID NO: 618011 - DNA, 1822 bp, Homo sapiens
  misc_feature (146)..(146): n is a, c, g, or t
  misc_feature (401)..(401): n is a, c, g, or t
gacgggatttcaccatgttagccaggatggtcttgatctcctgacctcatgatctgcccacctcggctcccaaagtgctgggcttacaggcgtgagccaccgtgcccggccaaaaataacttttaaaaacatgagtatagcatacncacacacaaaagtccacaaatcctaagtgtaccacttgatgaatgatcccaacgtgagcacacctctggattaccacctggatcaagaaataggacatcacagcagctggcagcttccaaggagaagctctggaaagttctgcctgtctcagcacctggctggatcggaaacgagttttctttaaccagatttttaatgactgacttatgtggacaaatcataactgaatgaatcacctcctttgtgattttttngggtactttatttgctattataaatgatgctgtaataagcacccttgaagaaatcttcatatctgcctctcctgtgtagcaggtcacagtgcctgggtttggttctagccctcatttgtgaactgtgtgactcaccatgccttttttctttctgtaagacaggaataatggtaagaatttaaatgggggtaatatggagcgcgtttagttcagagcctggtgcatacaagcactcaataagtactggcgattattagacctttagattaatttattagaagttggatttctggtgaaagggtttgagtgtttttgaggctttggcacagaatacccagctggtcccagaaaggtggttcccatttacctgcccgaaggtaattcacccttactgatactgagtactgttttctaaaagaacattaaaaattggataggttaaaaacaggtgaatacatttttttagttgcatttttttggttacccgtgagagtgaacatgttgccatgtgtttgctgacctcctaaatggtctatttgctcctacctttgtaccccaaaagtctgctctcaagatggtagccagaatgatcctttttgagacataagtcaaaatttcactcttctccttaaagctctgcaatggttctcaggttaaaagccaaagtcctgttcaaggcctccagggtcctcaccacttggtcccttgctctttctgttctagccaacttggccttctcctgcccctccgccgcaccatggcaatttcccctgctctgtgtggtcaactacctgaatctgttcaaagctttgctcaaatgtctccttcctgatgagacctccccagcccctgagctccccatgcctcactcctgatcgccttacttaacccttctttttcttttttgccagtagtacttatcaccgtctaaaatacttcataatttacttgtttattgtttgcccctctccaatagaatgtaagctccttggggcagggacctttgtcctttgtcttgttcactgctgtgtcccatgtgtaaacttgtctggcacagaagaggtgctcgataaatatttgttgagtgaatgaatggtaaattttctgttcatattctttgactattttctattgtaatgttcatctttttagtattggtttataagatgtatatttagcaccttttcatatatcactctttgtcacatattatgcaactaatttgtcatttccatcaatttttaaaatactttcttgatgcttcatttttaagctgtcagattattaatcttttctttatggtcttggactttattgttgcataaccgctgccttcaccaggaacatataaattttcaattaaatgttcttctgagattttatgatttcactttttatattaaactcttcattttgtcttc

SEQ ID NO: 618012 - DNA, 233 bp, Homo sapiens
gtagctttgcttatacaaagagatgacttttatacagctttggctgggactctctctgagtggaggtgtttcttggaaagacatcaaaactcaagtaatacaaaaatcattccatgaaatttgaatgtaagccaattgccacttcagtcatatgttgagagctctattttactttattactgagcaaatctttgctgggggggacaggcatatcttccaagtaagggaatggt

SEQ ID NO: 618013 - DNA, 306 bp, Homo sapiens
ttaattagccagatgtagcaggcatagtggaggcgcctgtaatcccagctacttgggagactgagtcaagagaatcacttgaacctgggaggcagaggttgcaatgagccaagacctcaccactgcactccagcctgggtgacagagcgagactccatctcaaaaaaaaaagaaagacaattagccagatgtgggggtatgtgcctgtagtcccagctgctcaggaggctaaggtgggaggcacatttgagctaggaagttcaggcggttgagccatgatggtgccgatgcgcgattagggtaagt

SEQ ID NO: 618014 - DNA, 394 bp, Homo sapiens
  misc_feature (19)..(19): n is a, c, g, or t
  misc_feature (37)..(37): n is a, c, g, or t
  misc_feature (58)..(58): n is a, c, g, or t
  misc_feature (214)..(214): n is a, c, g, or t
  misc_feature (250)..(250): n is a, c, g, or t
  misc_feature (274)..(274): n is a, c, g, or t
gccagcaggtagcaaagtnacgccgagggcctgagtnctccagtagccaccgcatctngagaaccagcggttaccatggaggggatcagtatatacacttcagataactacaccgaggaaatgggctcaggggactatgactccatgaaggaaccctgttttccgtgaagaaaatgctaatttcaataaaatcttcctcgcccaccatctactncatcatcttcttaactgcgcattgtgggcaatggantggtcatcccgtcatgggttaccngaagaaacttagaagcatgacggacaaggacaggctgccctttcagttgccgacccctttttgtcataggctctcttctgggcagttgatgccgtagcaaactggtactttgggactccc

SEQ ID NO: 618015 - DNA, 350 bp, Homo sapiens
  misc_feature (19)..(19): n is a, c, g, or t
  misc_feature (37)..(37): n is a, c, g, or t
  misc_feature (58)..(58): n is a, c, g, or t
  misc_feature (214)..(214): n is a, c, g, or t
gccagcaggtagcaaagtnacgccgagggcctgagtnctccagtagccaccgcatctngagaaccagcggttaccatggaggggatcagtatatacacttcagataactacaccgaggaaatgggctcaggggactatgactccatgaaggaaccctgttttccgtgaagaaaatgctaatttcaataaaatcttcctcgcccaccatctactncatcatcttcttaactgcgcattgtgggcaatgagttgggacacccggcacagggtaccccacgagactcagaagcactacgcgcacattcacactcacccctcaatggcgcactctctttgtcacacgcgtcctc

SEQ ID NO: 618016 - DNA, 474 bp, Homo sapiens
  misc_feature (75)..(75): n is a, c, g, or t
  misc_feature (91)..(91): n is a, c, g, or t
  misc_feature (114)..(114): n is a, c, g, or t
  misc_feature (145)..(145): n is a, c, g, or t
  misc_feature (158)..(158): n is a, c, g, or t
  misc_feature (284)..(284): n is a, c, g, or t
  misc_feature (292)..(292): n is a, c, g, or t
ttgtaatccctaggcttctcaagaggttaagcagaagaatcgctttgagccccagaaggcggagattgcatgtanccaagatcgtgtcaantgcactccagcctgggtgacaanagtgagactccgtctccaaaaaaaaaaaaanaagaatttattancctggttggttaataaattgtgtggtccctgccgggcgtggcggctcacgcctgtaatcccagcactttgggaggccgaggcgggcagatcacgaggtcaggagatcgagaccatcctggctaacncggtgaanccccgtctctactaaaaatacaaaaaattagccaggcgtggtggcgggcacctgtagttccagctacttgggaggctgaggcaggagaatggcgtgaacccaggaggcggagcttgcagtgagccgagattgtgccactgcactccagcctgggccacggccacagagcgagactctgtctc

SEQ ID NO: 618017 - DNA, 193 bp, Homo sapiens
tacatagcgcctgaatcgctacgtggctcttatggcatatagatgcgtatgtcaccttccccgttgcgcagcgaagacatagagcaggccccactgaccccgcagatggcccggtgtaggcgagcttccctcatttctctctgcaatctagaaatgactcctccattgaaataactcctccccaccccaacaa

SEQ ID NO: 618018 - DNA, 679 bp, Homo sapiens
  misc_feature (243)..(243): n is a, c, g, or t
  misc_feature (406)..(406): n is a, c, g, or t
  misc_feature (417)..(417): n is a, c, g, or t
  misc_feature (437)..(437): n is a, c, g, or t
  misc_feature (440)..(440): n is a, c, g, or t
  misc_feature (444)..(444): n is a, c, g, or t
  misc_feature (451)..(451): n is a, c, g, or t
  misc_feature (457)..(457): n is a, c, g, or t
  misc_feature (469)..(469): n is a, c, g, or t
  misc_feature (527)..(527): n is a, c, g, or t
  misc_feature (529)..(529): n is a, c, g, or t
  misc_feature (538)..(538): n is a, c, g, or t
  misc_feature (540)..(540): n is a, c, g, or t
  misc_feature (619)..(619): n is a, c, g, or t
ctcagtgctaggtcgaggcctgggtggtggcatggcggcgcccatgtacccggtccgtgccgcaaagcgaacggcggcgcggcgcgggccccgcgggggttagaggtcaccgatgctgagggtcgcgtggaggacgctgagtttgattcggacccgggcagttacccaggtcctagtacccgggctgccgggcggtgggagcgccaagtttcctttcaaccagtggggccggcagcctcgaangtctcctcctccaggccgcgcgcggatatgtcgtccggataaccagcccagtctaggctggatgatgacccagctcgcttctacgctgcgtcaaagagctagccagaatgtcccgtggaacttgagaaggttgatgagtgtcgtgaaaagactcttgtcgttnggaaatggcanagcaagaaggagatgctaanaantcangcaagancagttnatgaggaagatngttgcaaacccagaggacaccagatccctggaggctcgaattattgccttgtctgtcnangatccgcangntatgaagaacacttggagaaacatcgaaaggacgaagcccacaaacgctatctgctaatgagcattgaccagaggaaanagatgctcaaaaacctccgtaacaccgaactatgatgtctttgagaagatatgctggggg

SEQ ID NO: 618019 - DNA, 94 bp, Homo sapiens
ttatgtcatacaggttacacgtatgctatttacttttaactaaaagacgaggccctttgacgtatagcaaataaatgtgcaatactgataagtt

SEQ ID NO: 618020 - DNA, 191 bp, Homo sapiens
  misc_feature (183)..(183): n is a, c, g, or t
  misc_feature (187)..(187): n is a, c, g, or t
ggttttaaggggaatagggcccctacgggaaacataacctaataaaatttttggggggggagggggccgaaaaaacataaaaagggaccccaaagggggccccccctttaaaactttacgggaaaaaaccccaaacttgccgaaaaagagggggaacgggccggggctcgggggcttgagagngggncccg

SEQ ID NO: 618021 - DNA, 132 bp, Homo sapiens
tatcagctcggtccatgtatgggtctcacgcagacacacccacagaaggacactactgtgcacgcgtgcgtgcgcacacacacacacgagttcataatgtggtgatgtccctaagttaagcaaaatgcttct

SEQ ID NO: 618022 - DNA, 104 bp, Homo sapiens
ctcctcttcatcttcctcctcctcctcctcctcgtcttcttcctccttgctcgttcctcttcttcttcttcctcctcatcttcctcctcgtcttgcgggggttg

SEQ ID NO: 618023 - DNA, 474 bp, Homo sapiens
  misc_feature (1)..(1): n is a, c, g, or t
  misc_feature (204)..(204): n is a, c, g, or t
  misc_feature (307)..(307): n is a, c, g, or t
  misc_feature (366)..(366): n is a, c, g, or t
  misc_feature (417)..(417): n is a, c, g, or t
  misc_feature (426)..(426): n is a, c, g, or t
  misc_feature (456)..(456): n is a, c, g, or t
  misc_feature (461)..(461): n is a, c, g, or t
ntaattacagtttttaaagtccgaagtctgacacaggtctcactgaactaacattatcaacaaagttttattcctttctggatgtctaggggagaaccttttttttttaatttttatttttaaatcttttccagaagctgctagagaccacccacatgccttggcttttggtcccattccattttgaaagcctgcaatggcggntctaattccttctcacatcaaatcattccagtctcttttctgcttccctttcatttttaaggacccttgtgattactttggtcactaagaaacacaccagggntaattctccatttaaatgtcatctcattaggcaaccttgaattccatgcttcaaccctnaattcccctttggccacgtaagtttaacatatttcacacggtctgggaganggaccgggncgtggggtgtgtttgggagggagaggggtngggcnttcttctggccta

SEQ ID NO: 618024 - DNA, 453 bp, Homo sapiens
aaacatgggctgtgcatctgctccgcgctgatggacaggcccaggtcctcctctttgccattccctggctctccaatagtatcacatccttaaagaccagcccaacatacacagaggtgacggtattacatgaaaacacttacgttacacctaatcttagttgtagtatggttattcttacaacccatagatgcctctaagactcaagtaccaatggaacatgctgtaaggaagtgggaagtaaggggaaaagcagtctacttctgtaccattcctgatttaactgtaaacacgctcaaatcctctggtcagagtttacacttcactggaaaggtaacaagcagatagtgcctgctggaaatcttacatacattagtaagatgcatgtaactgggtaaagaaacatatcggggacacagttcctggcatgtagaaagcactcagtaattaata

SEQ ID NO: 618025 - DNA, 882 bp, Homo sapiens
ccttttcttcgggggttctgcccaaggataggcgtgggggcgggacccccccggaagggagcccgcccaagggccgggtgcccccacgccccccacctttgttttacactcccgctgattgtagggggcccgcggtgtgtgtgtgtgccacgccccccattttcttgggctctgttccacatgggggagagaaatatttattccccacaccaccttagataaatgtggggaaccaccaccaatggcttataggagtcccccgtgtgtcgtgggggtaaggctacaagaagaaataaaccacagagagatgtgggaaaatatatgtgcacgagcacattttctccgcagaggaggtgttgatgaaagcccccccctgatatattctcctgggtcccaatctgttctccacgccgaaggccacatttgggaatattcacacaataacccacatctgaacaaataagtttggagagtataagggagacttcataaatatacccgagtttcctcttatgaagggccggtttataacactatgccccactgcggtgtatacacgaggaaccggatgtgggatgttccctcttattatttctcttgtttatattgtgaagccctctggtgtacacccccaccactctcggaaaacccctggagaatattgtttttcacggtgttgagaaccccttcacatgtttctttttataagcccaaggaatcacataatgcctcttttatataaaaagttcactagtgctggattttccggggccaaattttcaggctccctttttataaaccggggaagtttttttttgttttaaaaacaccctggagaaaaattttccccaaataaaaaataaaagaataacaaaaaaaagg

SEQ ID NO: 618026 - DNA, 870 bp, Homo sapiens
tgctcccctacatgtgcctatgtgctctcattgttcagctcctacttataagggagaacatgacatgttggtttctgcttctgcgtagttgctgaggataacagctcccagctctatccatttcctggcaaaggacataatatcattcctttttatggctgcattgtattccatggtgtgtgtgtgccacattttctttacccagtctgctattcatgggcatttgggttgattccatgtctttgctgttgtgaatggtgctgcagtgaacatatatgtgcatgtttctttataacggaatgatttatgttcctttggtgtatgccaagtaatgggattgctgggtcaaatggttttctgcctttagatctttgaggaattgccacactgtcttccacaatgcttgaacaaatttacactcccaccagcagtgtacacagagttactctttctctgcaacctcaccagcatctgctgttctggactttttttttttcctgaatgtggcatgagatgatacctcatgtgtgggttggcatggcttgctctaataactcaggatgtcgaggtccccatggtgttgggttggcccatgaattgttgtcctgttgagaccctggctggtcggggtcatctgccccctttgagtgggggtgccgctccttgcacactgtgttgagtcctgttggccctgtgttttagcccttgccatgtgggttattgcgagatttccactttgaggcgtgtagctcgggaggtttggcgccacacctggtgcgcccccttctcactggtgtcacgctggggcccaacatgcccggtctgagcccgctcgtgggggcccccggtgcttctgttgtgctgtctcat

SEQ ID NO: 618027 - DNA, 829 bp, Homo sapiens
tggaaggagctgcaaaatgaaaaaaaaaaaaaggaatcatgtcatcttgacccagctgactggaaatttcaatactgtcttttaactgttgtactccagccagccttgggcaacagagtctctctctgtcacccacgctggagtgcagtgggcaggatctcaactcattggcaacctccgcctcccaaggttcaagcgattctcctgcctcagcctcccgagtagctgggactacaggcacatgccaccatgccaccatgcctggctgatttggtattttgggtaaagctgggttggccaggctggtctgtgaactcctgacctcaagtgattcacctgcctgggcctcccaaggtcctggaattgcaggcgtgagctaccgtgcccagttggttttacatcttaaaaacgttagagaacagaacgaatatgcaacagaaactgtattgtagcctgcaaagcctacaatgtttactctctgtctgggagtcggtctcccctgtctagactgtcagcaagcgcgtacacggcatacagacacagggtacgtgcccaactgcccttctcctgcaaggggattctagggtgccttgccacactgaccatatgtctccttaaccacctctacatgccttcaactggtaccccactgatgtattcagacttcctgacctattttttttcaccgtcggcttaaaagtgacaaacctgttccagggctaaccttgggaacatactattccaggccagatctccaaaaaaggaatagcctatgcaacacaatgtaggccacatagtgccaacaactcaccatcactgacatgccgag

SEQ ID NO: 618028 - DNA, 961 bp, Homo sapiens
gtattgaacgactctcgaggttaccttggttggagctatcctatgtgtccgacaccagcatctcagcatcaacatgaagaacaaggacatctggttctatgctgggtgcatctggactacggaagctaggtaactagggagcgtgcgcgagactgggaattcagatcttggtgtgctttgttgaatagagtggcgctgtggcttgacagaggtctgtttgctgcctgtgcgagctgatacactcctcctgctgtggtaagtgcgtgctttacgttctatagctgaatgcactcgcactctgctgctcactgtatagaagtcttataggagggcagataggcgggaggatgcagagagtcccatgccgtctgagcacggaaaggctgactcgacagtaggtactgagggtggcagagcccgcgcgtcgccccgcgccgaccgtggtgctgacgttcgttgtaacgcagtgatccgcctagtatatcaggagtcaatgccccccaaattacatggcgagatatgacagattaagatataacataagatcaatacaggactatactcaaccacataccacacatccgtggggcgggtcaccaaactcagaaattctttcgctaggagcccttccgagcaaaagcggtgccgaatggttagataggtgttctctgtgcttggtccgtttcttatagtcctcagtaaagaaggcgtcaggaatgatgggtattctggtgaaggttatgttagaagcaaagagttcaaaagtaatagttttggtaaagagacaactccaagtgtgatgggtaaaaaagaaggtgctggtacaagagcttggtacttttgtcccatttttactatagattggaaaaccaatcttgagtattggtttagctttacataaggcagaatattctttgtaggaagaaaatattgcaagggggatatatgagaaaataacaag

SEQ ID NO: 618029 - DNA, 158 bp, Homo sapiens
acttcccctctcaactgaccctgctcactctgggaatggtcctgttgtaagagccatcacttagaacccacgtcctcagaaattatcccaaaggctttaggggcagagaaggaatatgtgtatctattagaagtgacatggggaagaaaaggaggaca

SEQ ID NO: 618030 - DNA, 239 bp, Homo sapiens
cccggacctctttcgaaaggcacatgtatttatgggttactgaaattattttttagagttgtgtgggattttgtatttgttttggttttttctgtaagaatgctgaatacatgctccattctcttatggcttgtagggtttctgctgaatgacccactattagcctaatgggttttcctatgtaggccacctgtcctttctctctagtggcctataatattttttctttcatgttgcct

SEQ ID NO: 618031 - DNA, 241 bp, Homo sapiens
agatctcgtcttttttggatatcatttcgatggaaagttagaaatgaaagaaccaaggaaaaagaaaaatacatagagaaaataaacaaatgcttgccaaaaattaagtttaaatacttcgtctacaaaaaacgcaaaatgtcctgtcacattagttgtcaaacgttgaactgctaaaaaacctgcaacatttaccagtcccgcaagtcaaaagaaattagagctgatcctctagagtcga

SEQ ID NO: 618032 - DNA, 248 bp, Homo sapiens
gcactgtagccgctactgtacaattccagcatggactggagctcaacactgaattctaatgctatgcacttgatgtattctttctccttggccttttcatagcaggtgtgaacaactttgatgcttgaggaggaatgaaactgtgcaaattagactggggactgagcttcatgaccccatgcagagttggatgtgatgtcctgtagtttcacatgctcaccagcttgcatgaccttgagcaatgtaga

SEQ ID NO: 618033 - DNA, 89 bp, Homo sapiens
tgggccagtttttttttaatttgggtaaaggctcggccataaactttcatagggggtgccaaggggtcaccggccacactcgcaccagg

SEQ ID NO: 618034 - DNA, 139 bp, Homo sapiens
gtgagtaggtatataccaatggtgagcaaagtcccagccttgatgagggtagctgtggtggctctcaattgagatgtgctgaggatttatcagagtgaagagtgggaactaccacagcttcactctgataaatcctcag

SEQ ID NO: 618035 - DNA, 322 bp, Homo sapiens
gctcgacggtatctcgttctacatcttcgagtccaacagctacatcatcgacgtgtaccgcggcgataccccggccactcgcaacctgatcgactttgcggcgttcgtggcgattttcccgcacctgattgccggccccgtgttgcgctttcggacctggccgaccagttcaacaaccgcacccacaccctcgataaattctccgagggctgcacgcggttcatgcagggtttcatcaagaaggtgttcatcgccgacaccctggcggtggtcgccgacattgcttcgccctgcaaaaccctacgacgggtgacgcctggct

SEQ ID NO: 618036 - DNA, 548 bp, Homo sapiens
tgtccggaccttcctgattcctgaggccatgacctttgaggaagctgctgccttgctcgtaaattacattacagcctacatggtcctctttgacttcggcaaccatacagccatggccacagcagatcattggtacacatggcatgcagggggtgtgggatatggcatgccgtgcagcatgtgccgatacagatggagaaatgtgacagtgttcggaacggcctcggccagcaagcacgcaggcaacatgcacaggcagcacatgtgggtccacaaccatcacccatcagcactcatcacacacgcacatgcactcacagatgagcattgaggcatcgcaagcaagcattatcacccatcaacagggcagtggcaccatatgatcagtgtgacaccaatcatgggatgaggatcaagactacgctgaccaaggagcataacaaacacatccgtagaaacacccagtgggacaacaagatcagatcaaccatcatggacactggaccaagccgtgacatgcacgggacccacaaaaacaggaaaccatg

SEQ ID NO: 618037 - DNA, 386 bp, Homo sapiens
ttgggagtagaaaagtgagagggcttaatgcttgccttaatttctgttaactctttattttgttttttggagacggggtctcactttgtagcccaggctggatggagtgcagtggtgcgttctgggctcactgcaacctctgcctcctaggctcgagcgattcgcccgcctcagtctctgaagtagctgggaccacacacacgcgtgcaccaccacaccaggataatttttgtattgttgtaggggatttcgccgtgttgcccgggctggtcttgaactcctgggctcaagtggtctgcccacgtcagtctcccaaggtgctgagattataggcgtgagccaccgcacctgcctggtttctttacttaaaaaaaaaaagtcgacgc

SEQ ID NO: 618038 - DNA, 808 bp, Homo sapiens
  misc_feature (150)..(150): n is a, c, g, or t
  misc_feature (168)..(168): n is a, c, g, or t
  misc_feature (170)..(170): n is a, c, g, or t
  misc_feature (174)..(174): n is a, c, g, or t
  misc_feature (176)..(176): n is a, c, g, or t
  misc_feature (179)..(179): n is a, c, g, or t
ctcttatctctgcctccttgtattgtatgaataaccctgtgtatcacctcttagaactgattattaagctaatagactgcagcggatacgctgccacgtgtgtatatatatgacgttgtacattgcacatacccttggatccccacagtntggtcctcctcccagctncntttnanttncgagttaacaagttggtgacctgcacaaagcgagacacagctatttaatctcttgccagatatcgcccctcttggtgcgatgctgtacaggtctctgtaaaaagtccttgctgtctcagccagccaatcaacttatagttatcctctctgggttccgtcgtacgtttctttctaatcgaggtgtgaacaagttctaggttcagtctgaagttctgatgaagaaacacaatgagattgctcaggtgataaaatctgcatattggtatttcaacaatgtagctaaaactgtgatgtaaattcctccttttgttccttatatggcttaatgaatatcattttattcagtatgaaatctgttatactatatggtccaacgtggtaagaactcaaggtcacatcgaaatcgtggacaccacaacaacagaacaaaaagcacaaccgtgggagcgcacggcgcccggcagacgccgcagcaaccagcgcaggggcccggtccccatccgaccgcaccgcggccacggggcccagcgaacaggggccacacccacggggccaaccaaaacaacggccgcgaccgccggcccgaacccgcggggcgcaggaaggacccgcacaccaggaagccaacc

SEQ ID NO: 618039 - DNA, 820 bp, Homo sapiens
  misc_feature (162)..(162): n is a, c, g, or t
  misc_feature (180)..(180): n is a, c, g, or t
  misc_feature (182)..(182): n is a, c, g, or t
  misc_feature (186)..(186): n is a, c, g, or t
  misc_feature (188)..(188): n is a, c, g, or t
  misc_feature (191)..(191): n is a, c, g, or t
gaatgacatcctgatctatttgtgttctccgggctcggtacgattcagcctgagatctcctctttgtaatgttgttcatacatctatttcgctgtgtgaactcggtctcgtgtgtatatatatgacgttgtacattgcacatacccttggatccccacagtntggtcctcctcccagctncntttnanttncgagttaacaagttggtgacctgcacaaagcgagacacagctatttaatctcttgccagatatcgcccctcttggtgcgatgctgtacaggtctctgtaaaaagtccttgctgtctcagccagccaatcaacttatagttatcctctctgggttccgtcgtacgtttctttctaatcgaggtgtgaacaagttctaggttcagtctgaagttctgatgaagaaacacaatgagattgctcaggtgataaaatctgcatattggtatttcaacaatgtagctaaaactgtgatgtaaattcctccttttgttccttatatggcttaatgaatatcattttattcagtatgaaatctgttatactatatggtccaacgtggtaagaactcaaggtcacatcgaaatcgtggacaccacaacaacagaacaaaaagcacaaccgtgggagcgcacggcgcccggcagacgccgcagcaaccagcgcaggggcccggtccccatccgaccgcaccgcggccacggggcccagcgaacaggggccacacccacggggccaaccaaaacaacggccgcgaccgccggcccgaacccgcggggcgcaggaaggacccgcacaccaggaagccaacc

SEQ ID NO: 618040 - DNA, 217 bp, Homo sapiens
ctgtcactgcacggtactctaaggatcctttttcttcattgctcaggggacagccataactggtcagatatgaggtgacccttagcgtctcagcagacactctgctggacacctctccaggagtcagacccaggaactttgcctgctggttgagcatgaacactagtacagtcacagggatccagattgtgccctggttcctcgattggttatacct

SEQ ID NO: 618041 - DNA, 415 bp, Homo sapiens
  misc_feature (368)..(368): n is a, c, g, or t
gttacccatattggctggcgaggatgttcagaaagaggccttttctgtggagtatttttggcagtactcatcaaagcacattaaaaccacatattctttttgtgtgtgtgtgttcccgagacggagtcttgctctgtcgcccaggctgtagtgcagtgttgagatctcagctcactacaacctccgcctcccgggttcaaacgattctcctgcctcagcctcccaggtagccgggattacaggtgcccaccaccatgcccagataattttttatatttttagtagagacggggttttaccatgttggccagactggtctcaaactcctgacctcatgatccgcctgcctcaacctcccaaactgctgngattacaggcgtgagccaccacacccggctgagttgttgattttttt

SEQ ID NO: 618042 - DNA, 320 bp, Homo sapiens
ccgcctcagactcccaaagtcctgggattatgggcatgagtcactgtgcccagccagacatatggcttggattaaccatcaaacaattatgtcccagggttatcagggacctcagcaagtcatctctgtcacctccctcatttctaaacaagctcacacctgaatgatcccagaaagatagtcttgggagaagatacttcataatatccctcggtaacaacatttcagtatctggtagtcaggaagttctttctaacatgtaatctacatcctttatgtggcaattaaaacacattccctctggtcctgtcctctatgga

SEQ ID NO: 618043 - DNA, 1059 bp, Homo sapiens
gggccttccccgcgcagagctccgaccgcgggcggcccagggcgggcgcgccgctgcatccccatcctcgtcgtcgcccggcacagcgcgagcgggcgagcggcgcgggcggccggagcgccgaggcccggccatggccaccaccagcaccacgggctccaccctgctgcagcccctcagcaacgccgtgcagctgcccatcgacccagcccaatgcatgatcattactcagcacgatcactagtttggcttgcgaaacttcactgatgggcatgtcccgcgaaggactgaagaactgacttcctcacagaggcgcattaggctgctaaggcatgccaagcttactggcacgtatcgcagtcacaactgtaacttcatggggatcctggcaggcccactttgctcttaccaaagactacattacttccattcgacggcagatcataccatatcacacaatctggtgcaacctggcccacgcagagacacagtatgaaagaacagagccatctccaaatactgcggctcgtccagaagctcttacctctgtgggctgtccttgtacattccacttgaaccatctgtacacacattacctgtgcgagttacaaccattgcttgcagccattttcaagctaccagcttcgtggccaacaacagcatcatctactcctggaaatatcccctccttataggcctgccacagaccccaacatactcactttctgcattggacgctacgccctgatgcccatgacttactgcctgcacgcctcacggcattcagacgcgtactgcgcgaaccactggcagacgctgacagtgcgcaccgtcaacttgtgcaagttggcgacacttcccacccgccttcgcgcagtgtcgacccggcttctccaggcagtgcttccgtgcacacgcgccgaacgtagtccacccagcctcttggcatcacaaagcgctgttgaagtacacgcacctccatacggtcccacgatccaagttccatctctcagacccttgcacgagagaataccaggacatatgttaagtgtctagcgc

SEQ ID NO: 618044 - DNA, 766 bp, Homo sapiens
gtattgtctctcgtgacctggggcaagcaatattctggtccaagtggttcctttgcggggcacggtttaacacctagaaaaggaaggaggaatggtcttccaagtaaggaaacccactggggaatcctttggccaagcacaagaagttaggaatacccgtccctccgaatttaagttatgacccccaggtttctgtcagctaagaccaagaaatccccggccagaagttgtgagaaaggcatttttcatagtatttcagggctggcatatctggtctctccctcgtgcccaaggacatcacacatgtagtgtgcatactaatgatccgctcgtttccatgatgtcgtcgcttcacagaccttaagtgccaggcttacctacactatgctgagtcctggcgtccgcacaaccacatgtatgtaaaggagtaggtaatgtacaattctcagtattcagtaatcctcacatatcaaagaagcattggatgacaatagcttggcatggaagtcataataagaattttttttcaattgaaataagccctgttccatacccagctttagtgatgtcagcggatgccttacttcaaatgtcaatagagcttcactttctgtatagtttgccatatgtccacatccttcttcttaaatgtaatagcctacatttctgccatccctcatcccagacttttcatgtgttctcgatgatgaacagttgtgaacattgttcactaatggtgaatggctctgatattgtcttacttaga

SEQ ID NO: 618045 - DNA, 437 bp, Homo sapiens
ctgcagcggtgaccgattacaggcagtctgccttgtcttcattggcctctgatattattgatcgcttggccgtccggatctactatgctgatgtatagcaggtctatcagagcgtgagttaggatgcttatgctacagggccttctgactactttgtggatcacgtgttgacattcgacagcacatatgaaatcactgtatagaattgcatgctatctgcagatgctaccgaatgctgtgccaccgccttcgtaggaacttgaaccatttagctggagcttcatgctactgcagatgcctacatatgttgtgagacttgttgacacatctatgcctatggacctgattcacagaatgtgctcgatactcctggtacacctagtagcgtgcatactacgtttgaacgtcccatgatcgatgtaggcctcacgtgcatg

SEQ ID NO: 618046 - DNA, 148 bp, Homo sapiens
tacacggggaccgtaccgtgtggaacgacggtactacttggtgcgtgtgcttgaatactttgtgactgacatcggtacgaactatgacgacgggtagggtgacacgtggcgcttggctgactgtgctggacgttagctggctatcgcg

SEQ ID NO: 618047 - DNA, 307 bp, Homo sapiens
  misc_feature (39)..(39): n is a, c, g, or t
  misc_feature (211)..(211): n is a, c, g, or t
  misc_feature (229)..(229): n is a, c, g, or t
  misc_feature (269)..(269): n is a, c, g, or t
  misc_feature (300)..(300): n is a, c, g, or t
tagtttcccaatgtccactttattccatataacactccnaccagatatcatttacatctgaggaaccgatggcccatgagactgatctatagtaccacactctaagaaatgcagtccaattttccacacttccaggcatccctagacaagtgcgtcacaatgcacaatgtggaaatataggcatcactactacattttacataaaagggangtatcaataaactttagnaagtagtaaattcacctgtcccttaaaatatgggtatgcnattgttacaaagccatagtaaatggtttatnaaatgtg

SEQ ID NO: 618048 - DNA, 433 bp, Homo sapiens
  misc_feature (215)..(215): n is a, c, g, or t
gtggggtgatctaggtgatccctttctcaccaccacatttacctgagtaatccctgtctctctcgtcacccacatttacctgactgatactgtctctctcgtaaaccacatcttaactggcaactgagagctcgctgctctagtgtccagcccgagttcccaagtcaaagaatcccatcagtctaagaacacacagtgaacacccgctgtgtgtncagcatctttccaggccctgagatacgacagtgaacaaaggggggcgacacttccgaggagaacaccctgagcaaacaagcagcatggctggcagcaacgggcacacaggggacaaagctgcagggcggaggggtggggagaacaggctggggtccactgagatgggccaagcacagaggaactccaaaaaggcaacgctggggcaaagagctgacaa

SEQ ID NO: 618049 - DNA, 396 bp, Homo sapiens
atcgtcggtagcgtgtgatgcaggcttttaggtgcgtcattatccgatcaggatatcagctgatttggcagcgtcttacgccagtctaacgtcatctgacacatgatattgcctcagaaatgcccacgggcaatcctgagattgcccgttaggtaactgacgtcggttgtcgctatacggcactgacgacaacggtgccaatttccggatggctaaagctttgcaatgtgatccagacgcagatctcgttgttcgccgttcgcctcaaccaccagatattccactttcttacgcattaacaaatcgttggcttcagcctccacgacttctccgctacgcatcttcagcgtcgaaaccaggtgatgctggcaggcgagctcgagattatcgtagtcc

SEQ ID NO: 618050 - DNA, 264 bp, Homo sapiens
aacgcgacttgcgcgctctgcggaccgaccgtgaagaaggccctgtcgcgggtcgaaggcgtgaagtcggttctgttcaaggaagccgacgccggctcgggcgccgtcgcaaccgtcaccttcgatgacgccactgccgatgttcccaagctgattgccgcggcgacgaacgccgggtatcccgcgcgcctcaagaactgaggcggcggctgataggcgagcgaaccggacgcctcggctgaggcggcgttcgatctactgaac

SEQ ID NO: 618051 - DNA, 610 bp, Homo sapiens
  misc_feature (610)..(610): n is a, c, g, or t
ggctggagtgggaagctgggtaccctcttctgtgcctgcggttctctgacccaccgcgagcctgcagacgcagggtggggcgctcacagttgtggcactgctgctctgtgggcctggtgtggctggattggtttggaatgtgcgaggcctgaggagcttgggagctgctggtccactgctgggtgcgtctctgaggctgcccatcggggcttgagtgtccattgagcatctgcagctccatctgccgcctcggggtctgaccctggtggcttgcagacatccttgcgaatccggtaagtcgttgggcgtaccatttcaagaaagcgaccacacctttccatggaaagaacgacaaaagatgggcgcgcaaagggaaaacattctcgccagggcgaggaggtaatcgaagacgattattcgaccgagccgaacgcagaacgaccaataaaacagcgcccaaaaagaacagtttcagccgaattttttaccaaaaagattacctcttatggagagatacgaggggagaagcacatatacacgggggaggaggggcgcataaaaaagggcgcaaaaacacagcctgggggagccaagagtgttttcgcgacan

SEQ ID NO: 618052 - DNA, 100 bp, Homo sapiens
  misc_feature (13)..(13): n is a, c, g, or t
  misc_feature (38)..(38): n is a, c, g, or t
  misc_feature (43)..(43): n is a, c, g, or t
  misc_feature (51)..(51): n is a, c, g, or t
gccagcaccaacnagacatcatgtatatctctgcagcnaggangacagggngagctcctacgagcagtacttcgggccgggcaccaggctcacggtcaca

SEQ ID NO: 618053 - DNA, 269 bp, Homo sapiens
  misc_feature (69)..(69): n is a, c, g, or t
caaaaaaaaaaaatttttttttctggtgtttggcccccccttgataaaccgagggcctgccccaaaaanctggttaaaggaaaaaattttttggcccaatcctttaaacccggggccccttttttgggaaatgaaaggtggctgttttttttgggggccacaaaaaaaaaattttccaagggtttttttttcaggggaaaccttccgattttttgttaaaattttcccccccccccttggtttttaaatgtttttcccttttccgggga

SEQ ID NO: 618054 - DNA, 903 bp, Homo sapiens
  misc_feature (15)..(15): n is a, c, g, or t
  misc_feature (67)..(67): n is a, c, g, or t
  misc_feature (75)..(76): n is a, c, g, or t
  misc_feature (81)..(81): n is a, c, g, or t
  misc_feature (97)..(97): n is a, c, g, or t
  misc_feature (116)..(118): n is a, c, g, or t
  misc_feature (125)..(126): n is a, c, g, or t
  misc_feature (128)..(128): n is a, c, g, or t
  misc_feature (140)..(140): n is a, c, g, or t
  misc_feature (148)..(148): n is a, c, g, or t
  misc_feature (158)..(158): n is a, c, g, or t
  misc_feature (169)..(169): n is a, c, g, or t
  misc_feature (172)..(173): n is a, c, g, or t
  misc_feature (175)..(175): n is a, c, g, or t
  misc_feature (180)..(180): n is a, c, g, or t
  misc_feature (197)..(197): n is a, c, g, or t
  misc_feature (212)..(213): n is a, c, g, or t
  misc_feature (221)..(221): n is a, c, g, or t
  misc_feature (228)..(228): n is a, c, g, or t
  misc_feature (231)..(231): n is a, c, g, or t
  misc_feature (240)..(240): n is a, c, g, or t
  misc_feature (245)..(245): n is a, c, g, or t
  misc_feature (256)..(256): n is a, c, g, or t
  misc_feature (269)..(269): n is a, c, g, or t
  misc_feature (320)..(320): n is a, c, g, or t
  misc_feature (326)..(326): n is a, c, g, or t
  misc_feature (338)..(338): n is a, c, g, or t
  misc_feature (410)..(410): n is a, c, g, or t
  misc_feature (484)..(484): n is a, c, g, or t
  misc_feature (584)..(584): n is a, c, g, or t
  misc_feature (590)..(590): n is a, c, g, or t
  misc_feature (776)..(776): n is a, c, g, or t
  misc_feature (814)..(814): n is a, c, g, or t
  misc_feature (818)..(818): n is a, c, g, or t
  misc_feature (828)..(828): n is a, c, g, or t
  misc_feature (873)..(873): n is a, c, g, or t
ttctttttatttacntctttttacattatattttaatctacactactcatatacttcacaaaataanatcctttnnaacanttatgcacaacacatnatattccatttatacactnnntcccagnntntcactcactggnaaaaaatnttggactagncatgttcagtnaanntnccagnaacttatataacacacngtaaacatccacctnnctcaaggngcaaatncantacgtacancattngcagtggtgcntcagatgtggcanaactatttcacactaaccacttgaagactacacaagattaataccatccancatcangatatagctgtngattttacaaaccattcttatttctaacttcacgagttgatgtttttcccactccatcttaaaatattactnctttaatcacagatcagataaaaaggacaacatgcacaacctccacctagaatcctgttgtagcctagacagtnaaatgatatgacatcagcaagactttaaaattgcagctccttttggatcccccaaagtgtatctgcactcttcttcaaacgggcctcttcctcagaagtnagagtnaccttcacaaggtctgagattccattctgtcccaaaatgcaaggaacactaaggaagacatcatcctttattccgtaaagacccttaatcatggtggaaactgggtgcacccgcctaagattcttcattatactctctgccaaatctgctacagagagtgcaatagcccaggatgtgtagcctttngagtttgatcacctcataagcactctcaaccacctgcntgtnaacctctttncactgttccttatctttatcagttcctaaatctgggtgcagagtnttcagagagaaacagccacatttattccac

SEQ ID NO: 618055 - DNA, 948 bp, Homo sapiens
gcagccggccgggcccccgccagcctccctcctcgcgtccctcggtgtcctccgcgggcgggcgatgcggtgggcccgaggaccgcgggtggggctgctgctgtgtgcgccgccgtggcggcgccggcaaggccgaggaggtggcactacccgtgggcgagcgcggaggggaatacgaccgcgggggcgctggctggggcgtccacaggacggatgtggctggactcttgtacaactccggccagcgaaggaggcagcaaaaaaggactgcaggcggatcatagacgaaaagtcgactgggggcactcaagcgtggtggcctccactggaagtggactcggcgttcccggcgatgccagacgtggtcctgttgaaacgcatttagtgggttatggaagaaagtcaaacccacgcgtgttgggtgcgcactcatcgtctcacaccgccgggggttgataactggtgcactggggggatgaatcataacgattcagatcgttctgactcgggtggtggattgcgacttttgatgacgacaccactggctcgggattgatgcagaaagagggcgggcctttaagagaacggcctccacttgaagggggcccaggaaggcgattgtgaaaacggtaactcaggactcgggtcccggtgggagtcctgaacaaaattgatggttgtgacgcatcctgaagaaagttggttttatgggccggagtgtgtcatttcaagagggttaggaagaccgtggccaaagttgggatggggctggtagtgtgggaagaattcttgggactacggggtccacctgcaatgaagtcgacgggttttgcggggacgacgttggggtgggttttacaagaacgggggttgtccaagggtcctggggcccaaacaggtcgaaagggctcattgaaggtggggacatggaagtatacggtgtcacag

SEQ ID NO: 618056 - DNA, 233 bp, Homo sapiens
tagaggatcccctctatccgtgagttctaatggagctgttctttattaaaattttttattcttaattttactttattcatagagatggagtcttggcccagtgctgttcccaaatctcctgtgtttcaatgcatgtccccaccctgctgtggcttcccatgctccccgtggatacatggacatggcccatgcatggacagggtgtggctctattccccttggatgacaaatga

SEQ ID NO: 618057 - DNA, 778 bp, Homo sapiens
  misc_feature (520)..(520): n is a, c, g, or t
gagtgcactgaagatggcggctgctgtaggacggttgttccgaacgtcgtgtgtgcccgacatgttcctcatgccatgcacctgctgtcaccctagctatgcagccctattttaagggtacagccgtttgtcgatggagtagttcaacatgacctaagccttgcatgacgttctaaggggaaactattctggtgcgttttcattctatccctttggcatttcaccttttgtcgtgtcctacaggacaattcgttgcttttacgtgactaaacgctagacgcacatttcacggatagtgacactgtgaacgttagtcgcggtctcgagtggattcccagttttagccatctttgctctggattaaatacaccaatgacaagacatgcgtggtgtgggccactatgagacattcgcactctttgtcagacttacactaacgcagatttcccgagagctacgcgtgtgctgttagaacggttctggtcattgcatctaagacggtctcgttcatacagttganccccaatggagttcatcaagccatttgaggcgtcacacgatctccacagtgtgtccgaagcgttggaagaaaccgctgcgcttggtgaacggcggttccacgtattgttagaaacacattggaagcaatgtctgtcccattgaactgggacaccggattctcctacgatcaagcaaagtcaggctgcttccccagagtactttcagaacggtacatcagtagatcaccatgtgtatctgcacttttcaatgagagaag

SEQ ID NO: 618058 - DNA, 478 bp, Homo sapiens
taagtgacatactgtacatgggttggttagaattaaagtggagaactctaaatcttatgcttatgttataaacgtaaacaaggttgcctcactgtcatgaagatcctgttactttcattaaaggaaaaaacaaatcctgtagaatggtcctttcgcataacaaagaatatgatggcttggaggcattcatacttaccagtttacattgggctagcagactggtaaggtttagggttctctccactaatggaaaattaaatgctaaacgtcctaagaattatgttgttttcaaggctttgactcagatttgtagcttggatgtatgaaagtgaatatcaagacttgtttatagaaaagactatatagaaaaataagtctgtgtagtgtatagtgatacatgttttatgttacccaatgcctgtactaaatcttgtgcttggcttgaattatatatgtgttacctatgactttttttgaa

SEQ ID NO: 618059 - DNA, 254 bp, Homo sapiens
ttgtaactcatcatagataaatatgcatcggctggtggacgatacgcatcctcggatgcgatgaccgatcaggcaccatattcataatattcaatcgtccgcatctgccatttcggtcgaaaatgtcagtccacagccagtcatctctaacttgctggtgaggaactcggatgctaacatgccatcgctaaactcctgacgtgttctcttcccatcctggtccttatcaatgcgccggatgaagaaattgatca

SEQ ID NO: 618060 - DNA, 1093 bp, Homo sapiens
  misc_feature (6)..(6): n is a, c, g, or t
ggtacncgcgggcggcaggggacatagtgctaggtacgaggccgtgtgttgactgggcggcgctgcggggcgcggtggggcaggaaatgtaggcggtcccactccgctctcggcgcctcgggctccgcgcccggccagcctgaggtggggtcggtgcccccggcggcacggcgctggggaggcgatggcgccggccgcgtccaggctgcgggccgaagccgggctcggggcgctgccgcggcgggcgctcgcccagtacttgctcttcctgcggctctacccggtgctcaccaaggcggccaccagtggcattttgtcagcacttgggaacttcctggcccagatgattgagaagaagcggaaaaaagaaaactctagaagtctggatgtcggtgggcctctgagatatgccgtttacgggttcttcttcacagggccgctgagtcacttcttctacttcttcatggaacattggatccctcctgaggtccccctggcagggctcaggaggcttctcctggaccgcctcgtctttgcaccggccttcctcatgttgttcttcctcatcatgaactttctggaggggaaagacgcctcagccttcgccgccaagatgagggggggcttctggccggcgctgaggatgaactggcgggtgtggacgccactacagttcatcaacatcaactacgtccctctgaagttccgggtgctcttcgccaacctggcagctctgttctggtatgcctacctggcctccttggggaagtgacgaccgctgggagaacatcaggtgcactgtggacgtgggtctgggggtctcacccgcccagcgagagcagaaccaatccagtcaggatgtcactgactctaaatcaggtgattcaagatgcccaaaaatgatggatagagaaacagaaatctctgaatgtcagaaccctgtcttttaaaaaggcagtcgctgccttcaggtggtgctgccccagaaacttaaaatttagtcgaggcagtttcaattgttactgtggaccgaattaggatcacaataaacgataatgcaggttcttcaatggtgaaaaaaaacaaacaaaaa

SEQ ID NO: 618061 - DNA, 269 bp, Homo sapiens
aggacccccttttctgtaaatctgttaaaggcggttctacatttaagggtcttagaataggttcgtgttcagtaaagggaaggacttaacaaaaaaggaaaggacacaatggtttattatgaccttttacattaaccttaagaaccatctgggaataaaaaaggcaaagctgtagggtttggtaccaataattcagagcacaatacctatccgggacataatccttatgaaaaggtcttcaaagaagggctggaaaaggcccaggatgg

SEQ ID NO: 618062 - DNA, 1065 bp, Homo sapiens
  misc_feature (6)..(6): n is a, c, g, or t
ggtacncgcgggcggcaggggacatagtgctaggtacgaggccgtgtgttgactgggcggcgctgcggggcgcggtggggcaggaaatgtaggcggtcccactccgctctcggcgcctcgggctccgcgcccggccagcctgaggtggggtcggtgcccccggcggcacggcgctggggaggcgatggcgccggccgcgtccaggctgcgggccgaagccgggctcggggcgctgccgcggcgggcgctcgcccagtacttgctcttcctgcggctctacccggtgctcaccaaggcggccaccagtggcattttgtcagcacttgggaacttcctggcccagatgattgagaagaagcggaaaaaagaaaactctagaagtctggatgtcggtgggcctctgagatatgccgtttacgggttcttcttcacagggccgctgagtcacttcttctacttcttcatggaacattggatccctcctgaggtccccctggcagggctcaggaggcttctcctggaccgcctcgtctttgcaccggccttcctcatgttgttcttcctcatcatgaactttctggaggggaaagacgcctcagccttcgccgccaagatgagggggggcttctggccggcgctgaggatgaactggcgggtgtggacgccactacagttcatcaacatcaactacgtccctctgaagttccgggtgctcttcgccaacctggcagctctgttctggtatgcctacctggcctccttggggaagtgacgaccgctgggagaacatcaggtgcactgtggacgtgggtctgggggtctcacccgcccagcgagagcagaaccaatccagtcaggatgtcactgactctaaatcaggtgattcaagatgcccaaaaatgatggatagagaaacagaaatctctgaatgtcagaaccctgtcttttaaaaaggcagtcgctgccttcaggtggtgctgccccagaaacttaaaatttagtcgaggcagtttcaattgttactgtggaccgaattaggatcacaataaacgataatgcaggttc

SEQ ID NO: 618063 - DNA, 897 bp, Homo sapiens
  misc_feature (301)..(301): n is a, c, g, or t
attaaccagacacatgggctgctactttcatagcaccacgtgccagggagagactcagcactgggccagaggattctggggaagggtgaagctgctgagtcaccaaagcagggcagtgggatggtgatgggttagaggagggaaggtctggggcccctccgctgttcgtcagctgtgtcccctgaggagggtgcagccacctgcatgatggctggtcctggagtgagagaggctgaaccaggagctaaggtgtgcggtgaagggggcaaaaggagagtgacttggctttgggattcctggnccgctgtagcctgtgaacactgtaactaggggaccgtttttcttctccactcctctctgctaggggcctagcacagcgtttggtacgaacaaaggctcagtaaatgcagtaatggatgggtggttggaccagctgaccaacaaacgggtaaacaaatgaactgggtgactgaggctggataactggccacggcctcccgctgaccgtggcctgttggactgttcttttcggcagttccgggtgctcttcgccaacctggcagctctgttctggtatgcctacctggcctccttggggaagtgacgaccgctgggagaacatcaggtgcactgtggacgtgggtctgggggtctcacccgcccagcgagagcagaaccaatccagtcaggatgtcactgactctaaatcaggtgattcaagatgcccaaaaatgatggatagagaaacagaaatctctgaatgtcagaaccctgtcttttaaaaaggcagtcgctgccttcaggtggtgctgccccagaaacttaaaatttagtcgaggcagtttcaattgttactgtggaccgaattaggatcacaataaacgataatgcaggttc

SEQ ID NO: 618064 - DNA, 329 bp, Homo sapiens
agaactatcacaacaccatcctgtgacattgaaactgccctggctgggctacctcgttacgccagccctacaggatcactacacacactgggcaagccacccctgtcacccagcctcctgccactctttgaaggacagagccgcctgattttcttctgaagcagtaagacatgcggcgcgggcgagcacaaacgacctatctgaccactgagtgctgaagccaatggagactgacctggtattgcctttaataggctgcgaacccatgacaatagcttatgtctattacacagagaggaatcggagaatttttctttgtagaaattata

SEQ ID NO: 618065 - DNA, 1120 bp, Homo sapiens
  misc_feature (6)..(6): n is a, c, g, or t
  misc_feature (1094)..(1094): n is a, c, g, or t
  misc_feature (1113)..(1113): n is a, c, g, or t
ggtacncgcgggcggcaggggacatagtgctaggtacgaggccgtgtgttgactgggcggcgctgcggggcgcggtggggcaggaaatgtaggcggtcccactccgctctcggcgcctcgggctccgcgcccggccagcctgaggtggggtcggtgcccccggcggcacggcgctggggaggcgatggcgccggccgcgtccaggctgcgggccgaagccgggctcggggcgctgccgcggcgggcgctcgcccagtacttgctcttcctgcggctctacccggtgctcaccaaggcggccaccagtggcattttgtcagcacttgggaacttcctggcccagatgattgagaagaagcggaaaaaagaaaactctagaagtctggatgtcggtgggcctctgagatatgccgtttacgggttcttcttcacagggccgctgagtcacttcttctacttcttcatggaacattggatccctcctgaggtccccctggcagggctcaggaggcttctcctggaccgcctcgtctttgcaccggccttcctcatgttgttcttcctcatcatgaactttctggaggggaaagacgcctcagccttcgccgccaagatgagggggggcttctggccggcgctgaggatgaactggcgggtgtggacgccactacagttcatcaacatcaactacgtccctctgaaggtgagggccacggggctcagcctctgccaacattactttgtcagccttttccttccttccttccttcctctttcctccccccctccctcccctcttcttttctcttctcttctttcttttgtagttttccgctagacttagtttcatccgtgtctagactcctcaactacccttggattttgcccatgaccctgaatcattgctagttcgggattcaggaagcaacagagaagggtgtcccgagtggtcgtctttgcctcttctgttcgttcagcaaattctcattgcccccatgccagggatgcctatgagttttctagcctttgaaacattcccagtcccaggaatgtcatgcaggcaacttgaatctatgctcctgggtgcagtcctnaaacttggccatctctagntatactt

SEQ ID NO: 618066 - DNA, 413 bp, Homo sapiens
  misc_feature (34)..(34): n is a, c, g, or t
ccgggctggagtgcagtggctgttcaacaggcanggactgtggtgccctacggccttgaattccctgagctcacacgatcctcccttcctcagcctccccaagtagctgggactacaggcacacaatgggactttgcccagccatagtttatagtcttgctgcctcttctctacagtgcccagtcatagctcccaatagccactgctgactaacccctattctgatctctggaagaatataagagaattccttgactctacacattctaacttttctagaagagcaactggaagacttatgttttttctaactgttttgctggtgtatgtatgtataggcacagttcaaaacggaatgaaaactcagccaaatttcctcttaagatcacggagtaaattataagcaataatct

SEQ ID NO: 618067 - DNA, 175 bp, Homo sapiens
cccattgcacttgtacaggcaggtttgggatttagtagcgaagcagctgcctgaatgagttgttgtttccattatcactcctggtccctttgcaagtgaaccctgcagctcacccattcaattcacccaacttccttcattcacgctaggaggctctattaccctctccagctgc

SEQ ID NO: 618068 - DNA, 531 bp, Homo sapiens
  misc_feature (145)..(145): n is a, c, g, or t
  misc_feature (158)..(158): n is a, c, g, or t
  misc_feature (190)..(190): n is a, c, g, or t
  misc_feature (202)..(202): n is a, c, g, or t
  misc_feature (204)..(204): n is a, c, g, or t
  misc_feature (206)..(206): n is a, c, g, or t
  misc_feature (213)..(213): n is a, c, g, or t
  misc_feature (233)..(233): n is a, c, g, or t
  misc_feature (425)..(425): n is a, c, g, or t
  misc_feature (515)..(515): n is a, c, g, or t
gctatagaagtcgggcggacccggaacccagaggacgcgacaccatgacttatgcttatctcttcaagtatatcatcatcggagacacaggtgtggggaagtcatgtctcctcctgcagtttacagataagcggttccagcctgnccacgacgtcagnataggtgtggagtttggagctcgtatggtcancagtcgtggaangncngttcaanctgcaaatctgggatacggngtgggcaagaatccttccgttctatcacccgttcctactacatgggagcagctggagcactgctggtgtacgacattacagtgcgtgaaaccttcagccacctgacctcatggttaggggatgcccggcagcactgtagttcgaacagggttatcatgctcattgggaataagagtgaccgggagtgtcgcnagattggtgaagagagaagaaggggaggcctttgctagggagccatggacggatattcaggggaacttcagccaaaacagcctgcaatgntgagaagcctcatgtt

SEQ ID NO: 618069 - DNA, 378 bp, Homo sapiens
  misc_feature (43)..(43): n is a, c, g, or t
tgtagtgcagtggcgtgatcttgggttcactgcaaacctcccnactcctggtccaagtgattctcatgcctcagcctcccaagtagctgaaatccccattgcaaaattataactgagacagtgaaagagatctgacctaaccaactccatcttgcttctaacctccaagctgttcttgtccattcttgggcatagggtgaactaactttgggaggaacttagcttatagtttaaaacaaagatgataacagtcctttcccaaaacaaaccaccttcttgcctgggggctagactacctttgttggactaacaaattagccacaagattagaaattacggtttaggagtcgagtcatggtcgacgcggccgcgaattta

SEQ ID NO: 618070 - DNA, 1613 bp, Homo sapiens
  misc_feature (301)..(301): n is a, c, g, or t
  misc_feature (452)..(452): n is a, c, g, or t
tcagacgttaggatctagatcgtacggagcgattatatgatgctatcacggagcatgagttgccagaaaacacatgatgtgatgtcactacaatcagcgcggatgcccgtatagttagttagctatcagtccacgtcttatctagttctccaacacgagagatcaaccgacacacactacggtacggtagtaccgccgacagccgtattgcgtgcctgaaaccggctaagacaaggcttactgttaatttactaaggaatcgggatctcgcctagctcggctgcgaccagaatcaataggnccacagctcacacggacacgaggtttgtacacaggtagaagagccaacgtacacttgatggcaatacaatggggtgcttaacactcctgcttaataacgtaatggcttcccgcataagcccattatcatgccggcggggagtgacgtaggngaagacgtatgacctggaatctgcacgtcgtgatgggaggggcgtcgtggaagaaagtacggtggacttctccatgttagcgtgtgtgttggtggttgataagtatatgcctaggtatcacctacacatgttttctaggatgagtttgatcgtgggattggtagcgataaacgagtaaaaaggttaatccgagcagaggcacacatccatgggactacatcttaagttggggactttcacaccttaggacccgagatacccaacatataggccacaccagggccaagattcgcagtatggagcatccggcgtatcctgcaagcgcccgggaacagcagccccgagtggacacctttgtgtagccatgggtgggcgcccaatggataactcgaggcgataagcgtaaatgggcgggggggcaaaccaacggcccgggggagttagaactgtgggggcaggaaaagagggcggccacaaacacctgcaatccaaagctggtccacactgggttaaacacggcgttcaagtagtcccagggcagaaccgtggtttgggcccacacgatggcacataaaccatggcactggaagcccagaatggacagcggaacaaaccggggccagtggtgcctgcgggccaacggagggcgcggacagccactgggggcgggcgtaaataaccagcgaggcagaactctgaagagcaagggtcacaccgcgatagaaggggttattaggccacgccatttattagacaacaggtcaccgggggacaccaaccagtgttgtgtggccaccaaaaccaggggggggggcgcagacacaatgtggtgcaccaactagcagaggcaaccaaatagagagcacgtgtggacaccacatcaacaaaggaggaagatgtaaagacaggagaaccacaccgggtatacaaacacacagggaggagatagtaatcacgcagacgcgacaaagaacaagacacaaggaggacacaacaaggcaacaagccgaaggcgagagagaggacaacaacagacgagacacaacaacagagcaaacagaaggagaacgagaagagaggagaataaatagacagacggcagcgcgcgacccccccccccccccccccgcgccgcccgacaagagagagaggggggggagc

SEQ ID NO: 618071 - DNA, 252 bp, Homo sapiens
ttgcgccacctctctcctcgcgggatgcttgctggggcagtcgggacagtgcgctggccgtgtgctcgaggacacagagacggaaccatccctcatgaatggggcagagtatcaggcgggcaggtttgccttgagtctgcggaagcactgcttcggtgtgattcttggagcaaatacccggccagacttggatctccgagaccccatctgtgatgacttcttccagtagtggcaagacatggctgagagcaa

SEQ ID NO: 618072 - DNA, 307 bp, Homo sapiens
aaggagcagtggtgtgaacctgggaggctggcacttgcagtgagccaagcactgcaccactgcactccagcttgagtgactgagcgagactctgtctcaaaacacacacacacccacacacgtgcccgcgcgagagactctcaaaacacacacacacacacacacacacacactctctctctctctctctctctctctttctctcttagtgtcttagagatctgtgggctaaaagtgagatgatgatgtcaccgtgggctaacactcaggcatggacggggtggctctcccttcaggaggatgtagg

SEQ ID NO: 618073 - DNA, 294 bp, Homo sapiens
  misc_feature (270)..(270): n is a, c, g, or t
attacaactaaggtaatatctacagtgttatcacgacagaagtataggttgtattacaagatgttatgtgtcgtatatctatatcaggttattcaagagaatatcacctatagcataataataaattttcataaaaacaaactaaaaaaacctagaaacatttgacatcaccaaattcaacagctctcactagaaatccaagcataaacttagatatttgaaataaacataaattatgattatataactctaagtcacatacataatttngctgtcgtctcatttatattcact

SEQ ID NO: 618074 - DNA, 614 bp, Homo sapiens
  misc_feature (381)..(381): n is a, c, g, or t
  misc_feature (383)..(384): n is a, c, g, or t
  misc_feature (391)..(391): n is a, c, g, or t
cacgggacatgctctagtggcatgcggtgatcaaaatcagtgtcttactagaggctacagtgactggggtctgagaggcgcaccggcttcttactacaggccgtactctacgcaggccgagtctagggagcattgtgcgaacacccgtccctggcgggaaacctcgcgcagtttctcggagaaccatagcatggccttcacccacagcttggtcccatagttccggtcaaagggggttggagcgccagcctgctgcaggtggtccaggacattgtgtcctgcagtcgaagacgcccttgccctctgatgagtactaggttgtacaggaactccgtggtgtattagtcatggcacttctcgtgccgcagcaccaggcccctntnnaatgtcngtcttcatcttctccgtcatgtgctccacgttgacctttaagtcgtggatgttgaaagggtcctcgaagacgtaggcggcgtcggcccccacagcaatgccagtacggtggccaggtagccacagtcaacccacccatggctacaaagatgacgatgaggatcatacagaacagctgaatgcctgagccagcagggagctgaggatcatgggccatcggacgg

SEQ ID NO: 618075 - DNA, 279 bp, Homo sapiens
attttttaacttactatattattaccagatattcccagtgcttcctcagacacttctggcccaggtggctgttggagctccagccattatattcacattcaaagacaaaggaagaggaaagtatggaaggacaatagaagagaatctgccacaaggaatcttctggaaatgccatccaacaatctgcttatatctcattgactaggacttggtcctgtcacatctaattgcaaaaacaaacaaataagcaaagagtaatgaataaaaatgctacacttt

SEQ ID NO: 618076 - DNA, 817 bp, Homo sapiens
tgtatgtttggtcattcggaaaacccgcattcacaaaagacaaacattcaagccgcttggaggctcatctcacaagagatgaacttagggcaaaagctctcgcatatcccattcgcctgtagaaaaaatcgattaaagctcccagccgtcgactcccacccgcaacatgatgtccaaagagcagttcaagtgaagctcaacttgcaattaattcgggatatacgtaggaggggtaagaataacagttggctgctcagaattgcagagaacaagaaagacctggtaacacagtactagctacgaactagagccacacgactcttacgacctcactttccgacaccgcactgtaacccatatggaacctaaatttggctttgctaacatggagcaaacaaacgggaggaaagatgatcaaaaagctctttcagctccttatcttgggatagattaacacacaatccatcatcttgcaagcccacccccctttaatttattctcgtaaacgcgtttcgccacgacaattggcactacgtttgacctggaaccgaacttgtgcaccgtatatcccccccttgtcatgttttcccgtcctcctttaacggtctgggcgactcctcctttaacccctctttcctcccctttgcatacgcaacatgcacatgacgaatggtcaaatgctacttcccatgtgcttgcccctatacacaaggcttacacctgtacaagtggctcccgctgggacgtggctttctctcacggaatccgatacatctacgcatcttcttgtgcagggacttggggctctttttctctg

SEQ ID NO: 618077 - DNA, 684 bp, Homo sapiens
tggctgtaacagtgtttattggataatgagtccagggttcttggttgaagccttggtgggggaggggcacagagcgaaagggggcgtaagggaatgtttgaaggttgttccgtgatgtcggtcggagcttccaaactaggcgagggcagggttgaggcctcgggcacacagccggacgcccagtcacccggcccaaagtggagggcggccgggcccgtgcgcaggcatttgccaagggtggctcacactcacgcacactcgcaccgagaacttcagaggccgctcttccacaacctccacccaggtgcaaatgtgactttaggtgcaaatttaaattctcaaaagggacgggggaaacagagttcggtgaacaacagaacagttcattcctttctttttaaaagtgggtgcttaagtttccagcagaattgccacattaaggggttggccattgtgattacccctgtggggaacattttctgtaaattcccattgacacattccgcctttggtattacatccggggtaatgagaggtggctttcggcggccagttattagcactgggaagtcacatacctaagtactggtaataatacctcaaggtttgaggagcttgttggtctcctactttttggtcaatctctgaatgtacggactaaatctacatgctgtatcataaaag

SEQ ID NO: 618078 - DNA, 450 bp, Homo sapiens
  misc_feature (3)..(3): n is a, c, g, or t
  misc_feature (19)..(19): n is a, c, g, or t
acncgttgagtaagctaangggtgtatataagtaccccaagtgtgtataataatggattctcccactgattttatagagaagaactatatttcccagtaatcttcccctaaatattgtgggaaataattctgttttagtgaataagcctaattaaagtctatccagaccaccatgtttttatttacagtgactatatatatccatgattttgacatagagtataattctgatgttacttatttcaatatgccttgtatatattagctgtttataagagagtcgctttttggttgaaaagtatttctaggctgagcaaggtagctcatgcctgtaatccaaacactttgggaggccaaggcaggaggatcacttgaggtcaggagttcaagagcagcctgggcaacatagtgagacctcatctctacaaaaaatatttattaaaaaaaaaa

SEQ ID NO: 618079 - DNA, 122 bp, Homo sapiens
gataggtcaaaatgcgggaatgtaagaagaaggcagggtgacacatggttgacaaagcgatagtgtgtgatgaaagttgtcacaggtgaccactcttaactaacccaccaaggtagcatccg

SEQ ID NO: 618080 - DNA, 362 bp, Homo sapiens
gctcgactgcatgcggcatggccccagccatgaagcgaacttaaccgctagtgccgaggacacattaaacgaacaggatgggccgggcacggtggctcacgcctgtaatcccagcacattgggaggccgaggcaggtggatcactctgaggtcaggagtttgagccagcctggccaacatggtgaaaccccatctccactaaaaatagaaaaattagccgggcatggtgacacatgcctgtagtcctagctacttgggaggctgaggcaggagaattgcttgaatctgggaggcagaggttgcagtgagccgagattgtgccattgcactgcagcctggatgacagagcgagactctatctc

SEQ ID NO: 618081 - DNA, 295 bp, Homo sapiens
gtgatctacaggatctggcctcccactggtgctgtatggtgcgtacaccttgtaatctcagcaggaggcgggagggttgcttgagcccaggcgttaaagaccagcctgggcaacatagcaagaccccatctcaaaaaaaaaggggggggggcagtgattgtccctaacaaggaaagaaattctttcagatgaggggtcaacaaaaaataaagaccctaaaacatttctaaaaagtcagaccgcatttggatttttggcataacctaaatctgggaatatgaagtaaaacagaaaa

SEQ ID NO: 618082 - DNA, 153 bp, Homo sapiens
caggcgaggggctacacagaagcagccagcagttcgtgaattgccatgaaatccaaggtagaaaaacaaaactcactggttctgaaaaatatgcttttacatgttcatatcacagagccaccttatagcactactcctcgctacataccgtat

SEQ ID NO: 618083 - DNA, 116 bp, Homo sapiens
agcgcacttttcgaactggttcacgcagaatcgggccaacatacgataggagttggccttgagcttttcctcattacccagaatgaggtcgacttcatccatggcctcgaatttgg

SEQ ID NO: 618084 - DNA, 381 bp, Homo sapiens
ttacggagactctctggaagagcatcagtataacatataatggctgctatagactagagcaccaactcagtcaggcattgtcctatgcgattaaccgtggagatgttatctgtgactcctttcaagtctgtgggtaggtattatgataatatgtcctctaatttatcatgacatggagagttaactaacttgctcgaactcagtcgtggatctacgcacttcaacacacagcccatgctgaatgccactttaccagttgcccagctgctttctattttccaaattctaacctgtcctgtctgcgtttcggcacgtctccgatccgtcccgatcttgaaggacttacggtctttgtcttttttcttttttttgtttcttttt

SEQ ID NO: 618085 - DNA, 659 bp, Homo sapiens
ggagagagacctagtctcgagttttatttgtttttttttaaaatggcggaacaaaaggttacaaaacagaaaagcaccaagaacaaagcaaacccttacttttgacaaagtgcacttccctggggcccatgatctatttcttacaacgactaaccaaaagtacaagtcctacggtgtcgcgaaggggtcagagggtttcaccctgtaacgtccggccctttgggtcccccttggggcagacatccctttcccaggtgtgtgctggacctgactctcggtacactgtgcaacccgaccaaacactctaggaaggtctgcacatgctatgatctgcttacaaggtcacgatgggctcacctaaaacttaggcattcctcaccagtgttttaaaaagctgctaaaacaaccgttgtgaacaaataacccaattcccagaaagcgacccatataacctgcgaagtatcccaaggggacatagactcataacccaacaacatgacccaggacagcaacagaagacagcggttgaacgctaggggggttgctgccaaaagatgccatgagaaagagaccaccagacaacacaacgagacggacaccaatgagatgagtggccacccagagctgcaacacaaccgagggcatgggactcactgcaa

SEQ ID NO: 618086 - DNA, 382 bp, Homo sapiens
ttggggcgtcacagcctaaggtgaggctcctgggttctaggcgccaggccacacaggcccttatgcagccctcattcggcttgcttctgcctgtgtcctctctatagacgtgtgtgcgccacaagtggcaggggagcatgtaatgtggcatgtgcctactgtgtcccgtgtgcctggggacatgtgcccatgcagcgcaaaatggaccgtccacattatggcatacttcctatttccgtctcccagtgacgcctctgtcctggctctgccagggcatgggcttgaatgacctgtggaaaaagtctctctatgctgttatgtgtgtgtgtgagacaaggtcttgctctgtcacccaggctggagtgcagtggcgcgatcgcag

SEQ ID NO: 618087 - DNA, 453 bp, Homo sapiens
  misc_feature (9)..(9): n is a, c, g, or t
tccgcttcncaggttccagtgattctcccgtctcagcctccccagtagctgggattacaggcacacaccaccatgtccaactaatttttgtatttttagtagagccttgttggccaggctgatctcaaactcttggccatctgttgatccgcccacctcggcctcccaaagtgctaggattacaggcgtgagccactgagcccagcttaacctttttttgttatttccaaaagtaatacatatttaaggtatagaaattcagaagccataagtaagcaaaaagaaaacacttaaagcgagggagaggggttgaagacaagttggttaattggtacagaaataaggtagaaggaataaattctaatatttgatagtacagtagggaaattatagttagaacaatttatggtgtatttcagaagagctggaagagaattgtactgttcccaatac

SEQ ID NO: 618088 - DNA, 273 bp, Homo sapiens
cctaagatcccgcgctagcggcatagtgaacgcatgtcgcaggtggtggacgccggtacggcacgacgggtgtcggggagtttcaagttgcccgacggcaccctgctgaccatgggcggcaagaccggcaccggggacaaccgcatcgagagcttcggtgctggcgggcggctgatcggttcgcgttcgttgaaccgcaccgcgacgttcgtgttctttctgggcgacaaccatttcggcaccttgacggcgttcacttaatgccgctagcgc

SEQ ID NO: 618089 - DNA, 365 bp, Homo sapiens
  misc_feature (291)..(291): n is a, c, g, or t
cacaaattgacagtagacaatatggcagaaggttttcaattatcaagactgcttttcacttcttttatcacatggacccttctttgatactggcactgaatctaaagcaaatggtagaagaaagatcagtactatataaaaatgtttttagagaaatgaaacggcaaaaagtcgggcagaaatcatgatgtacttctataaagtcgagtgtgcctgccacttctgcatccccttctacctctttcacccctgcaattcctcagacagcaagaccaacccctcctcttcagnctacccagtgtgaagacaatgaagatgaagacctttgtgataatccattccattatagtaatatattttctctt

SEQ ID NO: 618090 - DNA, 864 bp, Homo sapiens
cgtgaagcagttattttctacgctacctgtgcgccataaggaatttcaaaggaatattaagaagacgtgcctgcttccccttcgccttctgccgtgatgtcagtttcctgaggcctccccagccatgcttcctgtacagcctgcagaactgtgagccaattaaacctcttttcttcataaaaaaaaaaaaaaaaaaaaaaaaaaaaaaaaaaaaaaaaaagaggggggggggcgaccacaaaagattatcccccccggggggaccacaagaataaagaggcggacaccacgcgctttggtgagggacaaagggggcgctccaccaaatagtgaggagcgccgccgaactataacaagacaagagaacaacgcgtgcgaagcgctcgagctatataaaacaccacggcgacgaagagacatgagtgggtgataaacaacaggagcgacaacatgaggagcgaactacctctacgagagaaaaagaaagagaacaccactaccaccatcgcgggcgagagggcggaaacaacaacgatggggcacagccaacccaacccacccctacagaacaagagtacagacgtatatataaagagcgctaatagagggggaaaacacaatataaaataacagacttattagctagcgagtgcgtgtctacatacttgggcgtgtgtgctcaaacccataaaccgtcacgagaccaactatatcagaggtcggtcgaccgtgataagaagacaaacattacttgtgcatgccatcctcaacacgatgagaattctgcgcagtttatgacaagcagacacacaacttgtttcttctgacacctagcaggcggagagactactagagtacataaat

SEQ ID NO: 618091 - DNA, 808 bp, Homo sapiens
gtctgtggccggaggctgactcagtgtctagaacagatcagacttttgtaatgatgcctgaaataaaattaaccacctcgaaagcaacaggttccctctgggcagagatgtgtatccttatggatgaaaatgacactaaacatgggagtctggagagcaggaagatgttgtcaccttgaaggagacaccttggagaagggattatggcatcgagctttatagtgtcttctaattcaacagggaaaaataagcttctggtacacaggaaaagatcagatgctaggataaccctttccaaggtggtcttacagcgaattacgtgtgtgtagtcatccattataggccaattcaagccggagttttggaggaaaatgtgcgcgccctttggaagttgatggggcagacagccagaacacagacagaaagggctgacagaggtagacgcataggaactaccccttgtgggacaagacggttcctccacaggacgggacaaaatcacttaatcaacccaccggaattccatctaaccaaagtctccagtctagatgggtatctgggggtggaacattggacacttggattaacatattgttggtgggggttgaggaacagcagatgtacgttttggacatccgagatcccaattgtgagaattcagaggctatgggtgattgtgttccaaggggaggaactaagcagaaactttcgtgaaaaaaggcagccaggggttgaaattagagatacggcagggttaaaaatatttgggcaggaacttctctttagatgtggtaacttaatattggac

SEQ ID NO: 618092 - DNA, 124 bp, Homo sapiens
tcgtccccagtctattacatgtacaccaagtcacaacgtaggtagtggtcttgtataacatagtcccatatttcttggaggctttgttggttccttttcattttcttttccaatctgtcaatca

SEQ ID NO: 618093 - DNA, 247 bp, Homo sapiens
  misc_feature (109)..(109): n is a, c, g, or t
  misc_feature (165)..(165): n is a, c, g, or t
aggatcccggtattgtgtggtgtatgagtacacattgtatagtgaatcggctagtccattcaatacgtagtttcggcagaaaaatcagaatgattctgtcacgccccgnacacgcatcctgccctggccgcagcgcgtaagaaaccgaactataaccacccactnagccactgggccaccacagtccacctgaaaaggaccacgtaggtcgatgaactcattaagctcaatgccatacatccaacac

SEQ ID NO: 618094 - DNA, 172 bp, Homo sapiens
tggatgcacagtcgcgcaggagatggtggtgggtggaactggcagtgtcagggccggtgctcagtacccgtggtcagaccccagaggccccaaaggcacttggtagcagggggaaagagcaaggtggggcccagctggtctcagagggcaagcaggtgaaatggaactgggt

SEQ ID NO: 618095 - DNA, 294 bp, Homo sapiens
caagattgcgccattgcactccagcctgggcaacacagcgagactccgtctcaaggaaaaaataaaaataaaaagggggcacgggcccgtgacatccccacccttggaggctgtcttttcaggatctgccctgccctagctccacaccatgctcccaggactccatcacgctttgtgcagtggcccccacagaaagacctgagcttaaggtgggaaccaggtctgataacttggagccccagtgccaagaacagtgcctgcatgtatttatccaataaatgtgaaattctgtcc

SEQ ID NO: 618096 - DNA, 104 bp, Homo sapiens
cacaacagctcaaagtgcaaggccccatcatcaaacaggtctaccagttggccattccaacaggcaaacaaaattccagggcaacaaatcagccagtcatcaca

SEQ ID NO: 618097 - DNA, 137 bp, Homo sapiens
tgaatcacatgctgctagcctggtatggttatgggttctaattctctacaaaatcaaccagccatgatggagtaaagaaagttagcaagagtaaatatggtcatcataatttatattgaaacacttccagagtacaa

SEQ ID NO: 618098 - DNA, 910 bp, Homo sapiens
ggggcacggacagcttgggacccaggaccctaacgcagaggcgcttgtgtttggaagtcccagctatcacgggtccccaccatatggggcctggacagatgccgtcctgacaggccttgttgcttctggcgcctgtgcgccaccgacggaagccccccagtactgcggtcggcttgaatactggaacccagataacaagtgctgcagcgagcatgcgcgtgcaagcggcttcggggctcgaccacaccatgccgcggactatgaggtttccgggaaaacgtagctggtactcaaatgatccacggcgattatcgtaacgcgcgcccggttccgaaatgtgttcttgctgggcagatgcatagcccggacggcagcgggaagcttatgtaggcgccctgacagggtcggcgggaggccgttgaaccccaatactcccaggccagcgagcgccggtggtgcaagaacccccggtgggcatgctgctatgagagaggccggatcccctgcccaaaggggccactgtggcgcccccttcggcgagctcttgggaaaaccgcgagggcggctcccttaggctccccataggaagcgcagctcatctagtcaaagttccgtttgcctgggagagacccctggagccttgtcccctcagcggggcttggccgaattttcctttgccggcgcggtggttgcctgggtcctggcctccttgaacctttgtgcgtgcagattaggcgaatccttccttgatttaatgtctgggcttcgtggaattcttctggccatgggccccaggggaggaaagggcgacccttagtcgcttatcctgggctgtggtctggaagagccccaaaaaaaccagagccctttcctctcgcattggtcctacacagggcgcctggaaaaaggg

SEQ ID NO: 618099 - DNA, 168 bp, Homo sapiens
acgagcgcccaagtaacagcgacttctacagagtgcccatagatcatgtcatggtccagctttaataagtggtctggcttattccaagaagggattttagagtatccagactacaagtttaggtacagaataatctgtgaacatcctgacacttggggcgctcgtgcc

SEQ ID NO: 618100 - DNA, 333 bp, Homo sapiens
ccgagtgccggggggaactcgtccgggactttcaccaggctccagaggcgctactgcatctgccagaccacgcgccccctgtcatgggtggagtgccggcgctcgtgccaggccagggatgctgccagggccttcggtgaaccggaggaagttcacctttgagtgcagcgatgggacctcttttgccgaggacgtggaacagcccaccaagtgtggctgtgcctctgcgcatcacgtgggcgtggacaggccggtgacggcgggcaaggggcccacgcgctgcagcagcgcagacagtcgccagcagctgcgctggggtccaggtcatcacag

SEQ ID NO: 618101 - DNA, 237 bp, Homo sapiens
  misc_feature (17)..(17): n is a, c, g, or t
ggccgcgtcgacgtttngaccattctagtttgttggtgatgtgtcctcttcacgactgtcttggtgtgtttggaccatgttagtttgttggtgatgtgtcctcttcatgactgtcttggtgtgtttggaccatgttagtttgttggtgatgtgtcctctatacgactgtcttggtgtgtttggaccatgttagtttgttggtggttcagccggccgcgaatttagtagtagtcgacc

SEQ ID NO: 618102 - DNA, 270 bp, Homo sapiens
tgcatatcgggacgtccatcacccggagggacaccatgttcggaagcacacgagtccaatgctctcggcttccctacgtcgccagatgcagttcttgtacaatgcttagcctgagcagggatgcagcgagcgaaggcagggcctcggtcgcagtttgtaggcacccaggtcagtgatgttgttctgggacagattgagggtttccaaggactctcagctggggcgaaggttgctgagagcctgcgatacatccctcgttccccaattatg

SEQ ID NO: 618103 - DNA, 1198 bp, Homo sapiens
ccgggcctgaaggactcctaggcgtggagcagagcgacaaaacagaccagtttctagtgacgagacagcggcaggacagtcatcctctataaggtttctgatcagaaacccttggggagctggtcagtgaaacaaggtcaaattataacatgtccagctgctgtgcaactttcaaactggagagtatgttgttgtacacgattttacaggttattacagaatatggaataatgaagatgtaaacctggcataaacgtattctcacagctacattgtccagcaagaagtatataggatactttacagtgcaagggacagaacccattggtgctcttcaaggaaggtgctgttcgcggtctacgaggccttgagttgcagaacacccagcagaaaattgaacactgtatatctctgaatgaagaacgtgattaaatggacaaagtatctaacgctagtattcagacatcctgtatctaattatcttatatactgaaaaacatggaaactcactttgcttacgctgcaaactgtctaactcacgtatcttaaccaaatatacactcttacttggacaagacgaaaactctgtaatacagagtacaactgacatctgtagatcggaacattacatactcttggatgtcattacgctctgatggacgcactatatgaagacctcgaataccaataacagtacagacgaacccagacaacaactcagagcttaattaaatcactgctgctccaaggaagtggcatacagataagctacgcaactgcagttgacaatacatggccgtggaatcagaaacaagatgaagacgatagaacagtaccacaagctcataaggaaaggacaaacaagactgaaacaaaatctccaccataatgaaaataagacaatacaaaggaaaagacaacacacacaaagcaacacaacgaaaactaaggaaaatcacaaagtaaaaacacaccgacaaaagactcaataagagtcacaaaaacaaatctcaacacagaataaaatactcaaacaaacaacacacactaccattcaaaccgagaacaatacatataaaactacacacatactatacaaaacaatatagacaaataaagagaacaaagaccactaataattaactatactaacaagaacacatcatatcaccaacccacaatacaaataacaatacac

SEQ ID NO: 618104 - DNA, 992 bp, Homo sapiens
gtacaatgtacgagaggaactcgtcagcctgtaaattccaaggtagtaagatcgaagcatgaggcagaaggtgctcgtgaatgtgacaaatgctgttggttgcttgaacaagtaacgagggtaccgcgggggtgatcagaagctgtcgctagaaatgcctcagaatatgatcctatgggagagatgtgccggcaacaagtctgtagagacatcggaagagacatcgttcaatgaaatgcacgtgacgacaacgtgtggagcccagcaattcacccccggggaccaattctggatcatccttcactggacagccacagggggccaagagggttggtttccatgaacgcaagctgcatagtggcttaattacttgtgactggacctctggtccctcaaatcgaggttcctctaacgaaaggaaacaccaccagaacattggtcatgtgcccaacgttcaaaccaaaaaatcgatactcaagcaatgttacaaattcccaaaaacatcttacgtgattgcttaacttccacagaagcaaggaaagctgggaaagccccagaacacccaggaaggtgagatcttcgaacacaggaaccacagcagaagtttatgagcatcagggagcccagcgcaagattgactcagaacggctgcggacctcccaacattttcccacaaatcaaagctattccctcagttccaggactacctgcgaatctggtgcactgacgaatggatttatctcacaattgtggttctaaatgtcttagacctataataggtgatcaaaaaaacacaaaaacaaacatgtttgggtctcgcagaacgtttcacactgcgtgggccgcaagagaagaaagagaagtgatcaaacacgcaagagtggatccaaaaaacggggacaggttcacacgagtaggatggtaaagaacgagaccgggggaagcggaccaggagccaggtcacgcattattcaccatagttatgtcactac

SEQ ID NO: 618105 - DNA, 463 bp, Homo sapiens
actgagcggcgccatacagtggctgaaacagctgatgcctttcttcttgcttatgtggcacttcattctctgtgtctaaacggtttccactatatttcacgtacagcagcggctagcgaacattcaagccatgtggtagctaccggtgcagataccagtgctagcctcaacatcaaaggcactgggacccagccagctcagggggatgtggacgatcaatgcaataggccgcctggggaaccagatgggcgagtacgccacactgtacgccctggccaagatgaacgggcggcccgccttcatcccggcccagatgcacagcaccctggcccccatcttcagaatcaccctgccggtgctgcacagcgccacgaccagcaggatcccctggcagaactaccacctgaatgactggatggaggaggaataccgccacatcccgggggagtacgtccgcttcacc

SEQ ID NO: 618106 - DNA, 132 bp, Homo sapiens
gtctcccgctttactccgctcctggaggcgtgagagttccaggttcgaacctgtaataaagatcctttgcacttgcattgacgcctgactctggtgagcttttctggggactagacggacttggcacaacat

SEQ ID NO: 618107 - DNA, 100 bp, Homo sapiens
tgggatttcactggaacaaacacggtgctgtgagggccccgccgcttgcccgtgacacgcagcgcgttggtgtctccgtgtttgtcccagtgaaatccca

SEQ ID NO: 618108 - DNA, 537 bp, Homo sapiens
attatatatatatttttttttaattatttattaatagaggggggaggcaaaaatataaagccaactcaaaaaaaggaaaaaaacctaccccttataaaaaagcaataaaaaaaaaatgggtaaaaaaccaaacaaatctaaggaaaaaccctaaaaaaattgaagggggacaaaattaataaaatgaaaaaggtttgtaaaaaataaacgtacaaaagcagaaaaaacaacaaaaaacggcgtagaagataactgaaaagtttaacaaaaacagagaaaatctttgaaaaaaaagagaagagggaacctggggaaaaaattaagtaaaaaaaaaaactggaaattaaaggaaaatagaaaaaattttggataaaaaaaggggggcgacaaacgggaaataaaatggccataaaaatctggaaaggagcttaacctcaacaagaagagcagcaataaaggcccataaaaataaaataaacacctgctcctaagtaaaaagaaatctcgtagaaacaacccacagtagaagacaaaaac

SEQ ID NO: 618109 - DNA, 252 bp, Homo sapiens
ccctggggcctttttttgggggccccctttgttttttcctttctagccggggaaggataacaccaaggggggggccggtttttttgggggggggggggccccccccaggaccggggccagggggccccccctttggttttacctttaaattttgggggggggcccccccgaatttttgggccaccccggggttccccaccccaccccgggttcccaaaaaccaaaaaaaagcccggttttttggtttttgga

SEQ ID NO: 618110 - DNA, 852 bp, Homo sapiens
  misc_feature (240)..(240): n is a, c, g, or t
  misc_feature (604)..(604): n is a, c, g, or t
gtagagtgtggtcaggtcggctcggattgaacaggactttccttatcccagtttgattgtgcagatattacactgcactgttcgatgagtcttctaattcatcgatggcttcttactgatatcctaggtgaaagaacttgggagaagccgtcgactcacggtcaggcattcagacgcttgcattcatccagcccatcgtgtccataataggaactctgttcaacatgaattgcccgcctntgtccacactcacaagagaagacaggatctcttcacctgtggcatggaaactttccagaacgaattattgagaatgactagcatagacatgaaatgacgcattagtccctatgtacacagctgacgtgtcattcgtaagtcaggtctcgcgctgagtaaatccgtagacgtcaccgacgtagaacgataggtgtcttcacgaacggcaactatgaatgaggaaacacagcaacttcagctaacaccatggcacgacagaagataagctgatcccaacaatacattggaatgcttaataaacaccgagataccgcaagaggccactaatatgagcttggctaaacctggacacgttctgcgcagnagaacggataaagccacatctgaacgatagtgacggaagtaacaagagatatccaaacgattcctggctggacgaggactgacaagcgtgactaaatttcgttgctggagaactggactttctccccaatccccctttcctaaaatatccaagagatctggtacttggtccaggttgtcatctcttatttttttcccctacctgacaaaatattttacgaagctaatggtaggactggtataggtaga

SEQ ID NO: 618111 - DNA, 885 bp, Homo sapiens
  misc_feature (166)..(166): n is a, c, g, or t
gagttcattgaaaactcatttgctcttggagcagtcaggcagtgaccgccttcggctttttttctgctgactaagatctcctatagagagctacaacaatgcccaaaagaaaggctgcaggtcaaggtgatatgaggcaggagccaaagagaagatctgccaggtngtctgctatgcttgtgccagttacaccagaggtgaagcctaaaagaacatcaagttcaaggaaaatgaagacaaaaagtgatatgatggaagaaaacatagatacaagtgcccaagcagttgctgaaaccaagcaagaagcagttgttgaagaagactacaatgaaaatgctaaaaatggagaagccaaaattacagaggcaccagcttctgaaaaagaaattgtggaagtaaaagaagaaaatattgaagatgccacagaaaagggaggagaaaagaaagaagcagtggcagcagaagtaaaaaatgaagaagaacgactcagaaacgaagactgaagaagatcaaaacgaagagaacggggaaagctggaaaacgaccgaccaacgactgaacacacggggaccgacgatggacacacgaggactaccccctggaccctgacgaccacggagacagatgcaaaagagaaaagaagatggacaacaacgggtgaagacggaaacaggaaatggagaagatggaaaacggagaaaggagaagatgacacacgaggacgaagacgaaaagaaaccgggagatggaaaagagattgacgatgcgacaagagacaggggattacaaaagaggggaaaggatgtaaagtccaagaagatgaaaagagagaagagaattggaaagaagattaaggtggcaattgaggaagaaggtggaaaagaa

SEQ ID NO: 618112 - DNA, 296 bp, Homo sapiens
gcggcggcggcagccgcgtcactggcgggcgggatcctccgctctggggaggcagcgctggcggcgggctggggccacgtgagtgaaatcatccgcgccgccgccgcgccgccgcgcgacgcctgctccgcgcggaggaagacagcgccgccgcgcaccgcagcgacccgctgatagtccaccgcacaggcctcggccgcggcagactgctccagcgggctgcgcgatgtgctatccaccttacagtttatacaaccagtcaaacctttttaaatgcccccctgtggtttcatttt

SEQ ID NO: 618113 - DNA, 316 bp, Homo sapiens
ctcaatccgagcgcggtaccggcctgtgcgtgtccagccgatcgtgccccgcgtgctgaaactccgtcgcgcccgccaaatatacgactatcacctgtcccgtcttggtattgcgccactgatcccctgcctaccgaagccacaaccaccgtaccccagatagcggatatcgcggctcaaccgcgaaagcgccaccgtaccgcatcccgttgttgtcatattgttccccgaataagtccacaaaaaaagaaagaaaagaagaagaaaaaaaaagaacgggcccaaatactgcattgtcgctggcctacagcacatg

SEQ ID NO: 618114 - DNA, 142 bp, Homo sapiens
cgaacgctacggggcggaaggctaaaggggagtggcccagtggcggtagctggcggtggtgccaatggtacctctttcagctacacatatccatggagaccctacatgccatgttatgctgagtacttctggtggcagaaat

SEQ ID NO: 618115 - DNA, 931 bp, Homo sapiens
gggctggctgttcatcccacatcgtgtggggcagtgtccatcccctgcagctacttggtgacttaacatagctccaggagccctgtcagactgccctcctaccagcataaaccccttcgactcgttctgctttgacaacagaccatgacattggggaggggaggtgctccgtcgtcccagcttttctcagaatagtcctatagatactggtgatctggacactgaagaagtaattctgtctctgcacctactttggcagaatgttgcacggacagtattctgtgttagtatctaatgccaaacaagttgtttgtagaggtcttagtacctcagcacatcatacaataccaccattactgtctgtcacttcagagggcatcgggacctggctggcgcccttgtgatgtgctatattaatcagtgtaacgattggtcacgttagttacccatgtatgctgtgtggatcatgtgtatatcgtccagaacagtcattacggctttcagcgtagatgcaactggccgacccttggcagcagggactgctagattgtactctgaccaacaggccaacagacctgatctctgtctctggttcaggtaacttacgagagatacactcagtctactgaggttagaactacatcatgaatccccaaacacactaattgagtgggaccccattgcccgagcctgacgggaaacagcgagcgaggcaacaacgtaataagggggcccacaggctgtccaaataccagatgataacaacatgaccacacaggtttgtttctgtggatcacaaactatgggggatagaaacattgatgcaggggagctccaccgaaaaagtgtgcaaattacaacaataacactgtaccaactgtaagacccagaggggataaacacttgcttataacgacactacacggaacaa

SEQ ID NO: 618116 - DNA, 507 bp, Homo sapiens
  misc_feature (27)..(27): n is a, c, g, or t
  misc_feature (47)..(47): n is a, c, g, or t
  misc_feature (69)..(69): n is a, c, g, or t
  misc_feature (78)..(78): n is a, c, g, or t
  misc_feature (116)..(116): n is a, c, g, or t
  misc_feature (125)..(125): n is a, c, g, or t
  misc_feature (137)..(137): n is a, c, g, or t
  misc_feature (155)..(155): n is a, c, g, or t
  misc_feature (183)..(183): n is a, c, g, or t
gcacggatcacaactcactgcagcctnaaactcctgggctcagcaantctcccaccctcagtctcccangtagctggnactacagggatgcacccatcacacctgggctaatgttntaaattttntcataaaggccngggtctcactggtgtttnccaaggctgggtctcgaactcctgggcncaagtgattctcctacctcagcctccgaaagtgctggtgtgaggcactgtgcccagcctattttatttttatttttgtagagatgcagtttgactgtgttccaaggctgacctcgaaatcctggccttaagttatcctccttctacatcggccccctaaagtgctaggattacaggtgtgagctattgcacctggcccttggtttacattgttcctgttgacaaatcaatcaccagtgatactgttatctttttaatttttttttatttttgtctttggctttcgaagttttactgtaatgcatctagttgtgatttctgttaa

SEQ ID NO: 618117 - DNA, 1497 bp, Homo sapiens
  misc_feature (459)..(459): n is a, c, g, or t
  misc_feature (477)..(477): n is a, c, g, or t
  misc_feature (759)..(759): n is a, c, g, or t
  misc_feature (779)..(779): n is a, c, g, or t
  misc_feature (836)..(836): n is a, c, g, or t
  misc_feature (1451)..(1451): n is a, c, g, or t
taagggaaggaaaatttcaaacatatagcttttattgtgggtgacctccggccccctttgagaagcccatatagtctcacaggccctcagggggtgtccgtgataagtagagcctctaggaaacctttgccagtcttttcctcactagtataagacagggctgtgaaagcgtggtgggatatcttctccttctacagtgggcgtgccatctcacacacgagtttacacgtgttgtgggagggtgtgtggtctcataacaacactctcattatataacttctcatgtgtggttctcacagcgcgcgtgtcacaaaacccgagggggcgacacagatattgaggctgataatctcacatctacatatagagagagatatagagaaatcgtcgttgcgcaccacaaaagagagagagggggcgcgtctctctcctctatatatatagcgcgtcagagaaaancctctctctctctactanagcgcgtgtggggagaaaatatctctcttttatacacgagaaaatatctctctctctctttataggcgcgcacgagaaatatagagctcttctctcttatatatattgtggcgggcgtctctataaatataaaagcgctatctctctataaccccagagggggagtgtgcgccaccccctcttatatagagagacaacacacctctccatagagagaactacatctactgttatgcggtgtgagaccagaaagactatctctccctccaagatgaggggggngggctccaactgcgccgggngacaacaaagagagcaatagtcttttctccccgccggggaggagataatgtgtgctntttaccaatctccacgaggggaggttaatctcctccaccacgcagggtggttatatggtgggcggcacgaaaactctttcctgtttaaagaaaaccactacccagcgcggttgaagaaacctccccgacgaagcagcacgctggtggttctctctcccccacagagaaaagtcggtggggtccgcccccccaggagaagcacgcaaacgaggggcggcacattttctcctctatatagagaggagaaacccccaacctcccgagggggccttaaatattacctcaccccacgggggggcgggaacacaaactgcggacagaaggcaacctctacacgagcgcccaagaggaaataacccccccattagggacggagccttctcacgaggggggaaacataatagaaaccaggcgggttcacctctctcttcgaacgcccaagcacgcggcgggccaagaaaaacccctcatcaatatggcgcgtgggagaaacaattcgcgggggatatcagaagggcctctcacgggggagaaactcggccccgcgggaggggggcgagcagagttatacccctttaccccccacagagcctctcgtggggcgtgcggggaaangtcctaacaacaataccgagaagacgagggcgcgcagctctacata

SEQ ID NO: 618118 - DNA, 402 bp, Homo sapiens
cctcacggacgtgcgtcggtggaccacgtaccaccaagggtcactggagatcggctaatgggcccgaatgcgtggctgcgctgtatatttatagtcatacaaggcaaggggacaggttatggagtgtgagccatctccaatgataggtcaggtcacgcaagtcacgtgtccactgggcccttccctgtttggcagccaaggtggagagagaggacagctgacgccattattttttctatgtattcaaagactttagcactttgactgattctgctactgctatctagaagacagagccaggtgtacagagcggatcatgaaagtggaccaggagcgtgactgctgaagcacagcatcacagggacacaggcctctggatggctgcgggcgcagtctgtgagg

SEQ ID NO: 618119 - DNA, 165 bp, Homo sapiens
tccatagcgtctatccggccagagcacgttgcgaggggacttttttcaggtggctgtaagggaggcctgcgtactctggttagttggactgcctcgttgtggaactttctcaaaagtataccactttctattaagtggattggggagaggtggggtggtatcaga

SEQ ID NO: 618120 - DNA, 1476 bp, Homo sapiens
tcaagcaaatgaatacttttattaacagtggataagttttgtgggttgtgtttaaacatgtggtagggttttgtgaccctcaaatatattgtgtaaggctcgtgcatacctcaaatgtgaactttacagtcgtggccaacgttagtgaccctttgaagagtgcctcttcatagtctccagtttaggggctccaatgtgcaagacaggtctccatatacctcttacattcccacaaggcccctctcaaggggcctttggccaattctttcacattttaatgtgccaaggctccttcataaaacggcatatcgggggatatttacattcaccacttggtgtaccagcaatatattcagagcactcttatattctttcatatttagagggattctccagtgtgtacaaaataagaaggcgatggagtttgagggtggtggctccaagacaaatcctccacacagaaacgagggtatacccttagaacacatagtgtgataccccaacaaaaccaaaattttcaaaaatgtatgtgcgaaaaccaaaacagacaacaatttcgtctttcccactcccttgtgggggctccctccaccacaaaaaaacacaaacaaaacaaaaaggggggggggcgggggccgaacctcaagcaagagaattaatctccccctagggagggggggggccccacaagagcttacagacgcgcagaaatacccccagaagcaatatctctggtgtgatcaaccacagggggggggcgcccccaaaaaaaagagcagagaagcgcaagcaaaataaaaaacaaggcacaaaggccgccatgaggcgcccaacaggtataacaacaacaaagcagacctagcagcaacgggcggaacaacacgcgtgcacacacatatgggacaaacctaggggcgacaacaaggaggcaccaccctacaacatcagcagaaggggagggggcgacacaaccagcaggggcacacacaaaccacccgctaagagagaaattcaaacgaccacaaagacgaaaaaattaatcaacactatacacaaggggacaacaggggcgtaacaacaacacaccccgcaactagcaccgcacatcgcgacaacacattcgggcccaccggaagcaaaataacctctagaaccaccattataacacggcaaacaatcagacatacacacagaccacccgacacgacacccaaacaaacagaacgaaggaccaagcaagagaagaacccaacaatagaacaaagaacagcagacagaaacgccggaacaaactagccatgacgctacagaaagaaacacaaacgacgacaaaacacgcaacacacgaagaacaaacaaacaacaacagcaacacaccacaacaaacacaactaagaaaccacaaacatcgtacagccacgaaaaggccgacaacagccaaacagcacagtaacgcaatagagagaaagaacaaaa

SEQ ID NO: 618121 - DNA, 263 bp, Homo sapiens
ggggggggtttttttccccccccaagggttttaagggtgggaaaacccccccgggccttccccatggtttgggcccccaccccccttaaaacccggggggccttaaaaaaatttggggccccaaggggggggggcccttttgggggctttgggggcgggggcccccccccccaccccccggcccccgggggccccccggggggggggcccaaaaaaaaatattttgggggccctttttttttttttattttttttttccccca

SEQ ID NO: 618122 - DNA, 228 bp, Homo sapiens
ttggcgggaaagggcccccccccctgggggggttttttttttgggtttttccttcccccccaggtggggccctttttaggggtttggtccccccccccttttttttgggcccccctggggggggggggggtgggggggcccttcccccagttttgggagggccaattttggggggggcccttttttcctttttggggggggaaaattatttagattttcttgtcccca

SEQ ID NO: 618123 - DNA, 138 bp, Homo sapiens
tgtttatcgatgccatcaaaaacaatttctgccaaaccttggggaaagtatcaggggttgggtgggccaaattcctcatcaagatagtgcaaacgggtttcctccaagctgtgacttctgcagagacagaaatgtccg

SEQ ID NO: 618124 - DNA, 136 bp, Homo sapiens
attcgcggtcgagtcgacgtcagcctccctggctgatacccttaagctggaactccaaaggtctctctgatcccaaacaccacccgcttaaacgtgctgcatgaacctgattcatgggtctctctctctctctctc

SEQ ID NO: 618125 - DNA, 213 bp, Homo sapiens
  misc_feature (1)..(1): n is a, c, g, or t
  misc_feature (58)..(58): n is a, c, g, or t
  misc_feature (81)..(81): n is a, c, g, or t
  misc_feature (105)..(105): n is a, c, g, or t
nctttgtcaggacaagactcttcaggaactcacttttctggtcttgtaactatcatgntaatcttttattggtacactgtntactaattataattgattgctatntatagccagggagcatatcccaggcatgcctcatctatttactaacaacaaagtatgcttactttatctacatagtgccacgggtttctcttttttcttctctttttt

SEQ ID NO: 618126 - DNA, 179 bp, Homo sapiens
gggaggtgcaatggcacaatcttggctcactgcaacctccgcctcctgggttcaggcaatgtttcctgcctcagcctcccaagtagctgggattacaggcacccaccaccatgcccagctaatttttgtatttttaatagagagctaataattgtatatttaataaagacgggtttcac

SEQ ID NO: 618127 - DNA, 899 bp, Homo sapiens
cccttgagcggatggtctgtatcgttccaacctctggacccaggacaacggcattctgatccattctccgaacgctgtagcccttggcctagttattacttcaaacccatgatgaacggagtaccggtttgagccatcctcacagacttgatcgagtgatgcaggcaaggccagagtcctgaagatcaccatacacggggtattcgagaaccgccttacaggtatgctcatggactacatgttgtctatcctgtaaacggagagactccgattcaaggggtttgccagggatagctggtgcgtgccaagatagtgagttgtcgagcgatttcacgtgcgcacgataccgtgggacagacggaacatgaggggcccaagtttcggggcattgaggtgcgtatctggttgcctggtattgttgtagtacccctaccgatgcaagtctcaaggcgtgaatggcaccccggacccacaatatgcagctgggcgcatctcgcactcaaccaataagaggttgatacgaagcgtgcggggaatccattgcattctatgacttgcatgtaaaagcattaattaagtggttcttgggccaagagtctatgtctagcctagacttatcagtggtgggacatgagttgacttcgctgtcctcatggagaataccgtgtcacataacaggtcaaatgtggtaacagccttatacaagatatagctaaaaaaagctcggacgtaattcctaactgcaagaatggttaacccgttgtgtccgagatacccatggagtcttaccatgtttaccccccctatatggtcaaaagaaagggcgaagaactggtgtttttgccttcaatggattttggaaatttcccatgaattccaggttggataatttgtggccc

SEQ ID NO: 618128 - DNA, 263 bp, Homo sapiens
  misc_feature (42)..(42): n is a, c, g, or t
  misc_feature (92)..(93): n is a, c, g, or t
  misc_feature (153)..(153): n is a, c, g, or t
  misc_feature (162)..(162): n is a, c, g, or t
  misc_feature (177)..(177): n is a, c, g, or t
aaacgaggggagaatcaacagagccaaaggactaataaaatnaatgaatcctggtgagactaatcaagaaaaaatagcaccaacaacaatgnngagaaaatggaaaaagggcagagtatttcaatgattacgaagatgggcaaaccaatcaangaatgattnttaagccttcacgtntgccctgtaagcaaactgaagacgtgcaagtcatcctttgccctgggagagttaacttaacccacagggacaacgagaagggacag

SEQ ID NO: 618129 - DNA, 190 bp, Homo sapiens
atgagacactgctagcggaacgaacggctctacagaggtaaatctagtgcactttcccctacagctagctgtccaggctccagtagcaggaatcaggtccccaagatttcagtttacaactaggagaaaaagcaggagggtaccccaagtgataccaagctatccaactagggaggggccccacgaatgc

SEQ ID NO: 618130 - DNA, 84 bp, Homo sapiens
acggccgtgtattactgtgcacggactgggtatagtgggagctacttgggctttgactactggggccagggaaccctggtcacc

SEQ ID NO: 618131 - DNA, 467 bp, Homo sapiens
  misc_feature (343)..(343): n is a, c, g, or t
gagacaaggtctcactgtgttgcccaagctgaagttcaggggctcagtcatggctcactgcagcctcaacctcctgagctcaagtgatcctcccacctcagccttccaagtagttggaagtacgagtgtatgccacaatgcctggctaatttttgtattttttgtagagacaaggtttcaccatgttgctcaggctgttcttgaactcctgagctcaagtaatctgcccacctcagcctcccaaagtgttgggattacaggcgtgagccactgtgcccagcctagagttttctatagtactttttttttttttttttaaacagggtttcactctgtcacccangctggagtgcagaagcacaaaggcacaatctcggctaactgcagtctttcaagttcaagtgatccttctacctcaacctcccaggtagctgtgactggaggcacccaccaccacgccccagcta

SEQ ID NO: 618132 - DNA, 319 bp, Homo sapiens
  misc_feature (54)..(55): n is a, c, g, or t
caaaactgctgcccccaaaggatattaaaaatatttttattcagccaggcgcanngtgtcacgcctgtaatcccagcactttggaaggccgaggcgggcggatcacgaggtcaggaaatcaagaccattctggctaacacggtgaaacctgtctgcactaaaaatacaaaaaattagccgggcgtggtgcaggcgcctgtagtcccagctactcgggaggctgaggcagaagaatggcgtgaaccggcgaggcggagcttgcagtgagctgagatcgcaccactgcactccagcctgggcaaagagtgagactccatct

SEQ ID NO: 618133 - DNA, 189 bp, Homo sapiens
cggaaggatctttctcacaacctagaaacccccatgggatgacccccagcctggctgggggtatgtaccatgtgtgctctccggtgaggacacaggaaacttgaacactaaatgatgcccccttatgctagtctttcgaaagacaaagaataaatggataatctgcccacccggcctggttatcctcag

SEQ ID NO: 618134 - DNA, 365 bp, Homo sapiens
  misc_feature (1)..(1): n is a, c, g, or t
  misc_feature (346)..(346): n is a, c, g, or t
  misc_feature (360)..(360): n is a, c, g, or t
nttcggcacagaaaagaatataaactattcaaaatattgagtgaattaaacaagattgcctgatgattttatttctatatgacaacaagaaaggaatttaaaacataccatttacaagcagaaagtacttgaacagttggatatctgtatgaggaaaaaaatgatcttcaacctctgcctcatatgatagacaaaattgcttcaaaaaagtagattatagatctaaactgaaaagctaaaattatgaatttttagatgaaaaaatagaagaaaatctttacaaccttagggtagggcaaaggttttcttaggtcacacaaagcctttaagcatttaaaaaattccngattaaatttaggntgttc

SEQ ID NO: 618135 - DNA, 484 bp, Homo sapiens
  misc_feature (15)..(15): n is a, c, g, or t
  misc_feature (67)..(67): n is a, c, g, or t
  misc_feature (94)..(94): n is a, c, g, or t
  misc_feature (99)..(99): n is a, c, g, or t
  misc_feature (101)..(101): n is a, c, g, or t
  misc_feature (109)..(109): n is a, c, g, or t
  misc_feature (112)..(112): n is a, c, g, or t
  misc_feature (119)..(119): n is a, c, g, or t
  misc_feature (128)..(128): n is a, c, g, or t
  misc_feature (147)..(147): n is a, c, g, or t
  misc_feature (150)..(151): n is a, c, g, or t
  misc_feature (178)..(179): n is a, c, g, or t
  misc_feature (199)..(199): n is a, c, g, or t
  misc_feature (201)..(201): n is a, c, g, or t
  misc_feature (205)..(205): n is a, c, g, or t
  misc_feature (212)..(212): n is a, c, g, or t
  misc_feature (231)..(231): n is a, c, g, or t
  misc_feature (238)..(238): n is a, c, g, or t
  misc_feature (245)..(247): n is a, c, g, or t
  misc_feature (259)..(259): n is a, c, g, or t
  misc_feature (316)..(317): n is a, c, g, or t
  misc_feature (319)..(320): n is a, c, g, or t
  misc_feature (323)..(324): n is a, c, g, or t
  misc_feature (328)..(328): n is a, c, g, or t
  misc_feature (347)..(347): n is a, c, g, or t
  misc_feature (354)..(354): n is a, c, g, or t
  misc_feature (356)..(356): n is a, c, g, or t
  misc_feature (366)..(367): n is a, c, g, or t
  misc_feature (369)..(369): n is a, c, g, or t
  misc_feature (374)..(376): n is a, c, g, or t
  misc_feature (380)..(380): n is a, c, g, or t
  misc_feature (392)..(392): n is a, c, g, or t
  misc_feature (399)..(399): n is a, c, g, or t
  misc_feature (477)..(477): n is a, c, g, or t
ataaacaaagatttngccaagtaaaagacatcaaaacaaatagagagaggggggttgggggggacanaccgcctacagcatctcaaaccccaanagaangngaggggcnganggaacanaacataggntacacatgtaagacacggnacnntacactaggtacaggggagtatgaacnntccacgggcctcgccggggngngcanaagcccnggggggggaagagaagggnagggagnaggcaannnagcataaggggnagttctttaaggtgggagggagaaccctgcgggagggggaggtggggggaggggagnngnnggnngagnagaaggcatgcccttaaanagacatncngtaacagcgnntncgggnnntggnctacttcttgtncttcttnttatctctctctctctctctctttcactccatttcattgaaccgtggcaaacatggctttccggacagtatctctgtnggaatcg

SEQ ID NO: 618136 - DNA, 152 bp, Homo sapiens
tcccgtattatctggtgtgatttagtgggataaagagcacttgtgtgtgtcgctgcggtatcccattgatacgccaagaatactgcggggataggttagaggccgagtggcaggataggttgaggttcgttcccaaaaggtcagactagcac

SEQ ID NO: 618137 - DNA, 156 bp, Homo sapiens
gagtgcactaggaaacctcaccaatgcagagaaccgaaaccccagctgcgaggtacaccagggagccggtgacatacactagctatatgaccctggcctgcaaggatgctctatcaccagtagtgtcaacaagcaggtccagtccagaggctagga

SEQ ID NO: 618138 - DNA, 661 bp, Homo sapiens
cgtggttgtgtcccgggtgttttccggcgaagggtatcggcgtgtctcacgatagcccggttgtcttgtgcgggcgcaggacttgcctttgtgaatcgcttcctcggccgcgttgtatgggcccgggttggcgggataagcggggcccccgtgccggtgccgcccggtcttcgcgggggtcttgcgcatgtcgcgacgccaccagtttcgggcgagtgggcttattggcgaagccagttgtcatgcgttatgagtggcgtcttgcgcccgcggttcacaagggattttctggttctccccccttctggaacttcgcggggagccgccgtgcccccccctgtatctgggtagggcgcgcccgcacacgccgcgagtggtgtcacgccaatcgagcgccacgcacatacatagtagaacacacagacatgtgtgcgggccggacagagagtattctatctcgtaccccgtggtccttgcaatactcccctctctacctgtggggaaatacatatggcgggaatcctcttattgtttgtcggtgtgaagaacccgccgagccgcaatgtttataaatgctaactcctccttgttgtgttaacaaatgtgtatcagtgttttctatccaaataaaagaaattaaaagacccgacatagatcagaa

SEQ ID NO: 618139 - DNA, 157 bp, Homo sapiens
ctagaggatccctgcaggctctctacttgttcatgtagtgcatgctctacatcttcttcagcatcacaaactcattctcagcagtgtgtactgcgtgttgatttcatcctcatcacttgtcttgaatgtcttccacccgtgtcctgcatgttgtctc

SEQ ID NO: 618140 - DNA, 573 bp, Homo sapiens
aataacgtttaatagtaaggaaacatgtcaaaatacataccagaggtcataaatgctaggagaggctctgagaaaggagaaaattagcataagttagattaggtgggggaaggctttcggcaaaacgtagaacatcccaagtctcaaaaaagttgctaggatttgattaacaaggaggagtagtaagaatttgcagggttgagaaatagaaggagggaaagtaaataacatgtttgttagtgagcagacaggtccaattggtcttggttcaggcagaaacacagtggggaataaggtgaggtggtaatgtcacaaggaaacagaagacaaggtaaatttagattgtggaaagcctcaactgccaaaagatatttaatctctatcctttacacttgatcttagtcaaaaggccaagaagtcacaatctctattttttatcttcaaagtttttattcaaaaaagtgaggtacgggaattggtattttcaaaagattgagagatttcccaggacacataaggatggtagaaaatagagacaaggagaccaatttggaggctactattatggtgcca

SEQ ID NO: 618141 - DNA, 114 bp, Homo sapiens
caagccaaatttcaaccatctttattacacatacaattctattaatagcacaaatgcactttcaatacatgtctgcatgtgtgtcttgtgtatgttgtgtgagacagcagagaa

SEQ ID NO: 618142 - DNA, 248 bp, Homo sapiens
aagttgctgctggatactttaaaaatatctgccagaagagtgaaggcactgggggtttacagcaagtatttactctttaaaacggtttattacttcaacaagcaaagagcaaaccaactggagaaatgtatgtgaaatctttttatttatcaagttgtatactacagctaaatatcagattccttttacatatagacctcgcaagggcacggtaagaactgagcacttgtgttattcgagggataaag

SEQ ID NO: 618143 - DNA, 516 bp, Homo sapiens
tagcggtcctcgcgaacgtgtatcctgatcccagtgtactggtgggaggctgagacaggataatcacttgaacttgggaggtggaggctgtactgagctgagactgcaccactgcacttgcactccagcctgggccagacaaagcaagactctatctcaaagaaaaaaaaaaaaaaaaaaaaaaaaattctgaatggctaaatttttccgggttttttatattccctacgggtcctggctaggctccctcttttaaaaaattgttctggttttcctctctggtacgtcaactgggctttaatattcttttcttctggctggcggcttttttttccctggctatcagtaccatcatagttcttaatgttggtctcctctggacactcattttctttacccttgaatggtgcacccttgtaatccagtttgggcacagtgaacccttaagaggtgttggtcatttaaaccaagctcaagaattagggcaggtgacatacgggataccacgttcgcgag

SEQ ID NO: 618144 - DNA, 239 bp, Homo sapiens
ggcagaaggatcacttgaggccaggcattcaagaccagcctatgcaagataatgagaccttgtctctatttaaaaaacaaaaagcctggtgtggtggtgcatgcctgtagtctcagcctcctgagtagctgggactataagcacgcaccactatgtctggctaatttttgtatttttagtagagacagggtttcaccacgttgcccagggcagtcttgaactcctgaccccaagtgatc

SEQ ID NO: 618145 - DNA, 601 bp, Homo sapiens
  misc_feature (37)..(37): n is a, c, g, or t
  misc_feature (41)..(41): n is a, c, g, or t
  misc_feature (83)..(83): n is a, c, g, or t
  misc_feature (93)..(93): n is a, c, g, or t
  misc_feature (124)..(124): n is a, c, g, or t
  misc_feature (168)..(168): n is a, c, g, or t
tacccccaggaaacagcttattccatgagatgttganagcngcagtgtccctgtctgagaacgatacaacgcattctatgctngtggaagcanggctgaacatatcactagtgtatcacggccnattggagaaacaaggccggggctgactatgcctcgtgtcttggnagacaaaaggcagggggtcagtcagtctgaatattgcatcttttggagaaaaaaggcagccagatggtccacgcagcactggaagaagagggtggtgatgtggtcagtatactgtgtccctaagaaatgtatgtactgtgaaataaggcagcaggcaggatgacttagagaactaaggttgtgggtggtctgttcattgtgtctataagaaaaaaggcagcaggatgacttgggaatcatgtccattggagaaataaggctgcacagtggtctgtgtatcgcatcctttggagaaggagcccacctgtcagagcaggatgcatctgttgggggcagggctcacagtgcagccccattgcagccagagggtaggagctgtagagaggggtagcagctccctggtcctcatggtcaggctatttcttgtccatca

SEQ ID NO: 618146 - DNA, 395 bp, Homo sapiens
  misc_feature (2)..(2): n is a, c, g, or t
  misc_feature (11)..(11): n is a, c, g, or t
  misc_feature (54)..(54): n is a, c, g, or t
  misc_feature (353)..(353): n is a, c, g, or t
  misc_feature (365)..(365): n is a, c, g, or t
antgtgtactngtacaaaaagttcatggatttcaactgaggaagaggttttgcnaaaattgcttcaaaaatgagggggaagccatgcctggctaattttatatttttagtagagacggggtttctccatattggtcaggcttggtctcgaacttgtgacctcaggtgatccgcccgcctcagcctcccaaagtgcctgtagtcccagctgctggggaggctaaggcaggagaattgcttgaaccagggaggtggaggttgcggtgagccaagatcgagccattgcactccagcctgggcaacaagagtgaaactccatctcaaaaacaaaacaaaacaaaacaaaacaaaacnaaacaaaacaanacaagaactggaagcaataaaggagagctg

SEQ ID NO: 618147 - DNA, 508 bp, Homo sapiens
ctttaaaaactggaaccgcgtgaaggtgaaacacccactcgcgtttggagcgcagcactccccccacagtgtcacccaagtggccgcaggaactttgattggacacttgttgtttttttaaatagtcacttcccacatatgagatgcgcttgttaccacggagagtcccctgccactccttaaagcccccccccttctctctaaggagaatggccccatcctctccccagtccacaccacaggggaggtaataaccttgctttcctgtaaaattatgtataatgccaaatttttttaatcttccgcccttagtacattttttattttgttttattttgaactgatgagcccttctgtgccccccccttccccccttttttgtccccccacttgagaatgtattgaaggcttttggtctccctgggagtgggtggaggcaacccgggcttagcctgtacccatgacttgagacccagttgaattaaagtgccacgaccctttaaaatga

SEQ ID NO: 618148 - DNA, 198 bp, Homo sapiens
cacgatggttagtactgcatgtgggtagataggttatattttcatacaaatatcatcattgaagagtgaaaagggtgttacataaatatctatcataagacgtgaggttcatgggtctggccagagactgctttcctccatctcatttcccgccactttccctccctcccactgcaatcactctttctcccctgtagt

SEQ ID NO: 618149 - DNA, 133 bp, Homo sapiens
gatcttccggttaaaaaaaatctcatgagtctagtgtcctttgccaggcctagtgataggaacctcttcttggccatatttagttcagccattctcacttgtagatcactcttggtaccaaatctgttgaccg

SEQ ID NO: 618150 - DNA, 677 bp, Homo sapiens
aacttcaccgatgatcgacgttaagatgatggagcgcgtggttgagcagatgtgtatcacccagatatggagagggaatctcctaggccgtattaccagagaggatcgagcgatggtcctcttctcctctccacctgatgatcctcctgatctctttcctcatcttcctgatagtgggatgaggaaggtcttcctgtttgttcaccatctttctaatcttttgaccaagcttgagggaggcggtatccacctgcagtccctttatagtggtggtgtctcacatcttgtcttctctcttggtcccggataggctaatccatacccttggcactgatgggcactggaaaatcatcgagtagactctgagatgctggtcaatgccccctttgattgagttcatcatgagccgtagctaatgccaggccagtagaagtagtaatgcagcgaaataaactcattggctttaatctgtgacttagttgtcttgtgaccgttacgatgctagactacggttgaacgctaataacaatatctcaggaacagtctgactatacctttgcctggataacctcgtggctccttcagggagcgtagagctctgtatactaatgccctatcttagtagagatttcgtagctattggagacgatattcttgcattttaagaagaatccgag

SEQ ID NO: 618151 - DNA, 113 bp, Homo sapiens
agcggccgggtcctccctccccagacccaagagaggccaccgccagcgcagcgcgtgaaggaggggaggtacgggcaaaggatcaggctagctacaagtggccgggccttgcc

SEQ ID NO: 618152 - DNA, 394 bp, Homo sapiens
ggaactggacagcagacaaaataggtcatagacagaatgactgtagattagggccaaggagaggcattgggattggggaactggaggtcggtggtggagtggagcggtggttccagacacaggccaccgttctaaggagtgtggctctaacaggaggacaggaggacatgggctcgggacaggaggtgcttcttaacgtgacaaggccaggccccttacctaagtggacactagtcctggggccctctctgcagggttggtgcacatgaggaaactaaggcatggccagcttgagtggtttcccaggtgacccaggtggtgtctcgcagacggagccagaactcaacctcgggactccgactccagcagccccgggccctgggtggccagagtg

SEQ ID NO: 618153 - DNA, 270 bp, Homo sapiens
agaaggtatgctgagcaaaggggaaaagccacttataaaaccatcagatctcgtgagaactcacctactatcatgagaacagcatgggggtaactgccaccatgattcaattacatcccacgtggtccctcccaggacacatggggaatataggagctgaaatataagatgagatttgggtggggatactgccgaaccatatcattccactcctgggcccttccaaatctcatgttctcatattttaaaacacaattacgccgatgcgga

SEQ ID NO: 618154 - DNA, 190 bp, Homo sapiens
gaccagactgggcagtatggtgaaggcatgtctctactaaaaatacaatattagccggacattgtggtgcacgtctgtcatcccagcagggcaggcgaatcgcttgaacccaggaggcggaggttgcagtgagccaggatcatgccattgcactccagcctggtcaacagagcgagactccgcctcatta

SEQ ID NO: 618155 - DNA, 409 bp, Homo sapiens
aaacaatcacttcccatactattaagttatttggtttttccccaactttactattatacacaatacttcaattaatacatcttacgctaatctttgcacactttcataaataaatactgaaatctttaattatagggttaatgcatatttaattttttttaagacttatttgctacaccgtttaaatgctttcaaatagcaacctgaaattccaatcaatttatgttgctataacaggtcaattcattgggtttctttttttaagacagggtctcactctgttgcccaggctggagtgcagtggcacgatcatggctcacagtagccttgatcattgtagccctccctgggctcaggtgagcctcctgcctctacctcctgagtagctgaatctgcaggtgcccgccac

SEQ ID NO: 618156 - DNA, 416 bp, Homo sapiens
tcctcatctggtttcattcaactcatgtcaaagcgtcagtcgtgacccatgtcaaaggtatatgcagctggatgtaagttaaagtggagaaaacagattttattcagtcgctgctgacagcaggggacagagctgagctcctttcaggtttgtgcagatgtgactgggcattttaaagggagtgtggggaacaggtgcccaaatggagtcagggaagtgaaaattacagaaagcagcaagagggttgggtagcatgaatgtgatgagctgactctgctacgagctggcaggttggggctggcagggatgggctcctgctccccttccccagccccagactaggagacaggcctgttttcctgatgattacgttccaaagggttggctctcggtccttgagaaggacatcccagagc

SEQ ID NO: 618157 - DNA, 609 bp, Homo sapiens
  misc_feature (351)..(351): n is a, c, g, or t
  misc_feature (385)..(385): n is a, c, g, or t
  misc_feature (482)..(482): n is a, c, g, or t
aggtattttaatagcaaacttacaggaacagcacagaagacagacaacattaaaaacagtgtactgggcatgtgtaggacaacctcagttagaaaacgtataggtgaagtggagtggaactctacgtggtagtgatcaaaaagtgctacaacacaccattttagttgtgcgcatcaataagaaaattttacttgtggttttaaaaaaaatttccaaagtggcgtggcatggcgtccagaaaaattttaaccgaggtttaatttataaattatttataagagtgtgaacgcgcgtgaacactgggttcacgtggaaacatttttacactgggcatttaagtggctttagcgntctccggcattttatatttaacaatttcacacancaaagtgcaaaagctggaaaaacgtggccaaataccgtggatttcgtgtccccatatttttccactccgcaatcatattacttagggatacctttgngacccctagtggaaaacaaaatatctaagcgttcagaaactacccaataacgaggaacgaagagaaatttcttttctatttattggggagaaagtgaatcggttccccatcaagagcggggccaaaa

SEQ ID NO: 618158 - DNA, 549 bp, Homo sapiens
  misc_feature (421)..(421): n is a, c, g, or t
  misc_feature (504)..(504): n is a, c, g, or t
  misc_feature (536)..(536): n is a, c, g, or t
gacagagtactcctgctataaggcccagagagaaatttctctctgcttttttgggacattttcctccctcatgatgcagtttttattaactgcggcaatccgctgattattaatttccttttaataaaccctttcttttctcacgcctaatgtagcttcggagagccacggcctgttacccagctcctcttaagcttcactgctgaacctaagtgaaccagtgctcgggtttaacgctgtttcagtttagcccatactgaccttctctggtatgaatttcctttatcctttaattatttcatggagctccaaaccagcagtgcctcttccaaaaatcctttgccgtttctcagtcccgcgttggttcgccaaatgttgtgtctggccagcagatcacagcctgggttctagcctggaaagnaattttggaaacctggaagagaagagggtctaggtggcaagataaaaaaatgcagctaagacagttattctgatcaaagctcnattttactggtctgcacgcagttataaagcangggaaagggggcc

SEQ ID NO: 618159 - DNA, 421 bp, Homo sapiens
gatatatgtgcatgtttgttttataggtaaactatgtgtcacaggggtttggtgtacagattattcgtcacccaagtaatcagaagagtacctgataagtagttttttgatcctcatcctccttctaccctccaccctcaagtacacatatgcatatgtgtactcaaagtttagctcccacttatggtgagaacatacagaatttggttttctggtcctgtgttagttcacttaggatgatggcctccagctctttttatgaacacatgtactgaatgtgttatgagccaagataattcatgtctaaactccacagtatttctgcaaatccctcttttttaatggcaaaaaataaacagcactattatatgtagtttaagtttatctgaataccatatatataaggttttatatgtatata

SEQ ID NO: 618160 - DNA, 229 bp, Homo sapiens
tatataaatcatgagtaatgagcaggctcagtcataggggaataattgccaacaaacactttttgggaagcctgggaccatggctctcgcgaggaatctgtgacatctcctggcatcatttgagtcctgccttctcaaagtatttgtgccaggcagacgtgattccggccaggaacagaatgaattcactgaaggtccaccttggccattctccatttggcggccaggt

SEQ ID NO: 618161 - DNA, 1381 bp, Homo sapiens
tcaaaaaacccctagcaatttttggattttctctatttccaaaaaaaggcaaatactttagtggtgttcacacaagggaaacgggggcctgggcgcgggcacaagggtgtccttctacaaactatagaacgcaaggggagaagggtggggctacaggggaaggctccaaagatccctcacaggcaggcccccgggtttccctttccctggcgccacccacaagccggaagtcttgggtccttcccaggccaggtacacgccaagattccaaggggggacacgcgcaagacaggcaaacacgggcgctctgggtgtcccccagagagggatgtggtggagaggtcaggggctggctatgtgtgtggagtccccatctggcaagaaggtgggctgaggtggcgccaatggactggagatttggcgcattgggccggataaaacacaaggagaaaatccccaggggacaagacgtctgaggggtgcctaacacccaatatgggggccccacaaactgggcgaacctcccctttaataaggggggagcatatatggcgccctggagtaagtgtgaagacgcgcccacatggcagagatctaaaaaaacattctctgagaaacacccagtgggcgtcccggcgcatcacactttagaaagtcgtctgtgggcaatacagtcatccctagggtgatctcacttaacttccttaagagaacacatcgcccacttgtataagggtattttcgggcccccctctttcaaacaatgtggacaagaggccctggggactacaagaagcggccccagggaggtaggaccactaagaagatgaggggcccttgaaagcaagggcagcatagggggcgaccacctcgtcgacgccccaaagaaatgcaccacgacctctgcgccgctcaaaacacgaccagagccaacaaaaccccgctgaggaaggtcctcctaaggaaaacgatctgcactagcgttacccccaaaggggaacaggcagctcaggggccccaccggggggactacacaccaaatatcttagagaaacgaggtcagacgcgaacacttcaagcaaggccaaacaggcaaaaacaaaaaaaagagagacgaaagcaaagtactaaagcggcaacacgagaacacccgacaaagcacacgcgaccaggcacccaagacgacgacagcgaatccacacacccacaagagaagcgccctaaagaccccaaacaaagggagacaacatacaacaacacaagaagaagaacaacacgcgaccaagcaacaaactcataaacacatcaataacaggcacacccacagacaaaccacacatagtaaaaaccaagaggacacagcagtaaaaaaacaacagag

SEQ ID NO: 618162 - DNA, 273 bp, Homo sapiens
aaatatgcctttcgatcaatcaagaagaagagtgtattaacagaaagactagtatagattgatcggatgtgtacgcgaattggtaaaccggatacagcagagtctgaacgtaaggcacagttatcattcgtatgtacacacgctctagagactatcagagacttagctcttcaattaccgataagttcgtatccacaggattacagctagctgagatcactgctaactagtagctgctaatagcgttcagagctcgaatcgagcagctacgga

SEQ ID NO: 618163 - DNA, 1723 bp, Homo sapiens
  misc_feature (245)..(245): n is a, c, g, or t
ccaccgtgtgtgttatctacgtttcgtggggtggtttgcttaccagcacgaccatctttttgtgagtgtgtgcctcttctttgtgtggttgttgtagtaaggtagtgcttttgttgtgggctacctctccaacctaatagttgtgggggttttgtatcacaccactggtggtgtgctcgcccgcttaagttggtggttggtcctccctccgccgcaggaatgctgtttttttttcctgttttttntggttggggggcgacagctactattgtgatttagaggcgctccgttgtctctttatgtttgtatcgttggatctgtctatctgttgttgtggtggcgcggcatagatagtttttgtctctagtgggggggtagcccacccgggtggtgttgggggtttcttcgcatccataggtagttgccttctttagtgagccttgtttgttgtgttcgcccgcccgcgtgttgttgtggtatcgccagcgtggtgggtgtgtatataataggagctctctctttcctcttctctgttcctaccaagggggtttcttcggcggctttttcctttgtggggggatcccccgttttttttttggtgtgaggcctctctcttgtttttgttagctgagtttttgttgatgctcctccctccgcctcttctgcgcataatgtggttgtgggagctccctctcccggcccactcgttgtggtgccttctgctggtgtggctgtgttctcctgtgggtatgtggagtattcccccgcgggggttctacgggatagttttcttggggtgccgtcgaccccacctaaagagggggtgaccttttctgcttgtgtggcacgcaaggggttttttctccctgttttgccccctgctcctgcgggttttttctcatagttcctcacaagaggggctctgtgggcgccccgccgcgctgtcccgctgtgtgtgtggcccccacgttctcgcttgggtgctttcccgctgcgagctgctctttctgttgaggtggttttcctcggtgcccccttattatggccgtttgttgtgtggctgtcccacaggagagggccgtttggtgaataccccacggggacgaccccggcgtgctttttttttggggcacacgacgcgcttgtaaaaaaggggggcgccacatatagagggaaagggcgcacaatagggatacccccccgggtctgtttgttttccccccccacccgggaatatttgggtgcgaaagaaagtgcgcccaacgaggagagggatgtgatcctctctcatcgcgccacatatgtcggccctcttttaccttcacagcccctcgagagggagaggggggctttgtgtgtcccctctccctttccccggcgcgacacacaagcttccacagggcacagggctttgtgccactctcttgggcgccgcgcgccacacgcacactttcctccaacagagcaccaaacattctttccctgctgcgctccccgtccgtggggatctatccacgttacccccccccccatgttccagaccccaattttcccacgtgccccccttctcgtgtttcccctgtgtttgcctgtagcctgggcatgtctcccgggacccagaagcccctccgccccggtgtaatctccctgaccccttggttaattcccttaagattctataagatgtatggaccttctttataaaaaataaataaaaaataaa

SEQ ID NO: 618164 - DNA, 563 bp, Homo sapiens
gtgagcggccgccgagcgggtgcgggtgcgggcgcatcggccatcaccgcgcggcgcgcagtggacaccgtgcgtaccggcctgcggcgcccggccaccggggcggaccgcggaaccccgaggctatgtcccatgaaaagaagtttttgctgtctggcggacaattattctctcccgccaaaacccttggatatccgggggggcgccccaaaggccaaacctaattgcccccctttattgctcaagggccttccctataacctttgcgggcccctttttacccaagtagtggccccccttgtttccgcgaggccccttacccccaattaagggggtccaaggcccagggggattaccccccacgcgagttgggaccagcagagtgagacggttgtaagcaccccaaagaagggggagtattgaagcccacaaaaggggactcgcactaacacgcccgcagaagggggggagggtctaagcccaaaccagggggggcccccggtttaggggccagagagtagacggggggcataccgcagaggaggggacccaatagacacggg

SEQ ID NO: 618165 - DNA, 381 bp, Homo sapiens
caatcgcttgagcccagaagtttgagaccagcctggccaacatggtgaaaccccatctctacaaaaaatacaaaaaattagccggatgtggtggcgtgcatttttagtcccaggtagttaggaggctgaggtgggaggattgcttgtgcctgggaagtcaagactccagtgagctgtaatccgcgccactgcactccagcctggacaacagagcgagaccctgtcttcaaaaaaaaaaaaaaagggcggccgtcgcgatctagaactagtccttttgaacaacttggtttcagaatatgtaaaatgactttaaggatcttgtgtatcaaacctatccccggatgtgtgagaataatgtgttcataaagcatggatctcgca

SEQ ID NO: 618166 - DNA, 581 bp, Homo sapiens
  misc_feature (102)..(102): n is a, c, g, or t
  misc_feature (109)..(109): n is a, c, g, or t
  misc_feature (112)..(112): n is a, c, g, or t
  misc_feature (150)..(150): n is a, c, g, or t
  misc_feature (170)..(170): n is a, c, g, or t
  misc_feature (173)..(173): n is a, c, g, or t
  misc_feature (228)..(228): n is a, c, g, or t
  misc_feature (247)..(247): n is a, c, g, or t
  misc_feature (250)..(250): n is a, c, g, or t
  misc_feature (275)..(275): n is a, c, g, or t
  misc_feature (285)..(285): n is a, c, g, or t
  misc_feature (317)..(317): n is a, c, g, or t
  misc_feature (320)..(320): n is a, c, g, or t
  misc_feature (366)..(366): n is a, c, g, or t
  misc_feature (382)..(382): n is a, c, g, or t
gccctttggagggtctggggtgcctattcttgccggaatagccctctctctctagagagagagagagagagagaatatctggttggagaaatgaattggtcngctgccnacntgatatgcactagccttggctaacatgtaaagattccnatgtaatatatgtttttccntcntagtgcctatagaagctagaaatataatgttttctggttcttagctgagaaatcnaattctcttgttagctggnacnataattagatcgagaatcctggtcnaggcatgacnaataataataatagtaaattgacaccgacccnccnctatgtgggacatggcggaatgaaaaggaaatcataaatgtaaacnttgattgacatctccnaacggttgttttcattttaaataataacttgcttaaaatcactgttgtctgataattttgtttaagaaaaaaataacaccaacctgtttttcttccaaccgctatttttaaaagtcccttttaattttttgactcgagttttcattttcacctatgattctttccatgatggaggcccaaggggtcctctagatcacct

SEQ ID NO: 618167 - DNA, 145 bp, Homo sapiens
tagataggtcagtgcccatgtgttagaaagactctcacaggctcttctcccatgatctggtattaaaatcagcattcatacaagctgcttagcgatactctactgtcctctgcagattacccggtcctaggacagggaacccact

SEQ ID NO: 618168 - DNA, 183 bp, Homo sapiens
tgtatcattagaagagctgtcacatacagttggtaccatcagcagccgagacgaaatacaggggctgggagaacttcttggtaaaatctgaagctattcgggtcacgtatatatctgcctcaattctataggtcaccacgatgcatggggatctctggcctgaactccctacagctctgttta

SEQ ID NO: 618169 - DNA, 766 bp, Homo sapiens
tgtttggtgcgcacctgtagtccaagctacaggtgcaggaggatggcttgagccaaggaggtcaaagctgcagtgagccactattgtgccactgcactccagcctgggcaacaaagcaaggatcctgactctacacatttgtttttttttgagacagagtctcgctctgtcaaccaggctggagtacagtggttcgatcttggctcactccaacctccgcctcctgggttcaagtgattctcctgtctcaacctcccaagtaggattacaagcatgcgccgacgatgcccagaatccagaactttgtctaatcactctccccccaaacaaacctagatggtggaaaaccaggaataaaactttcacccccagaaaaaaccaaaaaaaaaacaaacacaacaaaacaacaaaacaaaaacaccacaaagcccaacaacacaaaacagacgggcaaaccaacaccaaaaaaaaaacacaaaaacagggtgggggggcgggggcgggccccgaagcagggtctttacaaaccaccgcgtgggggagcaggggccacccatactcgaacagccgaacaacacggcgctccccaacagctctcccacaagaccaacacgcgggacccaacagagcagggggcgcgacccccaaccaaaaaaaaaaagcgcgcgggaaaacgagcagcgtcgtcaacacccccgagcggcgcgccacgagccacggggggcaccaccacaacagggccgaacaaccgtgataataaccgggg

SEQ ID NO: 618170 - DNA, 661 bp, Homo sapiens
ggacgcgtgggtcgatgatcctggtggacggtgatggatccttccttcgtgtgcttgaaaatggagcctgcccctcggtcaacataagacccttgtgggaactgagaagtgtatatggggcccaagtctattggtgtccagaacacagacgacacgcagcccagtgcaaggtgctgtcgaggcattgctaaacgccagtgtgtggaactaggaggaggaagtattccatcttgtgacagaaaccacagcattggttttggtctacttgtgttgtcttgggggaatgacacagcacagatcttgtttgactttgttactaaacaatagagtgctccctcacacactcgcaccacagtattctgtgtcctttatagtagacatggctgtctgcaagggagcccctagcccctggcagacttagctgtttcagttgcccctatttctctctgactagatggatagttgatgcgactggaggtcttttagcactgccccttgcaatggcgcctgctggaggaggagagagctctgctggtatgagccacagtttcttgactggaggacatcaaacctcttggattgaggcctatgttctgagccctgacatgtgcttgtggcactggtgggcctgggcttctgaggtggctcctgaccctgatca

SEQ ID NO: 618171 - DNA, 87 bp, Homo sapiens
ggatttgctggtgcagtacaactaggcttaatagggagctcgaattcaaaaacgttagaagcttgaattcgagcagtagtagtagta

SEQ ID NO: 618172 - DNA, 175 bp, Homo sapiens
actgaaagaaaaaatttcttttaattggtgtgtgggtcccacaccccatctatcaatgtatgtgctatttacaaataagttctatacagtattttgcagtacctttgataattcctacgatctctattttcacttctgtgtattaactgtgaataatcagctggatattttaata

SEQ ID NO: 618173 - DNA, 323 bp, Homo sapiens
acagtaatctccctctatgccaataattagaagtgtcactaaaccatgaagctaggatatgtgcacaagtcattttatcttttctaaaggccttcagcagaatatactagaatctatatattgatgttaattttgattcagaaaaaaaaatacaacccagtatctaaaaagtgctaactagtccaagatagtcatgcatatgccaaagaaatattacacctaatctcatgtatcgcaataaaaatagaataggtcagctacttattcttaacaccctacttccagtatataagctctgtcattattaacttcagatctacctg

SEQ ID NO: 618174 - DNA, 154 bp, Homo sapiens
ataactatgtctcctggtaccaacacaacccgggaaaagcccaaaactctaaatttttcaggccacttattcggccttcggggatttcctaatcgctcctctccctcaaggtctccgaccatggcctcccttaccatctgtggcctcgccgcta

SEQ ID NO: 618175 - DNA, 473 bp, Homo sapiens
tgagcggactggccgtagtggcaggagactgcagcagcgaagggcaatgggggcggcggtggcagggccggggccgggtgacgccagctggcacgcggaagaagaagtggcccggtggccacctgagccactggctgttacctggttcatctacagatgtgcgtgatgatcagcctgggatggctggttatcgcggttgtgtctggtaccagagacatacctggcataagggtagctaccatagtactttattcattcagattgacaaagcctttgaaattctttcaaactggagccttattggacgattttacagttgtgctataggaattgttccatcttctgttgtcctgacttcttaccaggtgatgtcaagagttactctaatatgggcagtaacacatagcgtcaaagaggtacagagtgaagacggtgtcctcctgtttgttatggcatggacgatcacggaaatc

SEQ ID NO: 618176 - DNA, 194 bp, Homo sapiens
  misc_feature (4)..(4): n is a, c, g, or t
  misc_feature (13)..(13): n is a, c, g, or t
  misc_feature (23)..(23): n is a, c, g, or t
tgtnaccccattnatcgccaggnttgattcggctgatctggctggctaggcgggtgtccccttcctccctcaccgctccatgtgcgtccctcccgaagctgcgcgctcggtcgaagaggacgaccatccccgatagaggaggaccggtcttcggtcaagggtatacgagtagctgcgctcccctgctagaaacc

SEQ ID NO: 618177 - DNA, 420 bp, Homo sapiens
ccgcctttgttctagttctcaaattattactccatagtatttctgagcatcatatatagaaacttcgttcatcttttaaaatagcctgtctccaaaagataattactgcctgatctggcagagtaaataacagcctgcacaggctttggagtcagatagacctcagcttgattgctggcttggtcatttactagctgtgtgacttgggcatggtttttgagggaagcagcggttgggcctcaagtgtataactgctctgtatttgattgagatgattaattgtatctttactttgtggcccattatcattaatccaagcccctttttctttttagtctcatgtccctcattgttaatctcatctgctcccaccatctacactcgtgtattaaatatattaaatatatatctttccagtgc

SEQ ID NO: 618178 - DNA, 550 bp, Homo sapiens
  misc_feature (8)..(8): n is a, c, g, or t
  misc_feature (87)..(87): n is a, c, g, or t
  misc_feature (118)..(118): n is a, c, g, or t
  misc_feature (126)..(126): n is a, c, g, or t
  misc_feature (131)..(133): n is a, c, g, or t
  misc_feature (135)..(135): n is a, c, g, or t
  misc_feature (142)..(142): n is a, c, g, or t
  misc_feature (152)..(153): n is a, c, g, or t
  misc_feature (157)..(157): n is a, c, g, or t
  misc_feature (161)..(161): n is a, c, g, or t
  misc_feature (206)..(206): n is a, c, g, or t
  misc_feature (208)..(208): n is a, c, g, or t
  misc_feature (223)..(223): n is a, c, g, or t
  misc_feature (235)..(235): n is a, c, g, or t
  misc_feature (247)..(247): n is a, c, g, or t
  misc_feature (257)..(257): n is a, c, g, or t
  misc_feature (320)..(320): n is a, c, g, or t
  misc_feature (323)..(323): n is a, c, g, or t
  misc_feature (327)..(327): n is a, c, g, or t
  misc_feature (343)..(343): n is a, c, g, or t
  misc_feature (369)..(369): n is a, c, g, or t
  misc_feature (392)..(392): n is a, c, g, or t
  misc_feature (400)..(400): n is a, c, g, or t
  misc_feature (409)..(410): n is a, c, g, or t
  misc_feature (415)..(415): n is a, c, g, or t
  misc_feature (427)..(427): n is a, c, g, or t
  misc_feature (447)..(447): n is a, c, g, or t
  misc_feature (450)..(450): n is a, c, g, or t
  misc_feature (454)..(455): n is a, c, g, or t
  misc_feature (459)..(459): n is a, c, g, or t
  misc_feature (464)..(464): n is a, c, g, or t
  misc_feature (477)..(477): n is a, c, g, or t
  misc_feature (482)..(482): n is a, c, g, or t
  misc_feature (504)..(504): n is a, c, g, or t
  misc_feature (508)..(508): n is a, c, g, or t
  misc_feature (517)..(517): n is a, c, g, or t
  misc_feature (523)..(523): n is a, c, g, or t
  misc_feature (548)..(548): n is a, c, g, or t
aatttttnaaaaatagcttttgtataggaaaagtaaaaatgggcttatagttcagatactgagcaaatacacaatactactttttantaacaggcacataaagggtatgggaactatnggggggcncaaannngnggatagnggggcgaatnntganaagngaggggtgaggatcggagagaagtgaaagggaatgggaggggacnangcccttttagaatanttaatatacatngccttgcttctntccaaaaggnacatgtacttgtgaccctagcttttgttatttagagcactggtacagatacgctgtcccatanatnaggntcaaattattagtttnagtttcacattgtaggaatttaaganttttttttttttttaacacaggnaagaatcncatcatttnnaaagntgtcttcatgtnccatcaatgacatgctaccnganatannagantccanaggataatgggancaagntacccaagtagatgtttctggnattnttgactgcngttcangcttgtttcctaaagtatacttaanag

SEQ ID NO: 618179 - DNA, 772 bp, Homo sapiens
aggggcgccgcccgctggggtgccgcctcttgttgagtagggcgcccccgtctgttgttgcagcgacaggtggtttgcggcgcgcggcagcagagagcgcggttgtggtctgtcgtcggctgggcgcgtacccttatagtgttctttttcccccgcctcgtcgttagtgttgttttgttcgcgccagctcgatcaccgtttttggtttagaccagtctggttgaggtggcctccgtccttttcgtccctagggcatagaccattcgtccctgatttggttaactccagctcgtaacgaactcttagtgagagtcgcgacgggaggtgggaggtgcgttgggtttcccacacagtgtctctcacacttaccataagcctgaaaaccttttgaaccgacagaaagaaggtaaatactgtatgtttccctgccttcgacggagttgcgtgttcggcaccctcatcccagattcgcttatacgataagctcttgtttgctatatccacgactactcgcccctaaatcacaatccctcatacttgtactatatgggtcttcccatccaagcccaacagatttttgtaagacatactcggtccctcttctctatctgttcgctgtaatatttcatatttttctgagtcttccactagcacaaaactgcttcgtactcatcagagatgagaaaatggatcaacaaaagaatctaaacaaaaaacaaaaaataacaaataatataccaaacaaaataaaaatacaaataacaacgataga

SEQ ID NO: 618180 - DNA, 266 bp, Homo sapiens
gcttcgatctctgtctattccttgtagcttagctggctagtgtgcaatttgtctttcacccatcttttggttccatctggagacctctccttatttgtcccatctgtcaggcatacttcggccctttcttcttcaggcattattgtgcccgagagtgtttcttgttcttctatgtcgttctttaggcgctgtatgtctctattgacattctgcagtttgtttcttaattctggtatttccttctccttcaaatcaattatgctttg

SEQ ID NO: 618181 - DNA, 255 bp, Homo sapiens
tgcatgggtcgacacttagatggatccaaagatattttggcacgaggaattattttacaagctacccatttgacaaaggattaataaccagaatatatgaaaagctccaacaactctataggaaaaaaatccaataacctgaccaaaaaatgggcaaaatatctgaataaacatttcttcgaagagacatgcaaatgaaaaacatgaaaaggtgttcaacatcattgatcattagagaattgcaatcaaaccttt

SEQ ID NO: 618182 - DNA, 172 bp, Homo sapiens
gcacatgtctggcggcttgcacatgttggctgggggggcggtggcagccggggctggcttgttgtcctggggctgaggtgacagtcgtgggctggcggggtggtggacgcccagtgcctggccttggtgccttgggaccggcggtgacactcctgtacccacggtggcacgc

SEQ ID NO: 618183 - DNA, 119 bp, Homo sapiens
tagaggacccgcagagcgcgtaaggttatgtacgtagtctaggcatatgtgttggagattgagactagtagggctaggccaccgctgcttcgcaggcggcaagactagtatggcaataa

SEQ ID NO: 618184 - DNA, 109 bp, Homo sapiens
tctacctgcgtttcctataagtagccttattctttggttgtttccctacttgcgtctgttagactgtgggaggaatgaaatccatttcaaactctgctgcaatacctgt

SEQ ID NO: 618185 - DNA, 290 bp, Homo sapiens
acccttgaacaaaagacagattaaactgggcgcagtcgtcacgcctatattcccaacactttgggaggctgaggcaggtggatcactagaagccgggacttcaagtccagcttggtcaacatggcaaccaacacggcaaaaccctgtttctatcaaaaacaaaaaaattagccagacgtggcggtgcatgcctggagtcccagctactggggaggctgagatgggaggatcccctgagcccgggaggcggaggctgcggtgagccaagattgcgctactgcactccagcc

SEQ ID NO: 618186 - DNA, 376 bp, Homo sapiens
  misc_feature (161)..(161): n is a, c, g, or t
  misc_feature (168)..(168): n is a, c, g, or t
  misc_feature (198)..(198): n is a, c, g, or t
gtggatgatacatatcgaaagaataaggccactcagggagaacagatatcgagaataagcacacatgaaggatataagcaagcaaggccaccagcatttaaggtagaagatgagccaagggacaagactgagttgtcttcagagaagcacagagatgttcnactgagngcagtgtgagccaggtaaagaaggggattntaaggggtgggcaatagtgccaagaaagaaagattaacatcatagccacattcaaaaggtgtcaatgaatctggctattaaaaaaataatctggaaaggccaggagcagtggctcacgcctgtaatcccagcactttgggaggctgaagtgagtggatcacttggggtcacgagtttg

SEQ ID NO: 618187 - DNA, 939 bp, Homo sapiens
  misc_feature (43)..(43): n is a, c, g, or t
aatggaggagcgcgggaggtttgtagaagaaaaaaaaaagctnggccgcatctgcttgtctgtgcttttttaattatctcatattgacattcaattcttattttaattaggaaacataatattgtaaactatggtgtacagtgtttcaatatttaattcatttaaaaaagatacctttttacgagtggtaatgaaaatacacgtgactaaaagcagagcactgataattttggggggaaaaaacttaaatttattaaggaaagaaagaaattgaaccaggccattgttttaatatgcacataattaactgtagaactttatattgtgaaatttaattaaacatgttctacccatttgggttttgaaatgctaggtaaaatactaagttaaagatgtgaggaatcaatattatccttctggcatttttgtttcagctacataataacttttttagtaggtgtgtaaaaaagctcctgatatttttgccttgatctaaaggaaaatatgttctttatagggttaattcttttattttgagatcccccacaacttttgtttgtttgattatagaacatagcttaaattgttctttcgcaaatccctaatgttaattttgctcaagccaaggagaattattctgttacaatcgccattgtgccgtcacgattatcttcttgtttcttctcaaaaatttttccgaaaaactttgtatctcaaattacgttatggggggtgcggctaggtttatcatacctatactatacatgattcgtgtatcgaagaggtagagacctggtatatacagcgctgagcaacatcgtcctacttgttcattggttgttgacttgtagcgagaggtgttgtcttttggcgtaaagtagttcaatttttcaatcgcctaatatcgttttattgctttagttcgcctgtcccatgttt

SEQ ID NO: 618188 - DNA, 221 bp, Homo sapiens
cttaaaagggtttggtttttgtttgggccccccccttttttttttttagggaaaaattccgcccgggcccccggggggttatttctttgggggttgcccccccccgtttggggggggggtttgggttttaaaaattggaaacccgggggggcccggggggggttttcccccttttggggttttgggcccccgggccctccctttaggttttttttttccca

SEQ ID NO: 618189 - DNA, 964 bp, Homo sapiens
  misc_feature (169)..(169): n is a, c, g, or t
  misc_feature (285)..(285): n is a, c, g, or t
  misc_feature (923)..(923): n is a, c, g, or t
  misc_feature (925)..(925): n is a, c, g, or t
  misc_feature (937)..(937): n is a, c, g, or t
  misc_feature (941)..(942): n is a, c, g, or t
  misc_feature (944)..(944): n is a, c, g, or t
  misc_feature (947)..(947): n is a, c, g, or t
  misc_feature (949)..(949): n is a, c, g, or t
  misc_feature (952)..(953): n is a, c, g, or t
  misc_feature (956)..(956): n is a, c, g, or t
  misc_feature (961)..(961): n is a, c, g, or t
cgtggtgcgggagtggagctacgagttttgtagtgtattatggagtatgacagcgctttggaggagctcgctgaggtggtaatcacgacggtgcgatggtacgcaggatctttgcggaagcggcggcgagagatatgaacgggacttgatggtgtgttatatgtatggncgggcggggccgcagagtggctacgtggtggtgtatgacgtcgtacagcagttgcgagagagctaggattgtgagcatagttagtgtgtcgcgctcatctgaggataaaataatancgcgcgcgcgaggtatgagcgtgatcagcgatcagaggtgtacgggcgaagttacatctgtgggatattacggttcgcaagtgtagggtaaagggtgagtggcggtggcgtgaaaacaagagtgggtggggggcgcggacacaagcaatcacataggtaatattgggaactatatcatatagggattttcatagggaggggcgggcgagtgacataaagggtctagctgcgagttgggcttgatgtgggggttgaggtttactgtgtgaagcgggtaggttaatacggttatatatatgactgtttgtttagatgaaagatgtgtctatcgggggtggttgggattaaatatagtgccacggggcgtttcttttcatcgaattgtgatcggcaagtttatttttccagaccatcatgtaattgttccagcgatggaatcctgctttccactcccattctgcttcatcaatatttcctgtcatttccaagacttttggaaaaaatgatgtccagaatcgacattgttgagcacgtagtttcgtcattattcttgttgactctgtattcaaggttagatatttttgttcagtgcttttgaagacaggccagcttgtgctaagtctgatctcatgtggatncnagccctcctcgngggnngntgntnatnntgncgcgngtg

SEQ ID NO: 618190 - DNA, 135 bp, Homo sapiens
cagcattatcagcagcggggagttggtgtcttctttggttttctcagtctaggcattgttttcggctatttggtagaagtgggctccttgggtgctttggttggcctttgaggtttaggagttgtccctttagaa

SEQ ID NO: 618191 - DNA, 874 bp, Homo sapiens
  misc_feature (43)..(43): n is a, c, g, or t
aatggaggagcgcgggaggtttgtagaagaaaaaaaaaagctnggccgcatctgcttgtctgtgcttttttaattatctcatattgacattcaattcttattttaattaggaaacataatattgtaaactatggtgtacagtgtttcaatatttaattcatttaaaaaagatacctttttacgagtggtaatgaaaatacacgtgactaaaagcagagcactgataattttggggggaaaaaacttaaatttattaaggaaagaaagaaattgaaccaggccattgttttaatatgcacataattaactgtagaactttatattgtgaaatttaattaaacatgttctacccatttgggttttgaaatgctaggtaaaatactaagttaaagatgtgaggaatcaatattatccttctggcatttttgtttcagctacataataacttttttagtaggtgtgtaaaaaagctcctgatatttttgccttgatctaaaggaaaatatgttctataaagggtaaatctattaattagagacccacacaactttctttcttgctagtgtaatcgttaaattgatttttccagtccatcatgtaattgttccagcgatggaatcctgctttccactcccattctgcttcatcaatatttcctgtcatttccaagacttttggaaaaaatgatgtccagaatcgacattgttgagcacgtagtttcgtcattattcttgttgactctgtattcaaggttagatatttttgttcagtgcttttgaagacaggccagcttgtgctatgtaaatgatctcatttgtatcctcgaggttctcgtttttttgtaatatttggtggaatacttgaatcagtctga

SEQ ID NO: 618192 - DNA, 964 bp, Homo sapiens
  misc_feature (1)..(1): n is a, c, g, or t
  misc_feature (923)..(923): n is a, c, g, or t
  misc_feature (925)..(925): n is a, c, g, or t
  misc_feature (937)..(937): n is a, c, g, or t
  misc_feature (941)..(942): n is a, c, g, or t
  misc_feature (944)..(944): n is a, c, g, or t
  misc_feature (947)..(947): n is a, c, g, or t
  misc_feature (949)..(949): n is a, c, g, or t
  misc_feature (952)..(953): n is a, c, g, or t
  misc_feature (956)..(956): n is a, c, g, or t
  misc_feature (961)..(961): n is a, c, g, or t
ngcgcgggcgggtgtcgggtagagtggataagatacatatgcttcatatttagagcccgtggcgcacgatgcagcgcggctagccgaccgcacacacaatcatctccggggcggggtgggacggagatgtcagggagccggcggtcgttcgcaagacccgcgcgccggggtctactcggacaataaaccaaccgcaagtccaccatagggctgcgtgtggtcacacctattgggccacgcacggccctcggggtatgtgtgtgttacatagggggcgacgcgatcgctactgtgtcgcgccgggcaggcgggcctgcactcagtcgtcgagcgcccgcgcgccgtaatttttccggcgtgcagccgcgagcgatcggtatttcaggggtggcgggggggcccgcgcgcggaactgggctcgcggccgcaacggtgctgttcgttcccacgggcacactactgcgtggcggggcgaggcctcgtgcgaccaggtctgctatggatcttacactggtggttccgtcattatgtctatcggacactctcgcctccttgaaactcggagacgagacacagttatgatgtctatccatctttttcctttctgctttcagcgggacggatcttgctacagatgcgcgaattcgtatgttttctttcgcgatcacgcgtcgtttcaatgcattgtgaagtaggcctgtcctattcgtgcacccggctcttgttttctctactcccgattctgcttcatcaatatttcctgtcatttccaagacttttggaaaaaatgatgtccagaatcgacattgttgagcacgtagtttcgtcattattcttgttgactctgtattcaaggttagatatttttgttcagtgcttttgaagacaggccagcttgtgctaagtctgatctcatgtggatncnagccctcctcgngggnngntgntnatnntgncgcgngtg

SEQ ID NO: 618193 - DNA, 411 bp, Homo sapiens
tgagacaaaatcttgctctgtcacctaggctggagtgcagtggcgtgatctgggctcactgcaacctccgcctcccaagttcaagcgattctcatgcctcagccttccaagtagctgggatcacaggcacccaccaccatgcctggctaatttttgtatttttagtagagaaggggttttgccatgttggccaggctggtcttgaacccctggcctcaagtgatctgcctgcctcggcctccaaaattgttgggattacaggcatgagatactgtgcccagcccagaataatgtttttaatcgtgcagaatcaatcactatgggaaactatgttggaaatgcgggtgctgtctttggagaccctgataggcagtgttttccacagtgttaggcaagtgtgtggagctttta

SEQ ID NO: 618194 - DNA, 121 bp, Homo sapiens
acgatctatgacggaccaagtctctacacacataaataaaagatctgggtatgaccatagactatctctagtgttctctacgagagacagtgacagactaagtacagtgaggatccaccat

SEQ ID NO: 618195 - DNA, 242 bp, Homo sapiens
atcagtcggtaccggttagagcggtctcctagttcaaaaaacatctgaatggcaatctcaccaactccacaaaacaagatgcttgaagtttcctgattgcaaattatattgtgcacagtgaaaaaacataagtcccaatggtggtttgcttcagaaagcaacacttgcctttttcccaccctggtatgtgttatacaaaggatgaatgagccccaccatggtcaagtgccctgagaccgctc

SEQ ID NO: 618196 - DNA, 174 bp, Homo sapiens
ccgtcgatgactcgcaaaacactattacgcccccggcaccaagacccgcgactacagctacctgggttccgacacggtgttgcatatcggcaacgagctggaactggtgcaagacctgtggctgaccaccggcctggctgcgatctacacccgccgcgaaacccaggtcagcta

SEQ ID NO: 618197 - DNA, 909 bp, Homo sapiens
  misc_feature (43)..(43): n is a, c, g, or t
aatggaggagcgcgggaggtttgtagaagaaaaaaaaaagctnggccgcatctgcttgtctgtgcttttttaattatctcatattgacattcaattcttattttaattaggaaacataatattgtaaactatggtgtacagtgtttcaatatttaattcatttaaaaaagatacctttttacgagtggtaatgaaaatacacgtgactaaaagcagagcactgataattttggggggaaaaaacttaaatttattaaggaaagaaagaaattgaaccaggccattgttttaatatgcacataattaactgtagaactttatattgtgaaatttaattaaacatgttctacccatttgggttttgaaatgctaggtaaaatactaagttaaagatgtgaggaatcaatattatccttctggcatttttgtttcagctacataataacttttttagtaggtgtgtaaaaaagctcctgatatttttgccttgatctaaaggaaaatatgtttttataaagggtgaatgtaatgagtttgataccctcacagatgttgttatttttaatgagatgggtaaatgaatagtagaagggatagtttagtgtgtggtgagagggattatagctttgtatcgtgatttccgttgattaatgtgtggtagttgtgcgagtgttttctgtatgattgagtgtatgtatgctcaatggcgagaatatattgtagggatatagtaggtgttagtattaggtttatagtatatttaattttatagtatcgtatggaggaaacagaatatgttaggtatggtgtggttgagcgagggtatgcgtggttagtagggattggtgttagtatgaagtgtagctgtatatagcggacgaaatgaggaacggaggtattaaggtggag

SEQ ID NO: 618198 - DNA, 929 bp, Homo sapiens
  misc_feature (43)..(43): n is a, c, g, or t
  misc_feature (882)..(882): n is a, c, g, or t
tgcgcgggcgcgacgtattaggactaggcggctagtagatctntcatctcctgtctgcacgctgcggatgatccgatgtgtacgcgcgggtagaattaaggtgatgtgggggggtgtgattatcgggcgtgtggtctaggataattgactgtggtgggcggcctggagggcgctcctgcaatgtccggttcccttgtgggttcgacgcgggtctgacgcagtgctgaatgtggtcgcggcggaaccgatggatctaactgggggtgaggagtgtggtagttaatacgtggttgtaatggatggatataacgtgagtgttggtcgtcccgctctgaaacgtagcggttcacgctacagttcgtcaataagagggtgcgggccgcggtcacgcgtataggtgagtgattaatcgggtggtgtgtggtaaggtgggtacgggagggttgggagggcggggacaatgcttgtatctcatttggcactgtgcgtggcgacgggtgtgatagctttgttagtacgggtggaagaacggtgtgtgagggtgggaccgtgattggaaccgtctgaggtgctataaagggtaaatctattaattagagacccacacaactttctttcttgctagtgtaatcgttaaattgatttttccagtccatcatgtaattgttccagcgatggaatcctgctttccactcccattctgcttcatcaatatttcctgtcatttccaagacttttggaaaaaatgatgtccagaatcgacattgttgagcacgtagtttcgtcattattcttgttgactctgtattcaaggttagatatttttgttcagtgcttttgaagacaggccagcttgtgctaaagtgtgatactcagtggatnctagggggccttgcgtgttgaggggacgagtgatggtgggtaagggg

SEQ ID NO: 618199 - DNA, 878 bp, Homo sapiens
  misc_feature (43)..(43): n is a, c, g, or t
aatggaggagcgcgggaggtttgtagaagaaaaaaaaaagctnggccgcatctgcttgtctgtgcttttttaattatctcatattgacattcaattcttattttaattaggaaacataatattgtaaactatggtgtacagtgtttcaatatttaattcatttaaaaaagatacctttttacgagtggtaatgaaaatacacgtgactaaaagcagagcactgataattttggggggaaaaaacttaaatttattaaggaaagaaagaaattgaaccaggccattgttttaatatgcacataattaactgtagaactttatattgtgaaatttaattaaacatgttctacccatttgggttttgaaatgctaggtaaaatactaagttaaagatgtgaggaatcaatattatccttctggcatttttgtttcagctacataagtaagctgttttagaggggggtgaaaaaagctgcttgaatttttaccttgatcagaggagaatatgggttataaagggtgaattgagtatgggaagaccttccatacttgttttctagcttgggtagaccggtatattgtgcgttacaggccagctgggatgggttccaggggagggattacaggtgtgtattgagatgtggttgtaggatatggttgacgatttaaagacctttggtgtagatacctctaaagaaagctttggaggacgccgattttccgcagtttctagttgccctttgttgcaggggtttcgacgccgcgggttatttttgaatacggcatgtttttctttcttttgtggttgattaagttccttccccttggttgtgtcgttaagccccgcttgttgtttgttattcggatagcgtgtcgag

SEQ ID NO: 618200 - DNA, 824 bp, Homo sapiens
  misc_feature (43)..(43): n is a, c, g, or t
aatggaggagcgcgggaggtttgtagaagaaaaaaaaaagctnggccgcatctgcttgtctgtgcttttttaattatctcatattgacattcaattcttattttaattaggaaacataatattgtaaactatggtgtacagtgtttcaatatttaattcatttaaaaaagatacctttttacgagtggtaatgaaaatacacgtgactaaaagcagagcactgataattttggggggaaaaaacttaaatttattaaggaaagaaagaaattgaaccaggccattgttttaatatgcacataattaactgtagaactttatattgtgaaatttaattaaacatgttctacccatttgggttttgaaatgctaggtaaaatactaagttaaagatgtgaggaatcaatattatccttctggcatttttgtttcagctacataataacttttttagtaggtgtgtaaaaaagctcctgatatttttgccttgatctaaaggaaaatatgttctattaaggggaatgcattaattagaaacccacaaattttgctttctgcatgggtatcacaaaatgatttttgcaggacatattcggtagccgatagtctgaaatcgggtggtaactcccattttggttcttaaatatcatggttttttccagcccctggtctaacggcggcccgaattcccgtagttgggccaccggatatggtatctatctgtgggacatctgcaccacacgcggaattgtaggcgcaggcttttattatacggtaccttgatgccgatgtctggaccttcattgtaccgctgacgtgcagct

SEQ ID NO: 618201 - DNA, 462 bp, Homo sapiens
aagcaatcttctgactcggactcctgagtagctgggagcacaggcacagtgccagcatgcccagctacatgggagtattgctcatgtagagatgggatatcattatggtgacaggctgctctcaaactcccgacctcaggtgatccagccacctcagcctcccaaaatgctgggattacatgcgtgagccaccgcgcccggccctgacagcatgcacactttgattttacctggtctcaaactgaccctttgcttattttaatagtaaaaaatacacccctgggtggacatttaagatggtaatgagacatgtggtgtatgaacaagcatgtaaactactgtgcatgtgcacccagaagaccacccagaacatgcttactagtaactcctctttccacttccttatgaataatcacataagactcccataaagggagcctccttagtgccagttttagctgt

SEQ ID NO: 618202 - DNA, 453 bp, Homo sapiens
  misc_feature (4)..(4): n is a, c, g, or t
agangtgagactcagtctcaaaaaaaaaaaattgcattattttgtttttttgtgagattattggcttttccaaaagatttcttaaagagctattattaaccaaattcaacttgagaactgcttcatgattgcctgtcgaagttctcaaattgttgtcaattcattctattattattttcacataacttttggatgtttcttcaaacttgggatttgaaaccaatatgtttaatcttcaaagattttttttaaggatataagatgtctattttataccatgacttttctttcatttgcacaatttcgagaagtgtttctttcctctgaaaagcagagaggactatcccagtataactccatttattttcactctgaggattgtagtttctgagcagctgactgaaaggaaattctataaagcagatcctctattcccattgtactgttgtaatt

SEQ ID NO: 618203 - DNA, 704 bp, Homo sapiens
  misc_feature (642)..(642): n is a, c, g, or t
  misc_feature (644)..(645): n is a, c, g, or t
  misc_feature (649)..(649): n is a, c, g, or t
atgtaatccaacccacggcataacaccagcgcactataattttggcgggaacacctctactttatagagaaagaaaagaaattacccggcccgttgttttaataggcaaaaattatctgttaaactttatattgtgaaatttaattaaacatgttctacccatttgggttttgaaatgctaggtaaaatactaagttaaagatgtgaggaatcaatattatccttctggcatttttgtttcagctacataataacttttttagtaggtgtgtaaaaaagctcctgatatttttgccttgatctaaaggaaaatatgttctataaagggtaaatctattaattagagacccacacaactttctttcttgctagtgtaatcgttaaattgatttttccagtccatcatgtaattgttccagcgatggaatcctgctttccactcccattctgcttcatcaatatttcctgtcatttccaagacttttggaaaaaatgatgtccagaatcgacattgttgagcacgtagtttcgtcattattcttgttgactctgtattcaaggttagatatttttgttcagtgcttttgaagacaggccagcttgtgctattgttctgagtctcatttggattcctgtagcggngnnaatnagagagcgttgcagctaattcctgtttctttggtgctttccgttatcgcagcatt

SEQ ID NO: 618204 - DNA, 964 bp, Homo sapiens
gcatggtggtgcgcacctatattcccagctactcgggaggctgaggcaggagaatctcttgaacccgggaggtggaggatgcagtgagccagaggttgcagtgagcagagatcgagccactgtactccagcctaggcgacagagcaagactcggtctcaaaaaagaaaaataataataataataataataggccaggcgcagtggctcatgtctgtaatcccagcactttgggagtccgaggcaggtggatcatgaggtcaggagattgagaccatcctggctaacacggtgaaagcccatctctactaaaaatacaaaaaaaacaaacaataacctgggtgatggctggcaggcacctgtagtcccagctaaatcaggaggctcgaggccggaggcacggcatagaaccagggcaggccgagcccccagagagccgagtgagccctctgcgacatcaagcctaggtcgcacacgagtgaaaccgcccagggtacccaagcacaagaaaacaaaaaacggagcagacgcatgaccaaacgcgtattgtacgcgcatacaggcacatgtaaaatccccgatgataccttggagacagcgacacaagagagggcgccacaaacaccacccgtacgggatacatgaaactcacgaaacacacacgacgaagcacccagccctggaagaaacacaccgcaatcacacacctgagcaaaatatacacaaagctgttactagtgttgtaaaattgcagtggctgcgaaagacgccacaccatgggcaaatctccctagcgagtaccgctaagagcaaaggtcacggtcaccgcaacgaggcacagaagtcggcctggaaaaccacgtaggctaatacctcgtctgaggctgagagataagcgagtgacgcccacggtacactatttcgcacatacaatgtgttacgcctcgcaacgacgtggggcaaaca

SEQ ID NO: 618205 - DNA, 674 bp, Homo sapiens
  misc_feature (612)..(612): n is a, c, g, or t
  misc_feature (614)..(615): n is a, c, g, or t
  misc_feature (619)..(619): n is a, c, g, or t
aaacagggaaaagcaggcgtaatatttggggaaaagttaatttttaggaaaaaagtaataaccgggcctgttttaaatgccataataacggtaactttatattgtgaaatttaattaaacatgttctacccatttgggttttgaaatgctaggtaaaatactaagttaaagatgtgaggaatcaatattatccttctggcatttttgtttcagctacataataacttttttagtaggtgtgtaaaaaagctcctgatatttttgccttgatctaaaggaaaatatgttctataaagggtaaatctattaattagagacccacacaactttctttcttgctagtgtaatcgttaaattgatttttccagtccatcatgtaattgttccagcgatggaatcctgctttccactcccattctgcttcatcaatatttcctgtcatttccaagacttttggaaaaaatgatgtccagaatcgacattgttgagcacgtagtttcgtcattattcttgttgactctgtattcaaggttagatatttttgttcagtgcttttgaagacaggccagcttgtgctattgttctgagtctcatttggattcctgtagcggngnnaatnagagagcgttgcagctaattcctgtttctttggtgctttccgttatcgcagcatt

SEQ ID NO: 618206 - DNA, 403 bp, Homo sapiens
cctttgtgtttcttcagcttactctaggccatctggatgtatacgtgcaagtcagcagggatgcgagtggccatggcctgggctcagaggcctgacattcctgccttcttatattaataagacaaataaaacaaaatagtgttgaagtgttggggcagcgaaaatttttggggggtggtatggagagataatgggcgatgtttctcagggctgcttcaagcgggattaggggtttttgtgggagcctagagtgggagagattaagctgaagggaggtcttgtggtaaggggtgatatcatggggatgttagaagaaacatttgtcgtatagaatgattgctgatggcctggatacggttttggatgctctgcgacggctaaatggaagatacaaggtccgcat

SEQ ID NO: 618207 - DNA, 527 bp, Homo sapiens
caaacggcggcgccggggccggaggaaaaagctcgccaccctgaagggtcccttcccaagcccttagggaccgcagaggactggggggaccagcaagaaaccccccaggcacgagaagagctctttggctgtctgccctgcctcacctgcccacgccaggccggtggccccccagctgcattcaagtgggaggcggaggaggaggcgggaggagggtggcaccatgggcccgggcgggtgcccctccatgcccgggggatgacagacactgctgccatggacagcccggtgccaagcctgcagccccctaagtcaggctctccctcaagttaccagggtcttcggttccaagaggccctttggggcaggcccttgaggccttggcccgtggccacggatggggagtgggaggagtttaccttgcccttgttccccctggcttccccccttccttacacacttgttcccagcgaagttgcctaggtgaagggccctcggccaggggcagttggtgaccccccagagcc

SEQ ID NO: 618208 - DNA, 1597 bp, Homo sapiens
ccttcttctgggggggggtctcgttctttattctttgctcattccttgtgtcaccgacgaggggctggtttttctctcctgccctcggttgatttagatgcggcctctcttctctttgggggggaaggagtgtttgtttggtatttgatcccccctccgtctctctttgctgtataaggtcccccctccccccttttccgtgtgtaggcctctcactctctggggtgtgctggtgtttttgtatgtaagcaatgttgtcgcgcttgtcgtgttgtcccgccagcagacatgagaccatcctgctagcagccggttgttttgttctctcacctcagaaaggtacgtatcccccctgtggtgtcagggggtggttcatcctttgttcttacatcaatcatctttcttgatggtgcttcaccccccacacaaggggtggttctgcccaccaacaggggggggtgtttttgggggagtgtcgacggtgctcgccacaacctgctctttttgagaggtttttcctacgtgaggcgggcgacggttactcctatatgtagtagttatcaccacttctttcgtcgtcgtaagtagtggttcaccggcccccacctctgtggggggtccacataatcagccccccttctttgcggtgggacaaatttttgtttctggggaagtacgtctcgtcggcaggctgctgctggtgagttcgccttcttttgcgccgaaaaaggactattttgttttggtagctgtgttgtatggtgcctcccccctccttgtggaagtacacctcctccccgctagaggggtgtgcgaccctcccccctcaggcgactctccactcgcggcggagattgtcgtttttttcctaaatgagttttcctttctctgcctacttttttctcgcgggccccccaccaaaaactcttctgttgtcctcccgtgattggggggcacaacgcgtgtcgcatataatatcccccgccccgcgctgttgttggggcgacgtcgtatacactcgggctgtccgtctttttccccccccgctgtgctgtccctcttcccgggacccccaaggcgttaggtctgggggggccatcaagagagtgtccccccacgggggggcacccctcacacgcggagagagaggcactcacggtgtctcctctctcgttgtcaacagcgcgcgtgcaggagagataggattcacggagagactctcgagcgcgccacaccccgcgagagactctctctggagagagacacaagtgtgtggagtgttcgcctatctgtgtgtacacagtgtatttccgcacaagtgtcatcagagtgtctctaaagagagtcccacacacactggagatcacgagacactgttttctgtctacgagagagaatattcgcgctctccagtgggtccacggcccccgccccgcgtatgcccggtagaaacgcccggcacacactctttgcatttaggttcttctaaagaccactcctggtacacgaggtgcaatccaactggatttatattttgacccttgcctggaccaatagggccaaacgccctacattaaccccgatatcatccagtacc

SEQ ID NO: 618209 - DNA, 804 bp, Homo sapiens
  misc_feature (148)..(148): n is a, c, g, or t
cgggacctggggtttcccccccaaacacatacgggggcgaaaagatacagctccttggaggtttaaagccccccctttgcgttggggtaactccccattttggcgcatccgctgtttatgagggaaacaggcggcatataccgttacncgcttgcgcgccccacgaagttatgggggttcattaccaaatggtcaaccccggagcactcgtgtctgtttccctaacaatgatgctctcttgagcagctctctgccacaccgtctgagagtatctgggcccggtggcgcccccagcgtggtttcacagcagggaggcgcaactcaatagggggcggggacccagaggagatttttcttattgctccgcaccccagaagatttgtgggccccaagtcgagagctcctgtcaaattctttgtgccgccacccgacaaccactgttaaaagaaaattcgtcatcggcggcctcatatcagtacatcggtccccccttcaaacacatctgcgcctcggtgtatgatatcctcggggcgacaatatctatagaacaatgaaataatgccgccggagttatcatgtggaaatactttggtaatagaaatttgaagtagcacccttgttttcgctcaataagaagagacgcatagatatagcacttctcttagacaccacgttatgatgaagagtagcgcgccgatgtttcttgcgttaaaggattctgcggggtatattgatttcgagtcctccgccacgcgttaaatataatttcagttttacaagggttgtgaacagacaccacaaaac

SEQ ID NO: 618210 - DNA, 258 bp, Homo sapiens
tcggtatgcatgcagtgcctgcagtgttgttctctggtggtgtgtggattgcctggctatttaggttcttttttggttccatatgaatgttaaaatagtttttttctagctctatgaagaatttcaatggtagtttaatgggaatagcattgaatctataaattgctttgggcaatatggccattttaacggtatttattcttccaatccataagcatggaatatttttccatttgtgtcttcgctgatttctttgag

SEQ ID NO: 618211 - DNA, 319 bp, Homo sapiens
tcttggcttacaaaatttgctctatgcttgctgactgctgaatgaatgaatgaatgaataggtagtcccaaagaatgtttagaatgtttttcagacagggtgagaaaaaacccacgaaccaattatttccgtttggaaagtttttttatttttgtgttcaggactgaagtaaaacaaaaatttgaataacagctgccccgttaaaaatgaaattaccaaaatatgaactttaggcatcaggcaaaaataattttttgtaaaaaacttttcttctcattttccttctcattctcttcatctttttctttttgtttgagca

SEQ ID NO: 618212 - DNA, 194 bp, Homo sapiens
agacatcccgcgcttagggaaaactggtttgtcgcttcccaccactgagttcgggccacattacccttccattcttcacccagagcgtcagcagcaacttctgtggtccatacctttttcctttattgaaagaagtttgcgttcatcgtccacttcaatgagtttctggcagccagtggctacgtgtccggcca

SEQ ID NO: 618213 - DNA, 172 bp, Homo sapiens
actacagggatgattcttcaataggagccgatggatctgtggtcctctgggactcatcaaagcttggtttagcatttgtcagtttatcttcagaattctctcgattagagatatttattaaggtggtcttcctacctctgtggtgtgtgtgcgcaccagcttagagtctata

SEQ ID NO: 618214 - DNA, 707 bp, Homo sapiens
ggcattactgcaggaaaaggtcccggagagctgagcagtcaagatgtgtgacttcaccgaagaccagaccgcagagttcaaggaggccttccagctgtttgaccgaacaggtgatggcaagatcctgtacagccagtgtggggatgtgatgagggccctgggccagaaccctaccaacgccgaggtgctcaaggtcctggggaaccccaagagtgatgagatgaatgtgaaggtgctggactttgagcactttctgcccatgctgcagacagtggccaagaacaaggaccagggcacctatgaggattatgtcgaaggacttcgggtgtttgacaaggaaggaaatggcaccgtcatgggtgctgaaatccggcatgttcttgtcacactgggtgagaagatgacagaggaagaagtagagatgctggtggcagggcatgaggacagcaatggttgtatcaactatgaagcgtttgtgaggcatatcctgtcggggtgacgggcccatggggcggagctcgtccgcatggtgctgaatggctgaggaccttcccagtctccccagagtccgtgcctttccctgtgtgaattttgtatctagcctaaagtttccctaggctttcttgtctcagcaactttcccatctcgtctcttcttggatgatgtttgccgtcagcattccccaaataaacttgctttttgggcca

SEQ ID NO: 618215 - DNA, 161 bp, Homo sapiens
agtcaggaagtaatagcaccggctatggcaaaccgtccctgactgctcagcgatactatctgtttgaagtaagtctccagtgatgcatacactttctcccgcaggacctccacctcactagggttggagaggccctttgcactctgggatggcagggaaga

SEQ ID NO: 618216 - DNA, 377 bp, Homo sapiens
  misc_feature (9)..(9): n is a, c, g, or t
  misc_feature (88)..(88): n is a, c, g, or t
  misc_feature (236)..(236): n is a, c, g, or t
atatttcanaaggtgaagatggccaggtgcaagggcttcatgcctgtaaatccccaaacactttaaggagccaaggcaggaggatcgnccttaagcccaggagtttgagaacagccctgggaaatatggtaagacctccatctctacaaaaaaattaaaaaatattagtcaggagtgttggctcatgcctttagttccagctagctacttgggaggctgaggtggaaggatcactntgcacctgggagataagaggtcaaggctgcagtgagctgagatcacaccagtgtactccagcctgggcgacacagcaagaccctgtctcaaaaatgaaacaaaaaaaggtgaagataaatacaaaaaaaaaaagtcgacgc

SEQ ID NO: 618217 - DNA, 801 bp, Homo sapiens
  misc_feature (708)..(708): n is a, c, g, or t
  misc_feature (716)..(717): n is a, c, g, or t
  misc_feature (723)..(723): n is a, c, g, or t
  misc_feature (726)..(726): n is a, c, g, or t
  misc_feature (729)..(731): n is a, c, g, or t
  misc_feature (733)..(734): n is a, c, g, or t
ggcattactgcaggaaaaggtcccggagagctgagcagtcaagatgtgtgacttcaccgaagaccagaccgcagagttcaaggaggccttccagctgtttgaccgaacaggtgatggcaagatcctgtacagccagtgtggggatgtgatgagggccctgggccagaaccctaccaacgccgaggtgctcaaggtcctggggaaccccaagagtgatgagatgaatgtgaaggtgctggactttgagcactttctgcccatgctgcagacagtggccaagaacaaggaccagggcacctatgaggattatgtcgaaggacttcgggtgtttgacaaggaaggaaatggcaccgtcatgggtgctgaaatccggcatgttcttgtcacactgggtgagaagatgacagaggaagaagtagagatgctggtggcagggcatgaggacagcaatggttgtatcaactatgaagcgtttgtgaggcatatcctgtcggggtgacgggcccatggggcggagctcgtccgcatggtgctgaatggctgaggaccttcccagtctccccagagtccgtgcctttccctgtgtgaattttgtatctagcctaaagtttccctaggcttttttgtttcagcaactttcccatcttgtcttttttggatgatgtttgccgtcagcattccccaaataaacttgctttttgggccaanaacaagannaacaanaanacnnnannggaattaaaacccagggatgcgtgacacacaagaaggccaaagaaagggccaaggggacaaaccctg

SEQ ID NO: 618218 - DNA, 757 bp, Homo sapiens
  misc_feature (664)..(664): n is a, c, g, or t
  misc_feature (672)..(673): n is a, c, g, or t
  misc_feature (679)..(679): n is a, c, g, or t
  misc_feature (682)..(682): n is a, c, g, or t
  misc_feature (685)..(687): n is a, c, g, or t
  misc_feature (689)..(690): n is a, c, g, or t
ggcattactgcaggaaaaggtcccggagagctgagcagtcaagatgtgtgacttcaccgaagaccagaccgcagagttcaaggaggccttccagctgtttgaccgaacaggtgatggcaagatcctgtacagccagtgtggggatgtgatgagggccctgggccagaaccctaccaacgccgaggtgctcaaggtcctggggaaccccaagagtgatgagatgaatgtgaaggtgctggactttgagcactttctgcccatgctgcagacagtggccaagaacaaggaccagggcacctatgaggattatgtcgaaggacttcgggtgtttgacaaggaaggaaatggcaccgtcatgggtgctgaaatccggcatgttcttgtcacactgggtgagaagatgacagaggaagaagtagagatgctggtggcagggcatgaggacagcaatggttgtatcaactatgaagagctcgtccgcatggtgctgaatggctgaggaccttcccagtctccccagagtccgtgcctttccctgtgtgaattttgtatctagcctaaagtttccctaggctttcttgtctcagcaactttcccatctcgtctcttcttggatgatgtttgccgtcagcattccccaaataaacttgctttttgggccaanaacaagannaacaanaanacnnnannggaattaaaacccagggatgcgtgacacacaagaaggccaaagaaagggccaaggggacaaaccctg

SEQ ID NO: 618219 - DNA, 652 bp, Homo sapiens
ggggtgggggaagctgagcgctgagaccaagggctaaagctgggagactgaatgcagaccgccggggcattattcatttctccagctgtttgaccgaacaggtgatggcaagatcctgtacagccagtgtggggatgtgatgagggccctgggccagaaccctaccaacgccgaggtgctcaaggtcctggggaaccccaagagtgatgagatgaatgtgaaggtgctggactttgagcactttctgcccatgctgcagacagtggccaagaacaaggaccagggcacctatgaggattatgtcgaaggacttcgggtgtttgacaaggaaggaaatggcaccgtcatgggtgctgaaatccggcatgttcttgtcacactgggtgagaagatgacagaggaagaagtagagatgctggtggcagggcatgaggacagcaatggttgtatcaactatgaagagctcgtccgcatggtgctgaatggctgaggaccttcccagtctccccagagtccgtgcctttccctgtgtgaattttgtatctagcctaaagtttccctaggcttttttgtttcagcaactttcccatcttgtcttttttggatgatgtttgccgtcagcattccccaaataaacttgctttttgggcca

SEQ ID NO: 618220 - DNA, 262 bp, Homo sapiens
gtcctggtggtgtgtgggcccttcttggagggggaacgttcaccttaggctggactcggcgctgcaggctcacggcctcgtccagctcgtagttgtgtctgcataccctgtccggcactgcccgctcctcctccaggatgtccttctggctgttccagtactcctcatcagggccgccccagctccgctcaccgtcccggtaactccccctacgtcagctctcgaacgcgcacgacactcctcccgggttgtagactgtatc

SEQ ID NO: 618221 - DNA, 696 bp, Homo sapiens
  misc_feature (95)..(95): n is a, c, g, or t
  misc_feature (98)..(98): n is a, c, g, or t
  misc_feature (108)..(108): n is a, c, g, or t
  misc_feature (112)..(112): n is a, c, g, or t
  misc_feature (123)..(123): n is a, c, g, or t
ggcattactgcaggaaaaggtcccggagagctgagcagtcaagatgtgtgacttcaccgaagaccagaccgcagagttcaaggaggcctgatctnatnccaagcactngagntcaaggaggcnttccagctgtttgaccgaacaggtgatggcaagatcctgtacagccagtgtggggatgtgatgagggccctgggccagaaccctaccaacgccgaggtgctcaaggtcctggggaaccccaagagtgatgagatgaatgtgaaggtgctggactttgagcactttctgcccatgctgcagacagtggccaagaacaaggaccagggcacctatgaggattatgtcgaaggacttcgggtgtttgacaaggaaggaaatggcaccgtcatgggtgctgaaatccggcatgttcttgtcacactgggtgagaagatgacagaggaagaagtagagatgctggtggcagggcatgaggacagcaatggttgtatcaactatgaagagctcgtccgcatggtgctgaatggctgaggaccttcccagtctccccagagtccgtgcctttccctgtgtgaattttgtatctagcctaaagtttccctaggcttttttgtttcagcaactttcccatcttgtcttttttggatgatgtttgccgtcagcattccccaaataaacttgctttttgggcca

SEQ ID NO: 618222 - DNA, 670 bp, Homo sapiens
  misc_feature (10)..(10): n is a, c, g, or t
  misc_feature (19)..(19): n is a, c, g, or t
  misc_feature (30)..(30): n is a, c, g, or t
  misc_feature (82)..(83): n is a, c, g, or t
  misc_feature (85)..(87): n is a, c, g, or t
  misc_feature (92)..(92): n is a, c, g, or t
ttacgccgancccaaaacngtttatttttncccgaagagcagaacacacaagaggggggtttttattaaaaaccagaccgcnnannncaagnaggccttccagctgtttgaccgaacaggtgatggcaagatcctgtacagccagtgtggggatgtgatgagggccctgggccagaaccctaccaacgccgaggtgctcaaggtcctggggaaccccaagagtgatgagatgaatgtgaaggtgctggactttgagcactttctgcccatgctgcagacagtggccaagaacaaggaccagggcacctatgaggattatgtcgaaggacttcgggtgtttgacaaggaaggaaatggcaccgtcatgggtgctgaaatccggcatgttcttgtcacactgggtgagaagatgacagaggaagaagtagagatgctggtggcagggcatgaggacagcaatggttgtatcaactatgaagagctcgtccgcatggtgctgaatggctgaggaccttcccagtctccccagagtccgtgcctttccctgtgtgaattttgtatctagcctaaagtttccctaggcttttttgtttcagcaactttcccatcttgtcttttttggatgatgtttgccgtcagcattccccaaataaacttgctttttgggcca

SEQ ID NO: 618223 - DNA, 599 bp, Homo sapiens
  misc_feature (55)..(55): n is a, c, g, or t
  misc_feature (66)..(66): n is a, c, g, or t
  misc_feature (76)..(77): n is a, c, g, or t
  misc_feature (121)..(122): n is a, c, g, or t
  misc_feature (506)..(506): n is a, c, g, or t
  misc_feature (514)..(515): n is a, c, g, or t
  misc_feature (521)..(521): n is a, c, g, or t
  misc_feature (524)..(524): n is a, c, g, or t
  misc_feature (527)..(529): n is a, c, g, or t
  misc_feature (531)..(532): n is a, c, g, or t
ggagatgtcagaacggctgaggcacagaggtgcagtcagtcattgggaccatatngtctgtggctntcaggacagnnagcttgggactcaggtagatgactctggaagagtccttctcttnnggaactgcagcatcccttcgtcttccccaaggggaatttagtccaggaaataccagatcctcatctcgtctcttctcttgtacaagagaagagacgagatgtgcaagagaagaagacgagatatacaagagaagagacgagatgctggtggcagggcatgaggacagcaatggttgtatcaactatgaagagctcgtccgcatggtgctgaatggctgaggaccttcccagtctccccagagtccgtgcctttccctgtgtgaattttgtatctagcctaaagtttccctaggctttcttgtctcagcaactttcccatctcgtctcttcttggatgatgtttgccgtcagcattccccaaataaacttgctttttgggccaanaacaagannaacaanaanacnnnannggaattaaaacccagggatgcgtgacacacaagaaggccaaagaaagggccaaggggacaaaccctg

SEQ ID NO: 618224 - DNA, 201 bp, Homo sapiens
  misc_feature (22)..(22): n is a, c, g, or t
tgctctggcgctcagagacccnctcttatgtgcccccttctgatggagatgacccgaggtggtcctcctcggtgacccacaccaggaaggtcttattgtcattgtgccagataccgcggacgtcgggccagtcgcgggccatgcccgaggccagcagcagccacgacacgggcttgtcgaagaggaagtggtcgtcgatga

SEQ ID NO: 618225 - DNA, 375 bp, Homo sapiens
  misc_feature (282)..(282): n is a, c, g, or t
  misc_feature (290)..(291): n is a, c, g, or t
  misc_feature (297)..(297): n is a, c, g, or t
  misc_feature (300)..(300): n is a, c, g, or t
  misc_feature (303)..(305): n is a, c, g, or t
  misc_feature (307)..(308): n is a, c, g, or t
tcgatctcatagaggatcccctacaagagaagagacgagatgctggtggcagggcatgaggacagcaatggttgtatcaactatgaagagctcgtccgcatggtgctgaatggctgaggaccttcccagtctccccagagtccgtgcctttccctgtgtgaattttgtatctagcctaaagtttccctaggctttcttgtctcagcaactttcccatctcgtctcttcttggatgatgtttgccgtcagcattccccaaataaacttgctttttgggccaanaacaagannaacaanaanacnnnannggaattaaaacccagggatgcgtgacacacaagaaggccaaagaaagggccaaggggacaaaccctg

SEQ ID NO: 618226 - DNA, 430 bp, Homo sapiens
tcgtccggtgttatctgttgcacttggggctacgctgtgtgatctccaggcagtgtatccagccagcctggagggtgggagtctcctgtgctcttgacaacccactactcaacagtgggctggtggagagctcctcactagctagttaagacccagccatggctgagcgccgtggctcatgcctgtaatcccagtactttgggaggccgaagcgggtggatcgcctgaaattggagttagagagcagactgggcaatatggtgaaaccccttctctactaaaaatacaaaaaattactggtacgcacctgtaattccagttacttgagatgctgaggcaggagaattgcttgaacccaggaggcagacggctgcagtgagcgcatagatcatgccactgtacctccaggctaggttgcactcgataaaca

SEQ ID NO: 618227 - DNA, 440 bp, Homo sapiens
ggcattactgcaggaaaaggtcccggagagctgagcagtcaagatgtgtgacttcaccgaagaccagaccgcagagttcaaggaggccttccagctgtttgaccgaacaggtgatggcaagatcctgtacagccagtgtggggatgtgatgagggccctgggccagaaccctaccaacgccgaggtgctcaaggtcctggggaaccccaagagtgatgagatgaatgtgaaggtgctggactttgagcactttctgcccatgctgcagacagtggccaagaacaactcctcagtgtggtcatgggcccacagttcttcagctaagagcttccctttatcttcataggccccaaactcaagcaagtctggattagcaaatcccatggatttccttgcttttagtggggagtcatctgtcatctccctgttcggtttatact

SEQ ID NO: 618228 - DNA, 352 bp, Homo sapiens
  misc_feature (50)..(50): n is a, c, g, or t
  misc_feature (52)..(52): n is a, c, g, or t
  misc_feature (54)..(54): n is a, c, g, or t
  misc_feature (57)..(59): n is a, c, g, or t
  misc_feature (63)..(63): n is a, c, g, or t
agtataaaccgaacagggaaaggcacggactctggggagactgggaagtntnanccnnncagngagatgctggtggcagggcatgaggacagcaatggttgtatcaactatgaagcgtttgtgaggcatatcctgtcggggtgacgggcccatggggcggagctcgtccgcatggtgctgaatggctgaggaccttcccagtctccccagagtccgtgcctttccctgtgtgaattttgtatctagcctaaagtttccctaggctttcttgtctcagcaactttcccatctcgtctcttcttggatgatgtttgccgtcagcattccccaaataaacttgctttttgggcca

SEQ ID NO: 618229 - DNA, 406 bp, Homo sapiens
ttaatttgcagaactggttgaacacatcaaatgtgacattagcccatcagcaattcaatatttaatagctcttcgaacaacttaacaagaaattcagaacatgaacctcttggaaaaagttgggcttttcttgttggtgttgttgtcactgtactgacgacttcacttctcatttttattgctatcaaatgcccaatatggtacaatattctgcttagttataatcatcatcgcctggaagagcatgaagcagaaacctatgaagatggttttactggaaatccaagctctctttcacagataccagaaacaaactctgaagaaactacagtaatatttgaacaattacattcatttgtggtagatgatgatggatttattgaagacaaatatatagatatccatg

SEQ ID NO: 618230 - DNA, 420 bp, Homo sapiens
  misc_feature (60)..(60): n is a, c, g, or t
  misc_feature (190)..(190): n is a, c, g, or t
  misc_feature (236)..(236): n is a, c, g, or t
atatatttaatatttaacatataattgtgtgtgttgcaaaaatttttaatggccacaatnggaaaaactttaaagacccactggattaaaagatggtatttagggccccagcacaatgactcaagtctgtagtcctcagcactttgggaggctgaggtgaggggatcgcttgagcccgggagatcgaganccagccatgggcaatatggcagggccccatctctgcggaaaatacnaaaattagccagatgtgttgcaactgtggtcccagctattcgggagactgaggtgggaggatcacttgagcctgcagggtcgacgctgcagtgagccatgattgcaccactccagcctgggagacagagcaaggccttgcttcaaaaaataaaaataaaagatgacattaagaagaaaaaaaaa

SEQ ID NO: 618231 - DNA, 653 bp, Homo sapiens
  misc_feature (378)..(378): n is a, c, g, or t
  misc_feature (472)..(472): n is a, c, g, or t
agactctggtatgttgtgtctttgttctcgttggtttcaaagaacatctttatttctgccttcatttcgttatgtacccagtagtcattcaggagcaggttgttcagtttccatgtagttgagcggttttgagtgagattcttaatcctgagttctagtttgattgcactgtggtctgagagatagtttgttataatttctgttcttttacatttgctgaggagagctttacttccaactatgtggtcaattttggaataggtgtggtgtggtgctgaaatgtatattctgttgatttggggtggagagttctgtagatgtctattaggtctgcttggtgcagagctgagttcaattcctgggtatccttgttgactntctgtctcgttgatctggctaatgttgacagtggggtgttaaagtctcccattattaatgtgtgggagtctaagtctctttgtaggtcactcangacttgctttatgaatctgggtgcctctgtattggtgcatattatttaggatagttagctcttcttgttgattgatcctttaccatatggaatggcctctttggctctttgaacttggtggttaaagctgtttattaagactagattggcccctgctttttttggtttctttgctgggcct

SEQ ID NO: 618232 - DNA, 105 bp, Homo sapiens
gaggccacggtggcgcataaacgaatgactagggttatagggggcgcgagcttagagacagtgaactcaaggtgaccaggtgcaatttgcagagctagcagcgaa

SEQ ID NO: 618233 - DNA, 718 bp, Homo sapiens
  misc_feature (59)..(60): n is a, c, g, or t
  misc_feature (107)..(107): n is a, c, g, or t
  misc_feature (493)..(493): n is a, c, g, or t
  misc_feature (683)..(683): n is a, c, g, or t
  misc_feature (710)..(710): n is a, c, g, or t
  misc_feature (718)..(718): n is a, c, g, or t
gagacttatgtaagcgtgattcaaaccataattcgtgttgtaatcagactcagcaattnntgttgtatgattttgtttttttgtaaagtgtaattgtccttgtacanaatgctcatatttaattatgaactgctttaaatcactatcaaagttacaagaaatgtttggcttattgtgtgatgcaacagatatatagccctttcaagtcatgttgtgtttggacttggggttggaacagggagagcagcagccatgtcagctacacgctcaaatgtgcagatgattatggaaaataacctcaaaatcttacaaagctgaacatccaaggagtcattgaaaactatcttaaatgttcttggtaggggagttggcattgttgataaagccagtcccttcatttaactgtctttcaggatgttccttcgttgtttccatgagtattgcaggtaataatacagtgtattcataagaatcttcaatcttggggctaaantgccttgtttctttgcgacctccttttcaagggtcccttacatattaattactaattgtataaagcacgcacgcttctctacataatagtagagaaactgccaccactttttgctattacaatgaattggcgtggggcctgctgctgttgtcctaagtaaagatattctgaattccccattttatcacantaaagcgttgatttaacacaacaaganaaaaaaan

SEQ ID NO: 618234 - DNA, 666 bp, Homo sapiens
  misc_feature (604)..(604): n is a, c, g, or t
  misc_feature (606)..(607): n is a, c, g, or t
  misc_feature (611)..(611): n is a, c, g, or t
gagcctatatcttttgggcacaatctttttaattaagaaagaaaaaatgaatcagtccattgtttgacagccctcactaacgcagcctttatattgtgaaatttaattaaacatgttctacccatttgggttttgaaatgctaggtaaaatactaagttaaagatgtgaggaatcaatattatccttctggcatttttgtttcagctacataataacttttttagtaggtgtgtaaaaaagctcctgatatttttgccttgatctaaaggaaaatatgttctataaagggtaaatctattaattagagacccacacaactttctttcttgctagtgtaatcgttaaattgatttttccagtccatcatgtaattgttccagcgatggaatcctgctttccactcccattctgcttcatcaatatttcctgtcatttccaagacttttggaaaaaatgatgtccagaatcgacattgttgagcacgtagtttcgtcattattcttgttgactctgtattcaaggttagatatttttgttcagtgcttttgaagacaggccagcttgtgctattgttctgagtctcatttggattcctgtagcggngnnaatnagagagcgttgcagctaattcctgtttctttggtgctttccgttatcgcagcatt

SEQ ID NO: 618235 - DNA, 1118 bp, Homo sapiens
tattttggggagggtatggatattatgcgctgtaatgataacagctattggagaactttagaagttcgatgaaacatcttgtagggaattcaagtcatccacgaggagtggaatgatcatgtacatatttgtagatactgaaacatttacctggagccagcctataactactggtaaagcaccttcacctcgtgctgcccatgcctgtgccaactgtcggaaatagaggcttccggttgggaggcagatatcgagatgctagaatgacatgatcttcactatcttaatctggatacatgggagtggaatcgaattaattccatcaaggcatatgcccagttggtcgatcttggcacgtcagtaacaccagtttcttcagatcatcttctttctctttggaggcatttaccactgataaacagccactaagtgatgcctggacttactgcatcagtagcaaatgacatggatacaatttaatcatccatataccgaaacagccaaggttatggtacacagattgtagccagcgatgaaggagaagtaatagtatttggtggatgtgtcaacaaacttgctagtcaatcacagagctggacacagtaatgaaatactaatatttcagttcaacaaaatctctgtacgggtaagcttacgaaacagccattgctttacacactgttagccaacttcatgggcactgcttccacaacacttagttcaacagtgttcatcacaaggttggcacgtaccaccactccgggacctaacggctccctcacactagtgctatctatcccctttgctgtgcacgcacctcggtgtaccctcacaagtgggtacctcattggcaactaatatgcaattgtgtccacacgaccagtgcgatactagtatgtgttatgcgctacacacacacttctgcgccacccccaacatcagtcttcaccgcatccaccaccacaaaacacgtgccacccacgaaataacacgctgcgctcgcatcacaacaattcataatatatgctacacgttcaaccacccagctcactatattctcttatactcagtaacggcccggccacaacatcaccgcacgtcacatacctacaacaccc

SEQ ID NO: 618236 - DNA, 654 bp, Homo sapiens
  misc_feature (592)..(592): n is a, c, g, or t
  misc_feature (594)..(595): n is a, c, g, or t
  misc_feature (599)..(599): n is a, c, g, or t
agagacaaaaactacattacaagatatcagcgatggagacagcccctgtttttttggcaaataatagcggacgactttatattgtgaaatttaattaaacatgttctacccatttgggttttgaaatgctaggtaaaatactaagttaaagatgtgaggaatcaatattatccttctggcatttttgtttcagctacataataacttttttagtaggtgtgtaaaaaagctcctgatatttttgccttgatctaaaggaaaatatgttctataaagggtaaatctattaattagagacccacacaactttctttcttgctagtgtaatcgttaaattgatttttccagtccatcatgtaattgttccagcgatggaatcctgctttccactcccattctgcttcatcaatatttcctgtcatttccaagacttttggaaaaaatgatgtccagaatcgacattgttgagcacgtagtttcgtcattattcttgttgactctgtattcaaggttagatatttttgttcagtgcttttgaagacaggccagcttgtgctattgttctgagtctcatttggattcctgtagcggngnnaatnagagagcgttgcagctaattcctgtttctttggtgctttccgttatcgcagcatt

SEQ ID NO: 618237 - DNA, 896 bp, Homo sapiens
ggcggtggctgttggctgtgacaggaggcgcgaagccggaggtctaatctggacgtgtgccgtagcatgtgagcccgcgtgtatgtggacgtgtgcgcgctgcgtcttcctgactgtgggtgcgcctgaaggggctggagttcgtgctctatccaccagctgcgtgggtgttcgtgtgcctcttcctcctgccgctctcgcttatcttcgatatctactactacgtgcgcgcctgggtggtgttcaagctcagcagcgtctccgcgcctgcacgagcagtggcgtgcgggacatccagaagcaggtgcgggaatggaaggagcagggtagcgaagaccttcatgtgcacggggcgccctggtggtcattgtactcactacgtgtcgcggaagtacaagaacgacgcacaaaaacatcatgatcaacctgatggacattctggaagtggacaccaagaaaccagattgtccgtgtggaagcccttgcgtgaccatgggccaggtgactgccctgctgacctccattggtggacctctccccgtgttgcctgagcttgattgacctcacagtgggggggcttgatcatggtgcacaaggcatcgagtcatcattcccaccaacgtactgggctgttccaacacaatcttgacttgttacgacgctggtcctggctgatggcaggttttgtggcgatgcactcccgtcccgaaaactcagacctgttctatgccgaacctggtccctgtgggacgctgcgtttcctgtgggccgtgaaaaccgatcactctggcaagaatccgtaagctgctatcagccagatgggctgagcatttggccattacccgcagtcaggcgagcacctcttgaggcgcacccggaggcgcatacgcggaaac

SEQ ID NO: 618238 - DNA, 682 bp, Homo sapiens
  misc_feature (620)..(620): n is a, c, g, or t
  misc_feature (622)..(623): n is a, c, g, or t
  misc_feature (627)..(627): n is a, c, g, or t
atgtctgggacttaatcataactctttatttttgggtgggcgccttccttctttatcagtcaatattttaccccgcccctgtttctttgccctagtccccttcgccctttattcttcaatttgtttcaattttttcgccacttgggttttgcaacgttaagtcacaccttcagttaaaaattcggggatcccacattatctttctcgcgttttgttttccgtcccataataacttttttagtaggtgtgtaaaaaagctcctgatatttttgccttgatctaaaggaaaatatgttctataaagggtaaatctattaattagagacccacacaactttctttcttgctagtgtaatcgttaaattgatttttccagtccatcatgtaattgttccagcgatggaatcctgctttccactcccattctgcttcatcaatatttcctgtcatttccaagacttttggaaaaaatgatgtccagaatcgacattgttgagcacgtagtttcgtcattattcttgttgactctgtattcaaggttagatatttttgttcagtgcttttgaagacaggccagcttgtgctattgttctgagtctcatttggattcctgtagcggngnnaatnagagagcgttgcagctaattcctgtttctttggtgctttccgttatcgcagcatt

SEQ ID NO: 618239 - DNA, 125 bp, Homo sapiens
tcagtcggtaccggtcccatgcacagttgcttggagcatggtcgtggcttagccacctaccatgtgcggggctattgcttgccttgtggacagaccctgtggcttaggctctggcctgggagctg

SEQ ID NO: 618240 - DNA, 1136 bp, Homo sapiens
  misc_feature (1074)..(1074): n is a, c, g, or t
  misc_feature (1076)..(1077): n is a, c, g, or t
  misc_feature (1081)..(1081): n is a, c, g, or t
cacaggatttcagggcactgtgtctttggaatcaggggattcacccatggcggactgctagactgatgctggagcggtcggcctaataatactcaacaagagcctttttgcggtcagccgtttgaggcgagtacctcaattttgttatggttgtccctattgcgggatatcgtatatcgccttgagtagagtgaagcgggtggcgtagcctaacgaccgagccaggcagtcagttacgagaactcttaattagcctcttctaagggaacgccgcaaaactccccccgttaggccaatgagtccaggtgttttttttaattctcagatttgcattcagttctgcttctgttagggaacattcctttgtcacctatggttgcagtgtttcgatatttaattcatttaaaaaagatacctttttacgagtggtaatgaaaatacacgtgactaaaagcagagcactgataattttggggggaaaaaacttaaatttattaaggaaagaaagaaattgaaccaggccattgttttaatatgcacataattaactgtagaactttatattgtgaaatttaattaaacatgttctacccatttgggttttgaaatgctaggtaaaatactaagttaaagatgtgaggaatcaatattatccttctggcatttttgtttcagctacataataacttttttagtaggtgtgtaaaaaagctcctgatatttttgccttgatctaaaggaaaatatgttctataaagggtaaatctattaattagagacccacacaactttctttcttgctagtgtaatcgttaaattgatttttccagtccatcatgtaattgttccagcgatggaatcctgctttccactcccattctgcttcatcaatatttcctgtcatttccaagacttttggaaaaaatgatgtccagaatcgacattgttgagcacgtagtttcgtcattattcttgttgactctgtattcaaggttagatatttttgttcagtgcttttgaagacaggccagcttgtgctattgttctgagtctcatttggattcctgtagcggngnnaatnagagagcgttgcagctaattcctgtttctttggtgctttccgttatcgcagcatt

SEQ ID NO: 618241 - DNA, 216 bp, Homo sapiens
agggaacttgtacagggaggcatgcaccgcaatggatgaatacacgtcgaccaggatccagctttccgatcttgggaggtcagcacggtgctccatgtatcaacggaactagtactagggaggcatgccaccgcagtggtgaatacacgtcgcgcagagaagcatgcatgcaatgcttgtggtactggaggctcctctaaaatcgcacaggatcca

SEQ ID NO: 618242 - DNA, 1010 bp, Homo sapiens
  misc_feature (82)..(82): n is a, c, g, or t
  misc_feature (257)..(257): n is a, c, g, or t
  misc_feature (948)..(948): n is a, c, g, or t
  misc_feature (950)..(951): n is a, c, g, or t
  misc_feature (955)..(955): n is a, c, g, or t
acttaaccgtactatagacgtatgtggggcgcggggcggggtgataggggacaggccggcgtgcgacccgcggtagacggtngtctatgaacagatcccgcggtgacggcatccgtggagctggtgcatcccggaacggccaaataaagtggcaaccggagcgcagtggaccagtgacgacgacgcgaaacgcacgagcctcgttggatcgtggtgtggggtaaggaagcacggtggggagaaggaggccgtggagncaaacaaaacgtaattcaataaaaaagatttcctttttagcaggggtaaggcgaacccccggcccaaaagcacagccctcataatttgcggggcagacaccttccaatttattaaggaaagaaagaaattgaaccaggccattgttttaatatgcacataattaactgtagaactttatattgtgaaatttaattaaacatgttctacccatttgggttttgaaatgctaggtaaaatactaagttaaagatgtgaggaatcaatattatccttctggcatttttgtttcagctacataataacttttttagtaggtgtgtaaaaaagctcctgatatttttgccttgatctaaaggaaaatatgttctataaagggtaaatctattaattagagacccacacaactttctttcttgctagtgtaatcgttaaattgatttttccagtccatcatgtaattgttccagcgatggaatcctgctttccactcccattctgcttcatcaatatttcctgtcatttccaagacttttggaaaaaatgatgtccagaatcgacattgttgagcacgtagtttcgtcattattcttgttgactctgtattcaaggttagatatttttgttcagtgcttttgaagacaggccagcttgtgctattgttctgagtctcatttggattcctgtagcggngnnaatnagagagcgttgcagctaattcctgtttctttggtgctttccgttatcgcagcatt

SEQ ID NO: 618243 - DNA, 249 bp, Homo sapiens
cccccccccctaaattttgttttttggggggaaaatagggtcccctgtttcccggcccctttttttgtaaaaaaaaattttaagttgtttttccccccggacccattggcccttgcggggccttgatagtttaaaccccccccccccttaaagattgggggcccccaataggaaaaggggattacccgggttttggggtttaaatgccccccgccttttccaataaaaggggccccattttttttatta

SEQ ID NO: 618244 - DNA, 955 bp, Homo sapiens
  misc_feature (51)..(51): n is a, c, g, or t
  misc_feature (893)..(893): n is a, c, g, or t
  misc_feature (895)..(896): n is a, c, g, or t
  misc_feature (900)..(900): n is a, c, g, or t
ctgggcgggggggcggaacggagtagggtgtgatcagctacacactattanttgggtgggatgagcgggatcacttgtgtatagacgacaaattaaatcgccgttcggggggcgtgttcacaaagggcgatgagtgagggttagggcgtgagagggtggagcagtagtgagatatcgtgtgagtactttaaggtgagcggcggcgcatcatacggtccaccgaccgggggcgcgaccggcggatctatcgtgcgcgggcggggacaggtgagtgagaggttagcggctgaagattgaaagtctggggatgcgcgtggcggatggacaagggtgggcgggagggagggtgcggatactcgggggcggcggggggaggagtggccacaactgagtgggtctgtacggggccctaagagataccaggctacatcaaaagcggcgcggggtgtctgcagtcgggcggacggcgagctgccgtgatacgcgctgagcgatgatgtttacgctaacataaagggccacgaaagctcggagacgaacagaacccccagcggcaaggcgcgcgcgcggcatgaggcggcgtcgcgtaaataaaccgcgatgcgggtgtcgttgttgttagtgtaatggatagggcgagttttccagaaaatgcatgtaattgttccagcgatggaatcctgctttccactcccattctgcttcatcaatatttcctgtcatttccaagacttttggaaaaaatgatgtccagaatcgacattgttgagcacgtagtttcgtcattattcttgttgactctgtattcaaggttagatatttttgttcagtgcttttgaagacaggccagcttgtgctattgttctgagtctcatttggattcctgtagcggngnnaatnagagagcgttgcagctaattcctgtttctttggtgctttccgttatcgcagcatt

SEQ ID NO: 618245 - DNA, 295 bp, Homo sapiens
atctggattacaggcgggagccaccatgcctggcaccggctggtatttcttagcatcagtgttgcaattaaaaagcaagcaagagaccgggcgtggaggcgcacccctgtaatcccagacactttgggaggccgagtgggtggatcactaggtcaggagatcgagaccatcctggctaacacggtgaaaccctgtctctactaaaaatacaaaaaattagccgggcgtggtggcggacgcctgtagtcccagctacttgggaggctgaggcaggagagtgctgtgaacccgagag

SEQ ID NO: 618246 - DNA, 927 bp, Homo sapiens
  misc_feature (865)..(865): n is a, c, g, or t
  misc_feature (867)..(868): n is a, c, g, or t
  misc_feature (872)..(872): n is a, c, g, or t
gacctggagatacgcgttcgcacggccgccgcacattcatgagaggacgggagccgctggtctgcgcggtaacgcgcgccacggccatcccccgcaacccttcgcaccaacgcccgcccgctagccggggtgcgcgcgggtcgcacatcctaggccacatctcctccctggcgcccccggatcgcgcggacgcacgcgcaaacacgccgccgccgcgctctccgccccgcgcccgcctgggcgcctcctcgactcacgtgtactatagggaggctgtgcaacactacacgaacggaaccgcgagctccataagggtccggcgagcctcacgggcccaccgaagagcgtcgccccgccgcagcggacctccccctcttccgccgccgggcgttttccaaccgctaggcgcgatcttaaagtacgcatcgcgagcgctcgacatcatccttcgggcctctctcgctcaacccccatgatagctttgttagtaggtggctaaaaagctcgtgatatctcgccgtgatgtaaagcaaaatatgttctataaagggtaaatctattaattagagacccacacaactttctttcttgctagtgtaatcgttaaattgatttttccagtccatcatgtaattgttccagcgatggaatcctgctttccactcccattctgcttcatcaatatttcctgtcatttccaagacttttggaaaaaatgatgtccagaatcgacattgttgagcacgtagtttcgtcattattcttgttgactctgtattcaaggttagatatttttgttcagtgcttttgaagacaggccagcttgtgctattgttctgagtctcatttggattcctgtagcggngnnaatnagagagcgttgcagctaattcctgtttctttggtgctttccgttatcgcagcatt

SEQ ID NO: 618247 - DNA, 897 bp, Homo sapiens
  misc_feature (835)..(835): n is a, c, g, or t
  misc_feature (837)..(838): n is a, c, g, or t
  misc_feature (842)..(842): n is a, c, g, or t
gtgcgggcgggagttattggaagaattataagacgatataaattatatgaggtgactgtcggatatacgattagacgagtatgatcgaagtgggggggggcgtacaatcgggcgacgaggccgcgaataaagcggatgaagtttatacaatgatcgttgtatgcacccttggagagcgttggtataaatcatttatatggggcgtcagtctgctgtcaatgagccggcctatggttagagggtgggccggccacgatgtggaagaagagggagataggcgcagacttatgatggatgtccgctcagtggcgtgtactgggtgtggggtgaagaagaagtagagaagtggtcgcagtgttgggttaaaaaggagaggaataattttgggttgagatatcaagaatcgaagatatctttatggcattttggtttgggttgacataataacttttttagtaggtgtgtaaaaaagctcctgatatttttgccttgatctaaaggaaaatatgttctataaagggtaaatctattaattagagacccacacaactttctttcttgctagtgtaatcgttaaattgatttttccagtccatcatgtaattgttccagcgatggaatcctgctttccactcccattctgcttcatcaatatttcctgtcatttccaagacttttggaaaaaatgatgtccagaatcgacattgttgagcacgtagtttcgtcattattcttgttgactctgtattcaaggttagatatttttgttcagtgcttttgaagacaggccagcttgtgctattgttctgagtctcatttggattcctgtagcggngnnaatnagagagcgttgcagctaattcctgtttctttggtgctttccgttatcgcagcatt

SEQ ID NO: 618248 - DNA, 561 bp, Homo sapiens
gcacgaggttttcacggatttgaaaaatgcacctccctatgtcccccaaagatccaagcagccggatggtatgaccatcaaactgctacctttccagttagaaggtcttcattggctaatatctcaagaggagagcatttatgcgggcggtgttttggcagacgaaatgggtatgggtaagaccatccaaactattgccctattaatgaacgatttgactaagtctccgtctttagttgttgcccctactgtggcgctgatgcagtggaaaaacgaaatagaacaacatacaaagggacaactgaaaatatacatttatcacggtgcttccagaaccacggatatcaaagatttgcaaggctacaatgttgtactaaccacttacgcagtgctggaatcggtattcagaaagcaaaactacgggtttagaaggaaaaatggacttttcaagcagccttccgtattgcataatattgacttttatagagttattctggatgaggcacacaatatcaaggatagacaaagcaatactgctagggctgtaaacaacttaaaaac

SEQ ID NO: 618249 - DNA, 113 bp, Homo sapiens
cctgggtcaatagtgacagctgtgattcaactggtctgaggctcggagattttaaacctggaaagtagatccccatctcggagggtggccatggaagttcagtggagatgatg

SEQ ID NO: 618250 - DNA, 845 bp, Homo sapiens
  misc_feature (1)..(1): n is a, c, g, or t
  misc_feature (783)..(783): n is a, c, g, or t
  misc_feature (785)..(786): n is a, c, g, or t
  misc_feature (790)..(790): n is a, c, g, or t
ngttccgttgacctcgtacagtggcacactttgtgtagtcgcaccaactaagtggtggtgggttgtgggaaacctcatgccattcataaacgaccgctcacgcgttcactgtgcacgactcacgatcgcacacgcgcccacacagagtgaatgcagagccagacggcgctccccttcccagccggacagcaccacaaagccctaagacaagtgagcgcgcaaaggggagccactacgttatcatgccgcacatttgtctgtatgctcctgtccccacaaacccaattccacatgtacgaagcagaccactttcaaaaccataggtaagatggtgagccaaagacatgaggacacaatactatccttccggcatttttgcttcaggtgcataataacttttttagtaggtgtgtaaaaaagctcctgatatttttgccttgatctaaaggaaaatatgttctataaagggtaaatctattaattagagacccacacaactttctttcttgctagtgtaatcgttaaattgatttttccagtccatcatgtaattgttccagcgatggaatcctgctttccactcccattctgcttcatcaatatttcctgtcatttccaagacttttggaaaaaatgatgtccagaatcgacattgttgagcacgtagtttcgtcattattcttgttgactctgtattcaaggttagatatttttgttcagtgcttttgaagacaggccagcttgtgctattgttctgagtctcatttggattcctgtagcggngnnaatnagagagcgttgcagctaattcctgtttctttggtgctttccgttatcgcagcatt

SEQ ID NO: 618251 - DNA, 889 bp, Homo sapiens
  misc_feature (419)..(419): n is a, c, g, or t
  misc_feature (422)..(422): n is a, c, g, or t
  misc_feature (425)..(425): n is a, c, g, or t
  misc_feature (434)..(435): n is a, c, g, or t
  misc_feature (437)..(439): n is a, c, g, or t
  misc_feature (455)..(456): n is a, c, g, or t
  misc_feature (827)..(827): n is a, c, g, or t
  misc_feature (829)..(830): n is a, c, g, or t
  misc_feature (834)..(834): n is a, c, g, or t
ccagtaccgagatcatgaataccctcccaaaggaagcggcgcatcgggcttggtttaaatctcaaaatgcatgcaattcccgtttaattaggaacatactaatgtacattaggggccaaggtttcaatatttaattcatttaaaaaagatacctttttacgagtggtaatgaaaatacacgtgactaaaagcagagcactgataattttggggggaaaaaacttaaatttattaaggaaagaaagaaattgaaccaggccattgttttaatatgcacataattaactgtagaactttatattgtgaaatttaattaaacatgttctacccatttgggttttgaaatgctaggtaaaatactaagttaaagatgtgaggaatcaatattatccttctggcatttttgtttcagctaggtnagnganatggtgccnngnnnggggggggggggaagnngcgccgggggtgggggccttgggcgggggggggagaggggcgaggggctataaagggtaaatctattaattagagacccacacaactttctttcttgctagtgtaatcgttaaattgatttttccagtccatcatgtaattgttccagcgatggaatcctgctttccactcccattctgcttcatcaatatttcctgtcatttccaagacttttggaaaaaatgatgtccagaatcgacattgttgagcacgtagtttcgtcattattcttgttgactctgtattcaaggttagatatttttgttcagtgcttttgaagacaggccagcttgtgctattgttctgagtctcatttggattcctgtagcggngnnaatnagagagcgttgcagctaattcctgtttctttggtgctttccgttatcgcagcatt

SEQ ID NO: 618252 - DNA, 452 bp, Homo sapiens
ctaaggatccgggagtagtcattgaaggagagaaatgacgggctacttgacggaaaagcaactgtcttgttctcctgggaggcccagaattggaggagaaaatgtcaccatcttggagaggactgtgacaccagaattgagggcacacaggcagataccagagagtctgactagatgtggcttgcccgccacgtggaaattataaggaagtacgtcctggatgacctcattgtcgccaaaaacctgatggttcagtgctttcctccccactatgagatctttaagaacctcctgaacatgtaccaccaagccctgagcacgcggatgcaggagctcgcatcggaagacctggaagccaatgagatcgtgagcctcttgacgtgggtcttaaacacctacacaagtactgagatgatgaggaacgtggagctggccccgtgaagtggatgtcg

SEQ ID NO: 618253 - DNA, 537 bp, Homo sapiens
  misc_feature (200)..(200): n is a, c, g, or t
  misc_feature (220)..(220): n is a, c, g, or t
tagaatcatggcatgggaggcagcagcttttctgtccaaggactgcagtagctgctcatgagctgtgaggacctggtgggtatacaggcagttcccagggagggcagtgggtacgtctggtgcagaccgtgggcagtgtatagagcagttgggacagactgggggctggctcccagcagggttactgtggcagctggagncccaaggagcctgctagctngtgacggaacagaaaaggttcttcgtttttaaacttttgtttttaaatactcttttttacacctgttgttggtactttttttatgcttaagtcagcattgtcttccagtgttaaaggcatcccttgcctcttcatggaacttatgtgtcaaaacaaaggaacgggcagactgtccatcccaagccagttcaattagatgtaaattcatactgttttaattttttatgcaatctgatgagtagatgggctcagatttaaaatccttaaaagcacgtttattgtaaccagaattgttatgtaattaatactgcagtttt

SEQ ID NO: 618254 - DNA, 269 bp, Homo sapiens
  misc_feature (14)..(14): n is a, c, g, or t
  misc_feature (59)..(59): n is a, c, g, or t
  misc_feature (195)..(195): n is a, c, g, or t
  misc_feature (258)..(258): n is a, c, g, or t
ggagataacctacnaagaccatataacccagtattgatgaggatatggaaaacttgaanccccacagacattgctggtaaaaatgtaacatggtttagctgctatagaaagaagtctgatagttactcaaaatgttaaacatagattatcgtatgactcagcatttccactcctaggtgtatggagtggaaatgnaaatgtgtatgcacacaaaaacttgtacatgaatgtttatagtattgttattcataataaccnaaaagtagacc

SEQ ID NO: 618255 - DNA, 956 bp, Homo sapiens
  misc_feature (414)..(414): n is a, c, g, or t
taacctttccttatgagcatgcctggtgtggggtggacagtgagggtaataatgactggttgggttgatggtagaatatggggcttgtataattggtcagttcaggtgtttataatctgacgcaggctttatgcggaggagaagtgtttacagtgttacttatacataacatatagttcttctatagggtgatagatgggttccaatggtggtggtggaaggatgttcagttaataatgtttgggagcattatttaaagtgtagtggggtagtaggaagacttggaacgctttccttaaattgaggttggacgagctatttaagagccctaactaaagaggtggtaaacaattttataaaatactgcttctagacagaggggggtaaagagaccactatagggtgggtcccaanaagacagcctggtaacacatactatagggagacataccacaaggaaaaaacctgaaacaacacaggggggagactataagagaggggagtcaccatgagtgggggggcaaaagataaaaaaaggtggaggaaagcagaagagatacacaactacatagagagaaaccaaagcaacagaggacaaagatcaacacgacgaagtgacaacccagaaaaaaagagatcgaaaggcaagcgaccatcccatacagcgatttaataacaaaaaatacagatgatcacgaccaacacaaaaagatcggagacaaaaacaagataaacgaagaagggggaagaagaagaaaaaccaataataacacagaacattaggaactacacagcaaagaggatgaaagccgtcacgatacagtggaagattaacgggaggtgagaagactaataaaaagacgtcagagtgagaataacagccaaatagggagaaaagagagagcaaccagcaacacaaaataaacaagtagacagataacatgcagcaagacaac

SEQ ID NO: 618256 - DNA, 231 bp, Homo sapiens
gaaaagctgatcacactagctctgaaatgcagcaaggagggggcttatgccctgcaacgccacaggggcagagctgttcaaggacattggagcccacctcttgcatcaatgtgacccggatgtgagacaaggagtcaaaggaaaccattttggaactttaaggtttaatgactgccctcttgtatttcagatgtgcaaggggcctgtagcccctttgttttggccaatttc

SEQ ID NO: 618257 - DNA, 814 bp, Homo sapiens
  misc_feature (59)..(59): n is a, c, g, or t
  misc_feature (85)..(85): n is a, c, g, or t
  misc_feature (94)..(95): n is a, c, g, or t
tatacccaaagaaagcggtttagtagaaaaaagtgcatcaccctgttctttcttcaggnaaggtctgttctgcgacttaagagcnaggcactanngttcctgtttttaaaaccggcgcggacacatcttatttcccaagttgtgggcctaaggcgcacgaagcgcccaaggagcgaaatttttccccacaagggcaagggtttttttccccaaaagaagcaaacaaacttatggggcgggcaaaagggaaaaaaaaaactttttcccctttttgttgggagaaaaaaccccccccccggaggggggcacgcctttttaaaccagcgaaagaagaataggtttaaaggtttttaacagtttgttgagtggggcagaacacaaacataatggtcgtccccaacaggtggtgggcaaacacacgggcaaacatttacaacgggggggttttcccgttttgtaaatgtcaactagcaagttgtaatcgactaagtgaactgttgggagtgtttactatgatccgggacgccccgttttctgcccgacccggttttataaaggaaagattttcatttgcgggagaagacagggcgcaatttttacccccatatgattggttttcgcacccgttgttgtggggttgtgaggggaaaacaaaggggatgaacaacacaaaaagggcggggtggggtgtgaaatatactccgtagataagagtgtttttgatttatatagttgttaccacgcgtattttggtttttagaaaagatcccctttttgttggggcgcccccaaagggggtgtgacaagtttttta

SEQ ID NO: 618258 - DNA, 316 bp, Homo sapiens
taaaatgggagtctcgctctttggcccaggcgggagtgtagtgggtgtcatctgggcttacggcagcctccgcctcgggggttcgagcagttctcctgcctcagccttctgagtagtagcggggattgcaggggtgtgcccccacacccagctgattttggtattttaaatagagagggggttccacagcatgggccaagcgggtctcaaactctgtgacctcgggtgatccacctgcctgggcctcccaaagcgtgggattacaggcatgagccatggtgccgggcttttttttttttttttttttatttttttt

SEQ ID NO: 618259 - DNA, 469 bp, Homo sapiens
tcggctctaccttgtctgtatatataccatggtagtatatatacagacagatgaattagacacaggcgtaagaagtagggcttatgttgaaagcctcaaatatgtgtggagctcttagtgcctcgtgatttattcacatcatgaatagtgaattctatccatgatgattaatttttttctaaattgccttaaaactgcctttaaaataccaacatcattgaaactgtttgtgataagtacaggtattgggttcatagggtgtgaagtttaagcatggaatgaaggaagatagctactatttattgggccattatttaccagatactgcgctaagtgctttttgtagatgtttatttaatctcaataataaccttacgaggtaggggatatcgtcctgattttacagatgaggggacagtttgaggtaggataagtgatttgactaagacaaggtagagccgaggggtac

SEQ ID NO: 618260 - DNA, 309 bp, Homo sapiens
catatgttttctaggattccattaatctgaccttttaggcccgcaatatagtgcattttgtgtatgtttgaccacacgcagcaaatgctgaaccctttcttattcctgtatctatgaatcgatatggcaagacttatctccaaggcatatcaaggattttttttttttattagcttacttggccaggcgtggtggctcacttctgtaatcccagcactttgggaggctaaggtgggtggatcacttgaggtcaggagtttgaaactagcctggccaacatggcaaaaccccgtctctactaaaaaaaaa

SEQ ID NO: 618261 - DNA, 275 bp, Homo sapiens
tgatctagcaggcatcccttagctgaaggtcaaattattaaatattttctaaatcatcgatggcagacatatatatattcattatgttattctccactattgttcaatgtttggaaactactgtaatactagaataaaccaagatgagcagatgtaggtgatagcattatgactatatgtctttcttcacggcgatgtcatcatttatttagggacttgtaccaacatgcacctgagttgcacgacatgatctgttgagacttggttcattttct

SEQ ID NO: 618262 - DNA, 128 bp, Homo sapiens
gacgcgtcttcccaattataggaaccacctcacaacccactcttcacccccaaaatcacgcatgcatgggacacagagaaagggaagcatgtgtgtgtaagaatagagagccctaactgatagttact

SEQ ID NO: 618263 - DNA, 827 bp, Homo sapiens
  misc_feature (42)..(42): n is a, c, g, or t
  misc_feature (105)..(106): n is a, c, g, or t
  misc_feature (249)..(249): n is a, c, g, or t
  misc_feature (258)..(258): n is a, c, g, or t
  misc_feature (262)..(262): n is a, c, g, or t
  misc_feature (270)..(270): n is a, c, g, or t
  misc_feature (274)..(275): n is a, c, g, or t
  misc_feature (279)..(280): n is a, c, g, or t
  misc_feature (297)..(298): n is a, c, g, or t
  misc_feature (307)..(307): n is a, c, g, or t
  misc_feature (311)..(311): n is a, c, g, or t
  misc_feature (317)..(317): n is a, c, g, or t
  misc_feature (321)..(321): n is a, c, g, or t
  misc_feature (333)..(333): n is a, c, g, or t
  misc_feature (339)..(339): n is a, c, g, or t
  misc_feature (350)..(350): n is a, c, g, or t
  misc_feature (354)..(355): n is a, c, g, or t
  misc_feature (358)..(358): n is a, c, g, or t
  misc_feature (364)..(364): n is a, c, g, or t
  misc_feature (370)..(370): n is a, c, g, or t
  misc_feature (374)..(374): n is a, c, g, or t
  misc_feature (389)..(389): n is a, c, g, or t
  misc_feature (401)..(402): n is a, c, g, or t
  misc_feature (409)..(410): n is a, c, g, or t
  misc_feature (415)..(415): n is a, c, g, or t
  misc_feature (423)..(423): n is a, c, g, or t
  misc_feature (429)..(429): n is a, c, g, or t
  misc_feature (436)..(438): n is a, c, g, or t
  misc_feature (448)..(448): n is a, c, g, or t
  misc_feature (454)..(454): n is a, c, g, or t
  misc_feature (476)..(476): n is a, c, g, or t
  misc_feature (493)..(493): n is a, c, g, or t
  misc_feature (497)..(497): n is a, c, g, or t
  misc_feature (505)..(506): n is a, c, g, or t
  misc_feature (516)..(516): n is a, c, g, or t
  misc_feature (523)..(523): n is a, c, g, or t
  misc_feature (530)..(531): n is a, c, g, or t
  misc_feature (549)..(549): n is a, c, g, or t
  misc_feature (555)..(556): n is a, c, g, or t
  misc_feature (571)..(571): n is a, c, g, or t
  misc_feature (575)..(575): n is a, c, g, or t
  misc_feature (579)..(580): n is a, c, g, or t
  misc_feature (597)..(598): n is a, c, g, or t
  misc_feature (604)..(604): n is a, c, g, or t
  misc_feature (612)..(612): n is a, c, g, or t
ggggtccggtaacaacatggcggcgtccgtgaggggctcttngggcaggggtagtgttggtgtccctgtcttgcgtgatatgacaaatgaagctttcctgcaccnntgacttaaggaagagtgtactcgtaggcggacagctttaggtggccggccgccggttctcatcccccgtaagggagcagaagtccttgtgtactgaccaaagatgagcacacatcttacatccaggagcctcccacgaatggnaaagggttnatgngaaaactnacanntggnngatatggacattagagnnggtgggtcnaaangaaagnttcntaaaagctgggnagaaantttttatccancttnngtngggaangcttantatngacaataccattttncatagagtggtnncctgttnncatangtccaggngggagnatcctannngcacagggantggtgnagagtctatctatggagcgcantcaaagatgtttccatncagnggtgcgtnnaatcggaagngactgtngcatggnnaaatgtggtctcatgatnagtggnngcagttttttcttcnacantggnncgagcagatgaatttanncaatangcattacnatttgtggaacgggttaccggcggtacagcatatacatgtgcggcactggtccgacgttgacctttgtgtgcgaaaggaccctaattcccaaataaaagtggggggttggaaactttggggaacttccagggataagggcgcaaaggaccgcgggggttaatgtaccaggcgccaattgtttcctggggggcgacaaagaaactcttccaggacc

SEQ ID NO: 618264 - DNA, 414 bp, Homo sapiens
  misc_feature (12)..(12): n is a, c, g, or t
  misc_feature (62)..(62): n is a, c, g, or t
  misc_feature (101)..(101): n is a, c, g, or t
  misc_feature (139)..(139): n is a, c, g, or t
agaaaatgccanatgctaataaaaatgttcagatgtatcacatattagcatacatgatctcnaatttttgcctatttatgctatgcatggctaatttgggncgccatgggtggaggcatgttagtctcaattgacaganatctccatcaactgtgcaaatggcaatttaaatacatttaactatgtggtaataatctcataataccattatcatgtagattggcagaagtattatgtggggcaaacagctatttttgtactgttgtaagatattatgaatgctgggcagtgtagggcatggcccttgctaccacttcccaaaaatgtgtaagggttgttgaaggtgccttgttcttcttttttcttcaatataagcaaagctatttatatcataaaactaaaacttgaaattcc

SEQ ID NO: 618265 - DNA, 123 bp, Homo sapiens
gagcctggcgcatggcccgtacttctccagcaggtaggtctcaatgttggcgcccacgatgtactcggcaacatcaaagttgatgcggatgaatttgccgaatcgggaggagttctcattctt

SEQ ID NO: 618266 - DNA, 445 bp, Homo sapiens
  misc_feature (439)..(439): n is a, c, g, or t
  misc_feature (443)..(443): n is a, c, g, or t
aaggctgagtttggtggagaatggttgcttggtgtctccccctctggactctttcccttctccttctcccatggtaaattattcttcccaattctcccctgtgttcacccattataactgttttctgctgccaatctttttctggaaagttccccccttcctacctcctgccccattcctcccaatcagttcagctcttgtgtgtgctggaccagaaatccctcttggcagcctaggcaacatagcaagacccccaactctatatatttttttaaattagccagcatgataatgcacacctatagtcttatctactctggaggctgaggtgggaggatcacttgagcccagaagttaaaggctgcagtgagctatgatggcaccactgcattctagcctgggtgacggagcaagaccctgtctcaaaacaagcaaacanatanat

SEQ ID NO: 618267 - DNA, 164 bp, Homo sapiens
tccggtaatcgcacggagggcacctgtacaccttcagaccagtctgcatcctcaggctgagcagcatgtgaactcaggagcgggagcagctcattcaccctgaaattcctacttggtcactgccttctcagcagcagccgtgctcttctttatcaatctcttca

SEQ ID NO: 618268 - DNA, 277 bp, Homo sapiens
tcttgaaaggccagcctcttaaactagtcttcaggaggtttgctcttaggaactggtgatgtaactgaatggaagtagctgtatgagcagttcaaaggccaagccgtgaaatggtagcaatgggatataatacctttctaagggaaacatatgtatcagtatcatttgatctgccatggacatgtgttgaaagtggataactggacctacttacaatggcttctaccctaaaacgaggagactctaagttaatgtcgttagtatgggccatattact

SEQ ID NO: 618269 - DNA, 411 bp, Homo sapiens
  misc_feature (54)..(54): n is a, c, g, or t
  misc_feature (154)..(154): n is a, c, g, or t
  misc_feature (196)..(196): n is a, c, g, or t
  misc_feature (299)..(300): n is a, c, g, or t
  misc_feature (365)..(365): n is a, c, g, or t
tggggggacaaagtgggcaagccccccctgtccccttcaaggggcaggcccctnggggttttgggtgggaccccttatccctgccccccagggcactgggattgtctccgcccctgtgcctaaaaaactgctcatgatgggtggtatcgatgantgctacccctcagcccgggggtgcactgcccccctgggcaantttgccaaggccccctttgatgccatttttaagacctacaggtacctgacccccgccctttggaaggagactgttttcccccagtttccctatcaggagttcnntgacccccttgtcaagaccccccccaaagtttccgggcagcggactcaggctccaactgggggtncaacatagggtttttatccaagaaaaataaagtgaattaagcgtga

SEQ ID NO: 618270 - DNA, 140 bp, Homo sapiens
atatatttatttttgcaatttgatgtttgttttttaatagatattacaaattaaaaatctcaaaacctgtggaaaaaagtttttaagaacagtctaccttggtaaaacatgcatactctcaccccttctgaagtcttcca

SEQ ID NO: 618271 - DNA, 374 bp, Homo sapiens
ccggtatcctggcagcgggactgtcactaccttaagatgagcattgcccagtgcacatcctcccacccaatcatccgccaaatccgccaggcctgtgctcagcctttggaggccttcggaggaagggtctttcggacagaaacggaggcaagcttgtggggcaaacttgtgccaggagcatattgcgctcgctttccctgcaggtgcgctggaggcaagtgcagccgccacgctcacctgcaactgtggaggcacagccacttcctgcctcctgaggactcctctgacggcaggaaaactggacatgaatgactgcccccccgcccctcccctgcagagtggccagatggagtcctgagccctggacatgggcc

SEQ ID NO: 618272 - DNA, 316 bp, Homo sapiens
gagaatactatagcaggagaatagtctctttacccagcgacagagttcgtcatctatatggtgagacgagcacacaaagtacggggcaaaatggtgacatgaatctatccgctatcaaactgacctcaagtcataaacccgggctcttttacaaaagtattcaacagttgaatctgtgaccagttaattagttgcgaatccactcaatcaaatcatctcaattcactatttcctttttttttttttttttttggaaaattttattaaaacccttttatggttggtttaacctagggaccctcataaaacccattat

SEQ ID NO: 618273 - DNA, 218 bp, Homo sapiens
  misc_feature (85)..(85): n is a, c, g, or t
  misc_feature (104)..(104): n is a, c, g, or t
  misc_feature (177)..(177): n is a, c, g, or t
  misc_feature (215)..(215): n is a, c, g, or t
caagaacatatgcaagttcctcgtaggattggactggctaaggacgctcagctgaaggttcatgggtttaaagtgcttgtggctnaatgcagcttaagtacggntttcgttgcaatgcgtagaatttggatcgtatccattgtaaaaggcttaaaaacctccaacgcttctataatntaccactttggggtccccttataacttggaatcgtgtncat

SEQ ID NO: 618274 - DNA, 810 bp, Homo sapiens
cccattggaaccctgcttgatggtccagggtaatccctcccggtattctgcccagaggcctttgctgagagttggctggttgccacctggaccccctccaattgctggccccttcactcctggacccttcccttacccgatccaggcagccttccgggaaccccggcttcttgtggttactgacccccgggctgacccccagccttttcccggaggcatcttaagttaacctacctacccttgcgctgtgtaaccccgattctcctctgcgctatgtggaccttgccctcccactgccaccaccaggggagctccctccgtgggtttaaatttggtggatgctggctcgggaaattctgcgcacatgcgtggccccagtttcccctggacaccccctgggaggtcactgcctgaatctgtaactttctaccacgaggattttctcgaaagaggagttgtgaaaaagaaagagccacggtctgctgtcctgaggaaggccacgtgaccccaggaggaatttcacgggtgaatggactgctcccgctcctgagttcacctgctactcagcctgaggttccacgaactggttctgaaaggtgtacacacggtgccctctgtgcctattcagccattccctactgaagacctggagcgctcacgcctgccccggaagaactggtctgcacgctccccctgctcacggcccctgaatgggtaggagcacaccccctgactggtcttaagctgttcttgcataggctcttaagccgcatggaaaaatggttgatggaaaataaacatccgtttcta

SEQ ID NO: 618275 - DNA, 1435 bp, Homo sapiens
ggcgcgttggcgcggggtgggtcgtcgtgttgtgttgtgggtggggcgcgggttgagcgctgttttgcttggtgtcgtgctgtgggtggtggggttgcgtcgtggtgtggggggggagcgcgccggcgggggtgggtcgtgtcgcggtgggttgttgcacgttggtttgtgtctcgtggcgggtgggggggcggtgcgttgggggtggtgtggtgggcggcggggtgctcccggggggtgggtgttgtggtgggtgggtgagggtgtgttgttgttgtgtgttcgtgttcgtcctttttactcgtcggggtgggggggttgtgcgaccccgctgggggggtggtgttgttggggatggtcggctcggtcgggggttggggggggacgcgctgtcgtgggtgtggttgggcggccccgctcgtggggtgttggtactggtgggtggcgtggttgatgtgtttgggttcgtctccggtgagctgtgctgcctgggggggggtgggggtgtgtgtgcggcgttgcggggcgggttcgcgcggggcggtggttgctggttagaggccggctctgtgtttgggtgggggtgcgtgtgcctcgtgtgtgcggccgcgcagggtgtgggcggtttggtgggttgggtgttggttcttcgctcttcctttgttgcgttcgctgtggtggggggggggggcgacgcggggggggcggggggcggcgggtggtgttttggcgtttgttgttgtttccccccccccctttgggtaacaccccgcgctcacacactctcatatataacacacagagcactccatcatttgtgttatacaaacacacacacctccgactgttttatgtgggacacacacacactcatgatagaacactctctctcgaaaggagcgcgccacacgctggtgtgtcccgccacaagacccgcgcgcgcgtgtgtataatcagcccgcgcgccccgcgcgctctctaatatacggcgcgctcctctcacgggtgggcgcgtggcgccgcgcgggggggcgatattgtctcgccccgcgcgggggggtgcgcgccacacacacacccgctgttgtgtcttctgtgggaacacacacactcccccccgcgcggagagagcaccacacacacagagcccccccacaaatatactcctgcgtgtgtggcccccggcgggagaggcccccgggttttgaagacaccacacataaccccccccccccctcaaaagaccccccccccccccacaagagagagagagaattatctctctcacacacatctttattccacacagagagaagaaaaaaccaccaccaaatataataccccccccctctttttgtgaacaactactgtgcccctttgtggttacaaaagacccccccctcttaaattataccccccccttttttcccccaca

SEQ ID NO: 618276 - DNA, 102 bp, Homo sapiens
  misc_feature (97)..(97): n is a, c, g, or t
tcattcagcctgagatacttcttcctcaagattatccatcaagcatttgataaccattaatgtgttcctttccaccacagcagcacgcattacgtgnggtac

SEQ ID NO: 618277 - DNA, 167 bp, Homo sapiens
cagagcttctgggtgcatctcagaagggggcagacgcacagggcagggaacacgggggtctaggcttgtggtccgagttgtccccttgttgactgaaaggcttagggggaggctggaagcttatacaggatgcccggtggcttgttgagaccgaatgagctctttct

SEQ ID NO: 618278 - DNA, 362 bp, Homo sapiens
ttctagaggatcccatgcgcgagctccatccactcagctctggggaggtgtccagtgacgtcctctctgcgtgtacaggatgatcccaccccgatcgttaggaagatgtgccccaggaactcgggattaccttagtgtggtgattaggggtgaaatggatcctttgatagggagtttcttgatggaagcgtcgcgcatatgcacgatgctgagattgaaaagaagaactgaaaacgggtgacatgtccgatcaaacccccatgtactcagggaatcatcccagggcagtcttgcaggctgcagtgcgtagcttcaaatccagcactaattcctcagcccctggcctgaggtcatcatcagca

SEQ ID NO: 618279 - DNA, 294 bp, Homo sapiens
  misc_feature (90)..(90): n is a, c, g, or t
  misc_feature (184)..(184): n is a, c, g, or t
  misc_feature (186)..(186): n is a, c, g, or t
  misc_feature (230)..(230): n is a, c, g, or t
  misc_feature (232)..(232): n is a, c, g, or t
  misc_feature (234)..(234): n is a, c, g, or t
  misc_feature (269)..(269): n is a, c, g, or t
atgaccaaagactttgtccttcttaaaagctgtgtggtgggaaccaaaaaacgggtggtccccccccccaaatcctttttggtgcaaaanaaacggcgggctttggaaaaaatttccctttagttcatttacccccccccccagtttggccatggcccctttccaaccatggaggaaaaaaaancnttttttgggcccccttaaaaaaaacccaatttcaaaagaaaaangngntttattcccggaacaaatttttccgttgggggggnttccaaaaaaattttttttccctta

SEQ ID NO: 618280 - DNA, 625 bp, Homo sapiens
ggagagaactagtctcggtttttttatttatatttttttattttttaaaaaaaaaatagaaaaagggctcccattatgtgggccaggagtattttcaactccggggctcaggtagatcctcctatcctgggccctcccaaagggcggggaacacacgggcacatgaagcccacctgtgaaccagctctggaggaaagcccttaggtcagaggggagtacactcccacaagacctctcggtggaacacccaacccagagaggtgcgtcgggaaaaaaaggggagggcgtggaggaggggcggacacagagtggcgcgacaagagcggtctgcctgaggggcacaacagcaggaacaaagcgagagcaaacgacaacacacaaagcaaccaccgaggacacacaccgaggggaagacgagtgggagagacgcaacgacgagcgactggagctagacagaaagaagcagagagaggggggagagacaaagaagaggagaaacgatagcgtgctatgcgcgggcgggaaagaagaaccaaacaccacaaacaagacaacaccaaacgacgacagcgaaaataacgaacagagacacacacgaaagcaaaacagacaaaagatcgaaaac

SEQ ID NO: 618281 - DNA, 241 bp, Homo sapiens
aaacccccaacccaaaaccaaggattttggaatggggcccccttagtttccgagggtgggttgtataacccctatacccttcgaggaccctgtttgggttggtattaatttgactgtgcctgaccgcggccatcttttctttgggcaaagttttctgtttattttgcttgtcctattcgatgtactttaaggggtctttatgaagtttgcttttctggccataaactttttggcttttgga

SEQ ID NO: 618282 - DNA, 218 bp, Homo sapiens
  misc_feature (3)..(3): n is a, c, g, or t
  misc_feature (210)..(210): n is a, c, g, or t
ccnctaaaccttcccaactctgcaggacagacatggagggaggacaggagcagcttgtctggattttatgctccagaggcctgccaactgggacactcccccgactgccactctggacctaatagctgttccttaggccccactccatgccacccccaccagctggaggacccagcctcacagtgtgtcctttgtgccagaccaagcggnccgtgggg

SEQ ID NO: 618283 - DNA, 529 bp, Homo sapiens
  misc_feature (238)..(238): n is a, c, g, or t
  misc_feature (442)..(442): n is a, c, g, or t
tggcaggctctctaccattcggggggtctgacagcttctgtcctaatactcgcatcaaataagaaattctcacttggggttcgggaggaggcatcaggcccagcctgactttttctggtagttccttcggtgcttccctcctggttggtctccgaagttttttctgttccttctgggtaagatatactcccagagtaactggtgtgtcatggtcaacgggaggatggagcggggcggnatgtccaacaagattggtgattccaaaataatcttctctctggggattttcctctgtaagatcaaagccatgggggataatgtaagagtcccaccactcaatttcaggaatatctccttcctttagctccttcttaggagcaaggagggcaagcctagtcgaagtagggatgccggttttacgagcggctggtgaaatctcggnctgtagcttctccagttgagccttggtccgtaatcgctgagcaatcttctcaaatgtgcccttgtcatggaatttacaagtgcgtct

SEQ ID NO: 618284 - DNA, 569 bp, Homo sapiens
caaatgtgcaaaaactgagggcattcattcatcaccactaaaccagtcctaaaatacttaagggaattctacatctgaaagctaaagaataatatctaccatcatgaaaacacactgaagtataaaattcactggtacagcagatccacaaaaatgagaaagaaaatggagacaaatgttgtcactacagaaaaccaccaaaccacttgataaacaagaacagaagaaaaaagcaaaggatgtttaaaattaacagaaaataatgaacaaaattacaggaacaagtcctcacctatcaataataaccttgagtgtaaatggattaaattccccacttaaaagatacatactagctgaatggattttttaaacatgatccacctatatgctgcctaccagaaacccatttcacctgtaaagacacatatagactgaaagggaaggaaaaaaatatctcccgcaaatggaaaccaaaagtgagcaggagttgttattagataaaacaaactttaagtcaaaaactgtaaaaatgagacaaaaaaggtcatttaaattatggattaaaaaat

SEQ ID NO: 618285 - DNA, 169 bp, Homo sapiens
  misc_feature (8)..(8): n is a, c, g, or t
  misc_feature (20)..(20): n is a, c, g, or t
  misc_feature (118)..(118): n is a, c, g, or t
  misc_feature (136)..(136): n is a, c, g, or t
ccgcgaanataaattttttnccttttaatttgttttgtcctaaaataagttaaaggccctccagagcttttcagccacctttgtctcctactctgtgccaaatatttttccctccggncaggggagccagggtagnccaaaggagacaagcaggacctggaaggtgagg

SEQ ID NO: 618286 - DNA, 259 bp, Homo sapiens
aaaaaaaatgggcccccccgggtcaaaggaaccaaaggggcggtttgcccccttttgacattttgttcctttttgagcattaacaaaacaactaggtttactatttcaccccacctacagcggccacgcaaaaaacttgacattctccatcatttttaatgtcctagaaaacagaactcccaacaaatgtttaagattaaagacggaactggaatggaacttaattttacatctaataaactgtcattaggttcctgga

SEQ ID NO: 618287 - DNA, 137 bp, Homo sapiens
atatcagcagcactggcatggtgtaaaccgggactgttgtgtgttaatgcatttaatgggccagagtgggggcaaagaaacatagcagggttagtagagctgacaacgagaccaggtatatcatcaactagccgtgt

SEQ ID NO: 618288 - DNA, 1082 bp, Homo sapiens
cgagcgatgggcatctctcgggcaacaactggcacacagcgccgcaaaacctgggtgcaagagaaagccctaccacaagaagcggaagtatgagttggtggtctgcccacgtctgttcattgcaccaagattgtgccccggacgcatccatcacatgtccgtgtgcggggaggtaatcgaagaaactatcgcagtgtcccatgcatggtttggagcagtaggtggaacgtttctcactgggtgctcacgagatgttacgtcactctgtaaataccaacgtgatcattcgatgattggtactacagatgacagttctaactaacgaggctgtgttcggtaccaagtaccctggatgataggaattgcgatctgtgcttccagtcgaccatgcaacaaccggtaaccctgacgaggtagtgtacagaggtcccactaatgcgctgcccctggcgccgctaatgaacggggagcccaggctgatttccgtgaggagaagtaaagaggaactcttaaaacagcaatacaaaccggatacttactaaaggcaactttccaggacagcaccaacttttgcatagcactaaggggacacaaagcggaaaattagcccaaaaagtccgaggcaagagtcttcccttggcagtggagttcaagataatccccaagtccagtgggacaacgtctttcttggcaggttgcattctgcctttccaaatgggcccggggtaccagggtgattggacgcgcagcccagtcattggccgttatttagttggcctcaaggacgggggcaaggaggaccgtttcgcggaacgtttgccgtaactcttttaatgcgaaaaacactccaaggcggggcccccgcaagtattggggcccggaaaaatttcaccaatgttccccattttggcgtgtacaaaccgggattacgtttatcgaaacccgcccaaagttgggttaaattttcgcacccgggagggtggctataaaatttatgggaacgcaagggggttgcccccccatagcagcacaagagacacattgcaaaggcacactagggagggtggggcccgggagccata

SEQ ID NO: 618289 - DNA, 198 bp, Homo sapiens
tggaggatggtgagactcagactcttaggccctgccgggaccggctgaatcggaaccgtgcaatttaccgaagaccggtacacacataacatgtgagaagcccccccgagagctgtgccacacttgctccactcctctccccaagattcagacccacctctggctctctcatttccagcagacacccatcctccaggt

SEQ ID NO: 618290 - DNA, 122 bp, Homo sapiens
  misc_feature (6)..(6): n is a, c, g, or t
  misc_feature (50)..(50): n is a, c, g, or t
  misc_feature (77)..(77): n is a, c, g, or t
cctctncctaaactgacaatgaattggttatacatcatgcataagctacncttttatattagtttatatttgttatnctaagacttgtgtttcatcaataaagttgtgttttaagcagcaga

SEQ ID NO: 618291 - DNA, 548 bp, Homo sapiens
ggccacacaggcccgcgaccatgggacctgttgtacgaccccgggccagcactgcgagtgcgctcccctggatcctaggggagctgctgggcgctgcactgccagcgaatccgttcacaccgggcgtgcatacctagacacgctgtgtggcctcggccaaacacttggacggcatgtgcctgagcactgactttttgcgcagaacgggttggctagacaacatggaggccttactcggtgcctggagctggcatagagctggctcaagctatctgctcatgttacaagcatactcatttcacaggtgaggcaactgaggctctgcgagtcaggccactagcttatggtaacacctacagaccatcgggagcgaggatctggagagtagctatcagacacatgtcgcgctcacatgtatttgcctgaaccgagcctggtcagagctctttgggctaaacctcataaagacttgtcttaccaagctgacgactgtgcgctagttcttggccaggtcacctccatagcatttgtgctgtgtggggtttgtt

SEQ ID NO: 618292 - DNA, 169 bp, Homo sapiens
ctgcagtggctggtgattccatgggcataagccaccatgcctggccttgtattctttgaagtataaagcgttgagagaagggggaacacaacgctttatacttccgaggaagtcagagaagggggaaggaatcacttttgaccattagctccacgggaaatgggtgtca

SEQ ID NO: 618293 - DNA, 418 bp, Homo sapiens
  misc_feature (81)..(81): n is a, c, g, or t
  misc_feature (116)..(118): n is a, c, g, or t
  misc_feature (142)..(142): n is a, c, g, or t
  misc_feature (149)..(149): n is a, c, g, or t
  misc_feature (161)..(162): n is a, c, g, or t
  misc_feature (166)..(168): n is a, c, g, or t
  misc_feature (170)..(170): n is a, c, g, or t
  misc_feature (175)..(175): n is a, c, g, or t
  misc_feature (177)..(177): n is a, c, g, or t
  misc_feature (180)..(180): n is a, c, g, or t
  misc_feature (186)..(186): n is a, c, g, or t
  misc_feature (189)..(189): n is a, c, g, or t
  misc_feature (203)..(203): n is a, c, g, or t
  misc_feature (218)..(218): n is a, c, g, or t
  misc_feature (222)..(222): n is a, c, g, or t
  misc_feature (224)..(224): n is a, c, g, or t
  misc_feature (231)..(232): n is a, c, g, or t
  misc_feature (237)..(238): n is a, c, g, or t
  misc_feature (243)..(243): n is a, c, g, or t
  misc_feature (245)..(245): n is a, c, g, or t
  misc_feature (249)..(249): n is a, c, g, or t
  misc_feature (254)..(254): n is a, c, g, or t
  misc_feature (261)..(261): n is a, c, g, or t
  misc_feature (266)..(266): n is a, c, g, or t
  misc_feature (270)..(270): n is a, c, g, or t
  misc_feature (273)..(273): n is a, c, g, or t
  misc_feature (276)..(278): n is a, c, g, or t
  misc_feature (282)..(282): n is a, c, g, or t
  misc_feature (284)..(284): n is a, c, g, or t
  misc_feature (286)..(286): n is a, c, g, or t
  misc_feature (289)..(289): n is a, c, g, or t
  misc_feature (292)..(292): n is a, c, g, or t
  misc_feature (297)..(297): n is a, c, g, or t
  misc_feature (300)..(301): n is a, c, g, or t
  misc_feature (304)..(305): n is a, c, g, or t
  misc_feature (307)..(307): n is a, c, g, or t
  misc_feature (310)..(310): n is a, c, g, or t
  misc_feature (319)..(319): n is a, c, g, or t
  misc_feature (321)..(321): n is a, c, g, or t
  misc_feature (325)..(325): n is a, c, g, or t
  misc_feature (340)..(340): n is a, c, g, or t
  misc_feature (344)..(344): n is a, c, g, or t
  misc_feature (346)..(346): n is a, c, g, or t
  misc_feature (354)..(354): n is a, c, g, or t
  misc_feature (358)..(358): n is a, c, g, or t
  misc_feature (363)..(364): n is a, c, g, or t
  misc_feature (367)..(367): n is a, c, g, or t
  misc_feature (370)..(370): n is a, c, g, or t
  misc_feature (379)..(379): n is a, c, g, or t
  misc_feature (381)..(381): n is a, c, g, or t
  misc_feature (388)..(388): n is a, c, g, or t
  misc_feature (391)..(391): n is a, c, g, or t
  misc_feature (395)..(395): n is a, c, g, or t
  misc_feature (398)..(399): n is a, c, g, or t
  misc_feature (404)..(404): n is a, c, g, or t
  misc_feature (406)..(406): n is a, c, g, or t
  misc_feature (410)..(410): n is a, c, g, or t
actaacgctcttcctagtccccgggccaactcggacagtttgctcatttattgcaacggtcaaggctggcttgtgccagancggcgcgcgcgcgccaccgcacgcacacacacggnnnttaacttttttaaaaatgaaaggntagaagngctcagcggcgnngcgnnngnggcgngnggntcccgntgntgtcccgccgtggnaggtaacccctccgntcgngncgcccgnncccgnnccggngnccgngtggntgggtgnagcgnccgncgncgnnnccgngngntgntgnactgnagnncgnngncgngggtagcgngnccgncgccgtgtcccccgnccgngncccccggnccgncctgnncgntgntctgcgcgngnccggcgnggnccgnggnntgagntnaggnaaccaagg

SEQ ID NO: 618294 - DNA, 610 bp, Homo sapiens
ctagactggacagaccatcctgagagtgaccatgttggatatcacgggctaaatgtttcgttggacggtgctcaggagaccggctgtatctctaagagtgatgcttctgtctactacgagcttatcgctgtatagccaatttggacctgcaccagcggtgccttactgatgcacagacgccgtatcctatactaccttgtttaatgactgtgaataaccctggacagtcagatatttgccaggttaaacactgccgtcatagatagccctgccatttctaccacattgagcgcctgatcagcagcttacacacactgtatgtgcgctctacgtcagattgcatgtacgcagagacatcctcatgcataactctaaggtgctcattcctgaccatctgagcctcattatacttgaaggatgactcacacgaactccccttacacgatctctcggggcattatgctacactgcaattatttgaacgctatagtaaccactgtggggaatccatgcctggatgaccggtcatgctttgaggtcatataccgaggcctatattcaagatcttgccaggcccttctttgcctagcactcgcttgtgccccttctg

SEQ ID NO: 618295 - DNA, 162 bp, Homo sapiens
ataatcagattatcagaagtaagagttaattttgaaagctcaacgctttatacttccgaggaagtcagagaagggggaacacaacgctttatacttccgaggaagtcagagaagggggaaggaatcacttttgaccattagctccacgggaaatgggtgtca

SEQ ID NO: 618296 - DNA, 392 bp, Homo sapiens
tccctggctggcccagactggtcccagcctctgatgagtaatgtagaaatactttgaacgaggcacttccaatgaccagccccacagattgggttaggaagtgttccctctgcttttattttttggacaagattatagagaactggtatcatttcattctttaatatttgacaaaattcattgaaaccatatggagttgatgctttcttttttggaagatcattaactattgattaaatttatttaatagacataagcccattcagattatttaattctctttgtgttggtcattatgaatcagaatcagtcacattcatgtaagttaaaaaatgtgtgagcttggagttgttcatagtatttcttcattattcttaaatgtccttgaggtc

SEQ ID NO: 618297 - DNA, 216 bp, Homo sapiens
  misc_feature (144)..(144): n is a, c, g, or t
  misc_feature (183)..(183): n is a, c, g, or t
tggatcaggaatccgatggtgcagcgctataaggttcgttgttcacgattaaagtctacgtgatctgagtcagaacggagaatccagtcggttcatctacttcaaattcttcctgtacgaaaggacagagaaataaggctactnacaaagcgccttcccggtaaagatatcatctcaacttantattatacccacacccacccaagaacagggttt

SEQ ID NO: 618298 - DNA, 218 bp, Homo sapiens
tgataacgtcgtattctgatcacaccgaaccgggcggtgagcggcaggttttcctggctagacttcacgcaccgcaggcaaggtttcgaggaggaagcggctgggttgtcgaagctgccaccgtaggcatcggtacgctggttggaatgctcagagaaaaagctctggcccaggtagccgtgggcaaagtgcagttcgatccattcaaaagccggcat

SEQ ID NO: 618299 - DNA, 768 bp, Homo sapiens
  misc_feature (251)..(251): n is a, c, g, or t
cggcaaattttagaaagatgcagttctttcctgaccagtttgaagcactctctgaaatgtaaaatcctggcactgtcccaagcagctctttgagaccctgaatggttgcgtgcgagcaggaggaggtgtgggcttagggacagacccagagggcagccgcagaaggagaagggcctgaatttggagtctcagccagtcctggcaagccagggccacaggtagtcttccagcgtcattaggaattctatctntctggccttctgaacctcttcccatgctcttcagacaaggcaggcagagccttgtccaagcccgccgcacggcccagccagaatgggcaagagcttggcctggggctggtggaggcacatggccttttctctagttctttctatgtctgatgtaccaggtgacagcctcctgcccagataataagtgaagtgggaggaagtcagtggatgggggtggaaagcacctggttttcaggagacagcttgccagggaaggccacacccaccccagggcgtccttggcttcaggaagtcctcaacatcagctgctgcttgtcctccatcacttccgtcctagtcacagtccctgctgagggcagtggggtgcttccatcatggagcactttgtcccattttcagtcagattatctcagatgtggctcttcccagctgtccacccagatccaggaggttgaaatagaaagtgcctgagcgccactgcactctagcctgggcgacagagcgagactccgtctca

SEQ ID NO: 618300 - DNA, 821 bp, Homo sapiens
gaagtgacagaagacgtgcggagggagacgcagagacagaggagaggccggcagccacccagtctcgggggagcacttagctccctccgccccggcgtcccaccgctgatccgagggcggctcctgaatgcccatcagcgcaccgatcgcccgggactccccaatggaatgcctatgcatgtgctcccatggaggcatgcaggtaggaggtgagagtcgagctgaaatgcccacggtgacgcccgggggtaaccctctgatgtccgcagtccactgtcgtccatagccgcgacatgtcaccgtaatggtgaccctagtcgactgacgactgaccggccacgggacaacacgagaccctcttattccaccaaaaacactgaatttaccagggtgacaaatcattcaaagcgaccttggcacatgcctgcccgtgcccccccttggaatctcggcctacgcattggccactgcgcatgctacaagcgatggcaaactccccgcaacagcactagaccaagcccgtagccgacacgcacacttgcgcgcgcccaacaacccccggagcacaaaccacttggcccgccgttatacactgggaccaaataaacaacgaagaccgtagcggcgggctggcgtgggccaagcagcacaccccctaaaactaagcggacccgaggcagcgaacgaggacaccaagcccaccacccgggcgcactacccaccaccgtggaaagaccccaaacccgccctccccaaggcacccaccccacacgaccagccacatacgttcgagggcgaacacccacctcgcgccccaaccc

SEQ ID NO: 618301 - DNA, 349 bp, Homo sapiens
  misc_feature (2)..(2): n is a, c, g, or t
anaagtatgacagatgcatatcgcacactacgtgtgatacaccatgaaagctagattaacactctgtagccataaaaaaaaacatggccacacacccatctacagggaagagatggtttgcgggtcaattttcccatttttgtggctgaaattaaatttggccacttcccagtgcatactcatcacgcaaaattagtcaaataaggccgggcgcagtgggtcatgcttataatcccagcgcttggggagactgaggtgggtggaccatttgagcccgggagtccaagaccagcccaggtgaatttctccaaaatccatctttacacacacacacacacacatacgccca

SEQ ID NO: 618302 - DNA, 153 bp, Homo sapiens
aagccctatcatatcaacaatgggtgctacagtcaagaaaggaggtgcctgttcaacacagcaaagaccacagcaacccctgctgtacggacagcatataaattttgcacaaaaatcatgcaaagcttgggactaaaggaagtgaagagtaaa

SEQ ID NO: 618303 - DNA, 1776 bp, Homo sapiens
  misc_feature (339)..(339): n is a, c, g, or t
  misc_feature (454)..(454): n is a, c, g, or t
  misc_feature (456)..(456): n is a, c, g, or t
  misc_feature (831)..(831): n is a, c, g, or t
  misc_feature (995)..(995): n is a, c, g, or t
  misc_feature (1149)..(1149): n is a, c, g, or t
  misc_feature (1302)..(1302): n is a, c, g, or t
taatctccaaaggggttttttattttccttttttggactattttctaagaaaaaggccgggtaagccgggaggtaaaaagagaaccccccggcaagaaagggtaaacaaaggcagagacccctcaagaaatctcccggggcgaggggaggtgtcccctctcccacagatgtgggcccgaagttcaccagggcaaggggctcatcaagctcagagccttaagaggcacttatcacagaggtggacaccccccacaaccctctcacacaatttttctcgcggggataaacagaaccacagagagaatcttccgtcgcggggagaagagagggaaacgcganggagatacaagaagaggagagggggacaccgcgcgagtgaaacacgcggaggataaaccactagagcgggggggccactctctctatagagtgcgccgagtagtgagaagaacananaatctgcgagagacatagcgggtcgccaagagtagagaatatcacgagagctccgcgcgggcctcccccaccccgcgcgagagcgggtgcccagagaagaaaaccgcgccgggggagaccaatatataacacccgcggagagaggaacaacgcgcggggggggggggttagcaacgaggatcaccaccaacaaggggcgcgcgccacctctcttctctcgttctccccacatgtggttggcgccccaagtgggggcgggcggggcggtgcgtggccacccgcgccgccacaacaaagaggtaagaccacacctctcgctccccagcaggggggcgcccccacaaaaaacatccgccaccaccggcgaccgcaagngcgggcggagaccacagcggaggaagaagggccatcccacccccaaaaggcgccccttgttggtcgcccccaatatagtgaaccagccgacaacacagtcgaaataaacaccgccggcgagggtgtaaaatcacagcagacgtgctttcttgtgtccacaccangcagagagagacggggcggacacacaaacccggcgggaggacaacgagtcgcccgcccgggggcaaacagatactaccccgccgcggagagggcgttgcggccggcacacacccaccggcaccacaaaacacccgccaaaaaatacatcttgantgaaaaaaaacaaacacacctctcgtggagcaacaacggggcgcccccagcgaccaacacaagtgcgccccccaagagagggttcaacaacaacgatgtggaaacaggttcccgcggagcgcccgtcgagagggggggcaactccctttcgtncgaccaccacccaagcagagacaacgagccaacaatacgaggaagaagcaagaaacaagacccagaaaaagagacgcacaaagaagggcgcccaccgcatctttatccccacgaaggtagcaacagaaaagtgaggagagaccacgcgagaacaggcggggcaacacacaagcggtccccacgagactcccaaatattaagaaacaggagagcccttcgggtgtatcgggcggcacagagagctactcctcctcttcaggaaggaaagagggccgctccgcccacagcctcccccacccgaggacaacaaacaaccacctcgcgtggcaggcgcgagcgcacctttgacacaacaagtagaagacgaggagaggtacctcccgcgggggaagaaagaaaactcaccccttcggaggaggcgcgacaccataacacacgggagcgggaaggagggcaaccccacacgaaacgcag

SEQ ID NO: 618304 - DNA, 1012 bp, Homo sapiens
ccgtcatctactctaccatcttggcaggcacactcatcacagcgctgagctcgcgactgatttgttagcctgagtaggcctagaaataaacatactagcttatattccagttctaagcgcaaaaaaataaacccttcgttccacagaagctgccgatcaagtatttgcctcacgcaagcaagcggatccataatccttctaatagctatcctcttcaacaatatactcgtccggacgaatgaaccagtaaccgaagtactaccaatcaatagctcatcatgtaataatcatgaaatggctatagcaatagaaactaggaatgaagccccctttcacttctgagtcccagaggttacccaagggcaccccgtctgacatccggcctgcttcttctcacatgacaaaaactagcccccatctcaattcatatatccagatcgtctcccgtcactaagaagcgtaagccttctcctcgactctgctcaatcttgatccatcatagcaggcagttgaggtggattaaaccaaacccagctacgcaaaatcttagcatactcctcaattacccagcataggatgaataataggcaggtctaccgtacaacctaacataagcattcttaatttaactattatattatcctagtacgacggattcctactactcagagttaactgcaggacagaacctagtaatatttcggacctgaagcaaggtaaatgggctggtcgccttttagtttcatgcaactctccttttccctagagggtgggcccggtaaacggggtttttgcccagggggcgcattggaagatcccagaaaaaaatgggtcttttgcccccactaattgggcaataccgcccttacgtatatataatacgaaaatataccctcatagaatccccacttatagaaaaaagaaggtggtaaaaaccaccgctccatcagaaagcacaatcctctttataaaaaaaaagaggggcagggcgagccgagaacagataaagccg

SEQ ID NO: 618305 - DNA, 138 bp, Homo sapiens
gacgatccgggtgagcaagtagcaggctttcggggctgggaaggggcagttgggttccgggggctgaccctaaggccccagcgcagctgcctcccggtgctggtctgtctccccctctctgtttatggtctgggctgt

SEQ ID NO: 618306 - DNA, 527 bp, Homo sapiens
tcgaaccctgacttgtcatctactgctgggctcccagagtgtaggattacaggcatgagcaccgtgctggccctgcgtgtatttctagggcaggatggcctgcccttcttctagtgggaagggcaccagtggcattacttggttgtttgctccggaaagaaccttcaaaggccacagaacgggaccttccccctggtgactcacaggctgtgggcgggcaggggcggcctccactgtgcaagggtccggactctctgactctcattaatgagtgagtacatgttcctgctgagatgctggactggagcccggttgtgggcggcggtgagtgggcaggcagcagtgagtagcagccggggtggggtgagctgtccccaccgtgactcagaaggtatttcttgctgctgacctctgagcttgagtgtcctgagtaatcccagttcccccggaggaagataaaactttaggcagctttgtgtgagtaaaggagtcgtttaaataggaaggaataatagaaaaaaaccaag

SEQ ID NO: 618307 - DNA, 229 bp, Homo sapiens
  misc_feature (15)..(15): n is a, c, g, or t
  misc_feature (22)..(22): n is a, c, g, or t
  misc_feature (78)..(78): n is a, c, g, or t
  misc_feature (123)..(123): n is a, c, g, or t
  misc_feature (154)..(154): n is a, c, g, or t
  misc_feature (159)..(159): n is a, c, g, or t
  misc_feature (223)..(223): n is a, c, g, or t
tgaaaccaataatanttatcanttttcctcacactgttttgcgtatggctcctattgcactcaaaatgtttttgagantcatccatgttgttttgtgtgtcaaaagtttgttcctttagccantccatggaatgaatgtatcacagtttattgntccantcttgtattgatagatatttgaatgtttccagtttttcctattatgaataaaactgctatgaanaaaaaa

SEQ ID NO: 618308 - DNA, 159 bp, Homo sapiens
taggtagtatagcagcttcaacgagaaagttctcttccattacacgcatactggcgtaccagtgcactacatttgttccttacaagaggcatccactatcacacggtgagaggactagcacctagtctcacggatacatcagtggacataccatgctta

SEQ ID NO: 618309 - DNA, 561 bp, Homo sapiens
gacaggtagtgctccctcattttaatctcatccttttaaaaataatcatacccttacttgttagccaggagttcacagtgtatatctgtttgaaaatatgccttcatcttttctacaagggtttagcacatccctataccctcagctagactgtcaaagggctgctggaccaagcctagtcctgaccggggcctggcgctgggcatggcaggccttctgggcaagcaagctgagtaaatggtctttcactagcagtgtcacatgatccttaacctgggactgcctgggctgcaggctggagcctggtctgtttagatttgagtgctctttacattgacagacacacactgagcacttcctcaggcagaatccaatggagggccccagggaaggcagtcagagaaggcttcacagaggaggagatgtctgggctggggaggaagaaagtcactagctattcacagtgggggtggcagggggagcatgggcaagagggcataccgcgcagagaaaatggttactactgatttccctgcctgttacaggcaaagagatacctgg

SEQ ID NO: 618310 - DNA, 143 bp, Homo sapiens
cgatctagaggcatccccttcatcctccaaagcgctgggattacaggtgtgagtcaccttgctcagtctctacctgcatttttgaatctgtgtcttttgtcattacctggctactttttggagactgtccatcattttctagc

SEQ ID NO: 618311 - DNA, 170 bp, Homo sapiens
ctgtagacattcgtacgtcgtgtgtgaagagggtatgcaaagacaagacaggactggagctggggtggaagaggggagggggacactggatgcattcccccgcacccaggaagcacctcatagagccctgagacaccctcgactcaccctgagcccctacagactccatc

SEQ ID NO: 618312 - DNA, 273 bp, Homo sapiens
tacttactcatctgtaactgaaagttctacctttggaccaacatctccctattccctccaccttccagcgcttgacaatcaccattctaccctctgtttttatgagttcaactttcttagattccacatgtaagtgagatcatgtggtatggcttatttcacttagcatgatatcctacaggttcacccatgttgcgcaaatggtaggattttctcctttttatggctgaatagtatttcattgtgtatgcacacacatagttcagcgtctga

SEQ ID NO: 618313 - DNA, 359 bp, Homo sapiens
gatgcagtcgagccagcgcggatcgaccaggctcaccaacatatcgaccggcagccggtccagcagcggcgccatccgatgcgcccacaccgcgcgccgcgcggggcgcagcacctggccgcggcgtcccagccgcagcggcatcgccgccagccaggcggcgccatgggcggtggtgccgcaaccgatctgggcgaaggtgccgagaatgcgcacgcaggcccgcaccgcgcggcacagtgcgcgatggccgccgaacaggcgcaggctggcggtcacgtcgagcgcgacggtggcggggccgagttcctcgtccagcgtgacctgcggcgtgaagcgcagcagggccagcgcggccg

SEQ ID NO: 618314 - DNA, 167 bp, Homo sapiens
aactctcacgaacaggcataggcattcttattctccgaactcgcagcaagctaaatgggtattgtttcaagatctgtagctcctgacttgaaggcgctcagccactcctagaacattgttagagcatctctaactttaccagagactaacaggcctggacatgagag

SEQ ID NO: 618315 - DNA, 640 bp, Homo sapiens
  misc_feature (17)..(17): n is a, c, g, or t
  misc_feature (428)..(428): n is a, c, g, or t
tctttcaggtttttggnccccccccctggttggttaaattgcagtaaagagatgaagccaggtgggaaaagtgtatttgtcaatccttgagtgatgggtatggtagacaagataaagaggctttattgaactcactgaaatcaaatgttaagaaacttaaaattttattgtattataatagttgtcatagaacataaggtatttttcaaattaatcaagctatgttgtgtttttcagcttttatctgactagtatctatgaccattcaatatttgaagcctttaataaggtggtgcagaaactcattccacaactgccgaccttggaaaacctattaaatatctttatatcaaattcaggtattgaaaaagctttctctttgatgtgtcagcaaaatctacattgcaacagacagttccccctgtggnggaattttaaaattttgggcccccaaaaaaactttccccttttttttaaaatttgggaaaacttttgctggtgacatgatcgatgttgtaattgatgtgtcttgtatatatgggtaagttatgtatatattcctgcatatctcagacaggcggaaaactattaacttgattggtcagaagactaattctgaggcccctggcagtggtactac

SEQ ID NO: 618316 - DNA, 908 bp, Homo sapiens
ggaggtcagcagtgccacagaacaaactggcgttaagaacatgtcgttcttcagcatttacaacaccgacaaacctttactgaatcagctgagtgttaataatacgaatttcctttatctcgtgctatccaagatcaaattctgtgggattataaaccatttcagtagaaggcctgcatgactgtcatgacggcaagatcctgaaacaggaacttataaagactgtatgtcgatgtctcatcttgaggaaccaaaagtaacagcaagatgacgaaaccacccacagaaccacgatacacgaggcccacgatgctgggcctgacaggaccctgttcatacaggtgtcactgtcagcacgttcgtctacgagaagctcacaggcacagcaggacgatgctaccgcgcaccaacggtttccagtccctcatggacaaccagaggataccggcacatcggtcacccaagactacccggaagtatcgtgccacgagaatcctcaagagcaccatgaccttgtgcgcatgcctcccccttttcacgaacaaccctacctcgacgtaaccccaggcctagccggtgaggtacttgttgacgacgccctgcttgcaagaatgacgtaaaatccactttctctgcaaacaattaatgcaatagcaccaccaaccaattatttaacaataaccacaaaattgctaacaccgcaaattactacttggataaaacttcctatgcgctaatagagcgttagacaatatataaccataacccccttattcccctctctaacagaggcacgattgaaaccatccaatacattcacactgcaaccgggagcgcccctaattaacagcttaccatgcacagggttagcactcttgtacgaacacgcaacccactttgcgatgacc

SEQ ID NO: 618317 - DNA, 189 bp, Homo sapiens
  misc_feature (93)..(93): n is a, c, g, or t
  misc_feature (109)..(109): n is a, c, g, or t
  misc_feature (121)..(121): n is a, c, g, or t
cagattgtggacttgagtctgactacttgtggtctgacaatttaggaatcacccaaatgatgtccagagttccagaagattctagggtacatnttgaggtgtagtccanggagttgcaacnttcgaaatctcgtgaggtgattccttgtgctattaaagacacatgcatgacagacgcgctcttaccgg

SEQ ID NO: 618318 - DNA, 1604 bp, Homo sapiens
  misc_feature (292)..(292): n is a, c, g, or t
gctgatcccccacgactttggtatgaacgaagcctccgctcctgacacaatgcacgacagtgctgcatggccaagggatgagatagatgcttgacaatcgcttgtctggcactatcgagcgctggtccttacatgatctgcgtcaggaggaggtgtctgattgagtagcagcaaggaatcccattcgagtgtacaactactgtactaagcctccatgatacgtggaccagttcaagtggtgcgtgtggacgagcgagtcattcctgagagacaagcccgtgacagtcgatcnaggtaagatagtgttaagcaacgcacatccatgactaaccactaccactataatgcgttactgtacctatggacatgtcattcgcattactctttctagatgactagcaatgcgtgtacacgggcgatatttgcctaagcgcttaccgaaagcaccatattaacgccagcacttccattacaagccgaaacgcaattttgacctagctaggggcaaccgagcggtacccagaggtgacacgccaaccaaagacttttttcgcccttggcgcgttattccccattaggttcccacaaggcgtggtgccttcttccggcggaaatgtaagaccgcgcgggccaccgttgaaatagttcggactccccgttggaacaatgtgccttcaccatttcgccattctggcggctaataaccacggcgccgaatctccttacctttttcttgaccatggaaaccagctgtgggagtttcgtaccccaaccatggaacgcttgaccccataagacgttaagcgttggccccaagattaaccggatttcttccaacggcggtgaaggaaaccccccgaaaagtaaaagtggccctttctacaaatccaccgttgacactagagacggggcacggtaaacacggttttatggccgcgccctattataggtaaacacacaccgacattggcgttaatatgcacaaacactttgtgacacaagggcgcccaacctgccccttttgccaatcccaagcttaaagttcaagacgctccccacaacaggctattagacacgcgcccaaacacggcgtcgtgccaacaagagccccaaccgacagcctgggttcccaaagaacaggggggctatatcacgagcgcgcccaaacatcagaacgtttaagccgcccccttgtggaatatccccttattccacggcgtttacagccacattttcaacagttcgctagggacagtcggcgctgcgggttacacgaaaacccgggttttggccccctctccttgtgcaggggcaaaccccccgggcggcaccttccgtacgcaaattccctttgtcgcattgcgttgacaaaaggtggaacgcagtacccgtttgtgctttcgctaaccgcattgaacttagcataataacccggcccagggcgtatacgacgtgttgggcgtccacctataaatcagaacacctacatattagtgcccttcaacagggcagcacaacagaactcgccatgcgcagaacggaatatattccttgtggccgtgcggtacaaaccgctggtgtgtcatcaactattcaccaaccct

SEQ ID NO: 618319 - DNA, 1117 bp, Homo sapiens
  misc_feature (173)..(173): n is a, c, g, or t
  misc_feature (353)..(353): n is a, c, g, or t
tctggctaccgggactaaaatggaagcgttttggggggtcggggtccggatcttggggcgggggggtccgggccccaggagacaggtttataccggaattctccggtccacctcccgagatctccttcaggggactccgggcggtctggcacttttatacagagaggtgtccnaattcacgcgcggagaccacaagacaccccattgggtgacacgcgggaactctctcagagtctcctctgacgggcgtgtatagagttctcgagagaggtgcggagagtgtgtggtgaagtgtgcgcggcaagaacagtgtgcgcgtgggaactccctctgagcgggctctctcttgtggnctcctcgtttctccgcggaacaaaactctctctctgcgcacatatatatgtgcgcagaggtttcacacacaacacaggtactcccccgatgtgtgctgtgggtgtgccctctctgtggggcaggaactatacgcgcgcgtgtattctctcacaggtatatctttgtagaaggacagaagtgtttcgcgcgcgccacacaaatgtgggttgaagtgtggacgtgggaggggaagccttctgctgtggggacacacgagtgggccccaccgaggactatatataagtgtccctatagagagccatattctcaactctcgagtgggcgcgtggcacccgaggggggcccagttgtctaacagcgccgggcgccctcgaaaagaaattgtaaaccccttttttgggtggtgacaacaccccatgggggctccactccggggagggggcatactcgcctgagaatgggaaaaaagagggcgtctcccctcgcgggatacattgggtggcgaccattcgctttgggggtgggatacgcctatattagaaaggcgcccctttttcggtgtggggcccaacggggggtctcacggggcggcgcaataactggggggcccccaggcccttctggtctgggcgaaacatgtccctggggacgcaaacgcagcccggtggcaaaagccccaagacctgggggccccgggggatctataggtaaaaaccgcgtgcctttcgacaaggtggcgggcactaacccggagaatgcccgg

SEQ ID NO: 618320 - DNA, 121 bp, Homo sapiens
ttttttttttggggggggccggttttaggttttaggtttttaaaaccgggcctttttaaggggaccccctggccccaaaattggcccccaaattttgggcccccttaaaaaggtttatgga

SEQ ID NO: 618321 - DNA, 744 bp, Homo sapiens
gtaccgaaccccagcagttcgagcctctggaagagcgtctaagcactggggatatatatttactggagaatgggctcaaccctcttcctctgggtgggagcaagcgtccaacagggtgtttgtccagagccttttcagcgtctcctccttacagtcagatcaccagtggtttgagtgttctgccagttctggataatccacctgtccaagaaggttcagaggcctcatagatagcttacgggcacagagatcccaggtacatgaacgacttacgcgtggtgacaaccacggacacgaccacacgactggagactgactgtcacaagcacattcctggatggaaagaccaacgacgtctgacgatgggggacgcaatcttactgtggacctattctctgatcatactgcacacggaagattcgagacaaggacattacgtgacgactaccaagcaacggtgggtcacaccaagtggacatacagggcacccaagaggcatacgactttccagaacaagacacagccccaggactgatcagaagaccaatataggaggaaccaggtacacacatactcctaccaattgatttaaaggccgtgaccaccctccacagatacatccatcattgaagagagcgacgacacggagagaagcacacacaaacggggcacgaaaaacacaaaccagaaaaaggaggaaacaaaaagagacacaagagaaaaggacaagacaagaacacaaac

SEQ ID NO: 618322 - DNA, 189 bp, Homo sapiens
aatggtgattacagtagagagaatcggatgttctctagcatgaaccttcctgaagacaggttggccaaacaggtattttcctgttattgtgaggccaccaagctcattcaataacagggctttcttctcactcatctccaccaggcggggctctccaatctcaaggaagaaggtcttgttttctcatac

SEQ ID NO: 618323 - DNA, 352 bp, Homo sapiens
  misc_feature (10)..(10): n is a, c, g, or t
  misc_feature (325)..(325): n is a, c, g, or t
  misc_feature (338)..(338): n is a, c, g, or t
ggggccagcnactctctccaaagcatagtcatgggtgtcatgaaaaaataccaaatgtaagagaacctccaagtcagggcgcagtggctcacccctgtaatctcagcactttgggtggccaaggcgggcagatgacttgaggtcaggagttcgagaccagcctggccaacatggtgaaaccccgtctctactaaaaatacgaaaaattagtcaggtgtggtggacgcctgtgatctcaatctcagctactcgggaggctgaggcaggagaatcacttgaacccaggaggtgttgcagtgaaccaagatcacaccactgcactccnagcctaggcaacnagagactctgtctc

SEQ ID NO: 618324 - DNA, 134 bp, Homo sapiens
tgttgctgcggtcgctctacgacggctcccaccctcaacgacggtgccactcttggtcgacctcactttccggtctgcacaccaccggggccgggctggcttttccggtctggacgctctcccggtccttccgg

SEQ ID NO: 618325 - DNA, 665 bp, Homo sapiens
tataggtttgagggggaatgctggagattgtaatgggtatggagacttgtcatataagtaatgctagggtgagtggtaggaagtttttccataggaggtgtatgagttggtcgtagcggaatcgggggtatgctgtccgaattccataaaaacagggaggttagaagtagggtccttggtgacaaaattattgttgtgtagagttccaggggagagtgcgtcatatgttgtccctaggaagattgtagtggtagagggtgtttattatcaataatgttggtgtattccggctatgaagaatagggcgaaggggcctgcggcgtatcccgatggttgaacgcctgagactagttcggactccccttcggcaaggtcgaagggggtccggtagggcctctgctagtgtggagataaatcatatttatggcccagggtccctgatgcgcggagtaatccgagggtgtccttgtgtcgtcgatacgggtggagaggttaacaggagcccccttatttagatacatgttcgacttgtcagaatcgatggctagggatgacttcattttgacattgttgtgggcaaactgccccaatggccccaataaggggtaaactagatttgatgtccccccgtatcaaggatgggtaaccgcgagcaaaaggggcaa

SEQ ID NO: 618326 - DNA, 147 bp, Homo sapiens
aggtctctactacacattcccatctgacctcgtttcgttttggttcttttttggttttttggagacagagtttggctctttggtggtgtgtgtgtggagtcagaatctggttatgtcgcccaggctggagtgcagtggcacaacctc

SEQ ID NO: 618327 - DNA, 1473 bp, Homo sapiens
gtaagatggggtccgaccccgactgcagactccccatacacgcgtaaacccagagccttgtcttcagtatgtcagttgagggcagtgcagaccccatgggcctcgaagagatggtgtcctgcgtcccactcctgactggctccccagttagtgctctggctcgtttactgggcaggtagtgagctatgcaaatagacattattgacacagtcacaagtcgcgcacatcctcatgtcagagatgaagcaacctggtctgaactggttgtaatgacctagcttctagtgtgagtgaccatgcgagtctgtcccatacgttacaatatgccagtgcctcccttcacccacagggtactactagagctagttggaacgagactactcccttcagtttcttctgctaaagatgggagactgtgtcatgagcttagcatttggagcgtcccacggtcaccacgacaacaagctcacgagtcctccgggtgtccattatgcttcttggatgaattctgtctgtggggtctccatctacgtccttcctactgggaatggtcattcagactatggaacttggggcgtccccttacaattgtgatttgcggggcattttgggtgtggctctagagctacgcgagcctgggagcgtccacctggattcgtagcctttgtctatcgaggttccaggtccagggtggacacatagctcatggagccgtgagtctgcttcgttcctttcactagagcgcctactgatgaaaccattggtataccccaaagtgaggcccctatcaaggtaagagcagcgacttcccttttggaagggcttttgagttgggagccagggaaactctaccttaacgagttgtgcctcggttttactcgaagattccacggttcgagctagggccacacgcggagtggcccgcggccaatcctcggtgacctttgcgaataccttttgatttattaagagacccgaattcgggacccgtttggcgcacggttccaaaaaataagcaaccccttggttgaacccttggcaaagcatttcgacttgggtcccccaagctgtcccccaattaatacctgccatttgtgcgtgtacaattctccaatggcgctatttccgttggttacatcgttgagaaaacgcccacaaggggttccaccacaacgactgttcgcaatggtgggagcgacacaagccgcttccccaagggggacgaacagattagccccttctccctggggaaaacaaaacagcgcgggggcacgggcggcccgcatgtcgacactacgtcgcactagccgtgacagcgcgggagacgacctttccaaaccacatgtaggcactagtcagtccagactcgactcgtacggcaagtacacaccccagccagcggcggctcctttgatacgaaacaaacacgacgagggtcagcgcggaacagacgctacaacacctcctccaccg

SEQ ID NO: 618328 - DNA, 450 bp, Homo sapiens
gaggtatccccgccacccaggcgcacttctggggcagtgggcttaggcttgttcagacacagcactggatgccgtccgaaagatgctgtggatgctctttctctcgaggtgaatagctgacgcctccctagagtagcatttctggcacccagactgtctttgcgtattgcacaacgcctgtcttaataggatgatgaggcgcctgctttctggttgggacagcctccagtcagagtactcatggtcatgttcgcagagtctggtcttggcagcacaatgagccaaaacgctgggtgcttgggacaataaatctaccgatttcttgtcctctcactatcttgaagtgcgcttgtccatctgtctcctggacaggtctgattgtcaaaacaatagtaatatctgcatccagagtctgctgtagacagatgtgcacggacattcatcgtagta

SEQ ID NO: 618329 - DNA, 307 bp, Homo sapiens
tgtcatttgaaattacaggccccttgtaataaaagtgctgggaaaatccagcactttgggaggccaaggcaggtggatcacttgagctgaggagtttgagaccagcttgggcaacatggtgaaaccctgtctctactaaaaatacaaaaaattatccaggcatggtggtgcatgcctgtagtcccagctactcagagtctgaggtaggagaatcacctgaacccaggaagtcaaggttgcaatgagcagtaatggcagcactgcactccagcctgggtaacaagagtgagaccgtgtctcaaaaaaa

SEQ ID NO: 618330 - DNA, 891 bp, Homo sapiens
  misc_feature (35)..(35): n is a, c, g, or t
atgccgcgtgtataagacacctccttctagaattntcctctcgcggacttctcaaggcgtgtcgcaccaacacaatgggtgttccctaaacacacgagcttttaaaggagcgccccctcatgataatgcgcttggaaatgtgtttaagcccccgttaatattctccttgtgtctgccgcgagtaatgcacagttctaacaacccgcgggggccatcactttcccccttccggaggatttcgcccccccccaccagacagaaaacgtgggtggtaaaccatgctcgccccaccacctggggagcttaacagaatgttcgccgcaatcgttggtgccccacgaccccagctttaacaaaaatttcccctgtcgcaagaaacattccaaatgcgcccccctttcccacaaagtgagtctccaaataaaaccccctcggcgttaataatatttccctccctcgaggacctcttcctacacattccccctcgatacctccgtgcgaatatccacccaaaagcccatctcatatttgcaaaacgacgttcccctttcacgccaatcgccaccacttcattcaacatttttttgggcagaacccagcaacccatggtgtgcaatgtagactatgaattatttcccgggtggttctccacatggcacccattaccctgagtaagttcttcctttcatgttattgaaggcagcccctcctcgtgggagctctgcgattgtgtaaacacacgcctaatgagctgcaaagcagcgagagacaacagaatgttgtttcatgggcaattacgaggccccccacttttttacaagcgatataatcgccacacctctgttaaaaggaggaaaccttaaaaaaaggaatttctcgcccaacataaca

SEQ ID NO: 618331 - DNA, 429 bp, Homo sapiens
tagtagagatggggtttctccacgttggtcaggagtggtgtctttgaacttcccgacctcaggatgattcgcccgcctcggccctcgccaaagcgctgggaataacagaacggctgatgccacgcggagccgtgcgccgaggacataccattatctatgtgacgaaaccagaacatcaacctcacacacagcagtgccccacgagctgagaaccacgagtccgcacccgcagcgacgccccaccccccccctgctacccacgcacggcacacttcataggagcaaccaccgcagacacagcgcggaaccataccacctgaaggactaggcaacaacgccaagcaacacaccaaacggagaacaaccggtgcacgaaacacacccaactacccaccgccaacaaacagcaaccaaaacacaaccaccgcg

SEQ ID NO: 618332 - DNA, 394 bp, Homo sapiens
ctgactcagaggatccccctcacggattactcaactatacacacagattaagagtttaatgcctgcgaaaaataaaactgaagttgcaagacaatctgaattgaaaccatcttcactaatataacttgcaacaaaatcattttggatgaaagattacaatacattattaacttactttttaaacacagagtaacagttactctatggtaaaacattatactcatcccacattggcacaattatttattgcaagtatgttccacaatacacaacttgtacacaagaatcacataggtacaattaactcttgagcacacttctctagccttataaacatctagcgaatcactggattcattactgtagcaatgataatacataatcgatgttctag

SEQ ID NO: 618333 - DNA, 104 bp, Homo sapiens
gtcggccaaagatcgctcaaagaaataaatagaaatggaaacgtatgctaccattcttttcttttttattttctttgagacagaatctgtcctgtgcccaggct

SEQ ID NO: 618334 - DNA, 280 bp, Homo sapiens
tggccggtccccagtatgcccaccctagtgcactcccacctttctttctgcagcagctgaaggaaggaaaggtgggagctggcactcagtgatgggcttaactgggactgtgcggtgcacgagtcgtgtgccttgtcgtggtggcgtctgctgtaacgtggcctggggtgtggcggagtccgtagcatggcctggggcatggcagagttcaaagtgtggtgtggcgtctgtaatgtggcccaaagtggcagagtccgtggcatggactggggcgtggaag

SEQ ID NO: 618335 - DNA, 259 bp, Homo sapiens
acacgaccggtgggacgacgcttcagactggtcctcactactctttggactccactcacgcgacatcaccacggggacgacaaacccactaccagactgtgacggacggtgtgggacacgggctaccactgggtacacgtcacggtcttacacctgtgccccacgacgggtccactaccgggacgacgacgacccttactacatggtacacggactgactcgggccggtacgggactgctcggtgccgggtacccgacg

SEQ ID NO: 618336 - DNA, 392 bp, Homo sapiens
  misc_feature (8)..(8): n is a, c, g, or t
  misc_feature (10)..(10): n is a, c, g, or t
  misc_feature (107)..(107): n is a, c, g, or t
  misc_feature (193)..(193): n is a, c, g, or t
agccacgntngcacacacacacacacacacgcacacacacacacatgcacacacatagagctagtaggaaaacctgggggaaaatctgtctgaatctataggcaccntccatcatccaggctgggcgtggttgctcacactgtaatcctttgggaggcgaatgggcggatcacttaagccccaggatttgagnccagcttaggcaacatgccagaccgtgtctctataaaaaatttaaaattagccagacatggtggctggcatgagcctgtagtcctagctattaggagggctgaggtgggaggattgcttaagccagggaggtcgaggctgcagtgagccacgactgtaccactggagtccagcttgggcgacagggcaatactgtctcc

SEQ ID NO: 618337 - DNA, 343 bp, Homo sapiens
  misc_feature (55)..(55): n is a, c, g, or t
  misc_feature (132)..(132): n is a, c, g, or t
  misc_feature (207)..(207): n is a, c, g, or t
ccaacccggcgcaatagcttcctggcctgggcctggcctggattattgggcgagncctttacgcatatggctactacacaggagaccctagcaagcggtatcgaggaccgtgggctctcttgccctcctttncctgatgggcaccaccgtgtgctctgctttccagcatctcggctggatcagaccaggcttaggctacgggtccanatcctgccaccactgaggtgtggagggccttccgactctcactcacctccagcgactcaccctgatttccagttgcactggttttttttttttttttaatataataaaaacttatctggcatcagcctcataccta

SEQ ID NO: 618338 - DNA, 289 bp, Homo sapiens
gcctccagaaatgggaaagatgaaacaattattacctaatgcatatattgcaaggactaacccctataccttctgctatatgaatttactagaaatactttgcaaggagagccaaagctaagacccccgaaaccagacgagctaccttagaacagctaaaagagcacatcccgtctatttagcaagaatattggtaagattttatacggtagagcgcgacagaacctaccgagtccttgtgatagctggttgtccaacgatagaatcttatgtttaactttgaagtttg

SEQ ID NO: 618339 - DNA, 862 bp, Homo sapiens
atttcacctccgctaccataatcatcgctatccccaccgggtcaaagtatttagctgatcgcacatccaggaagcaatatgaaatgatctgctgcagtgtctgagccctaggatcatctttcttttcaccgtaggtggcctgcatgcatttgtattagcaaactcatcactagacatcgtactacacgacagtactacgtatgtagctcacttccactatgtcctatcaataggagctgtattggccatcataggaggcttcattcagtgatttcccctattctcaggctacaccctagaccaaactacgccaaaatccatttcatatcatatcatcgggtaaatctaaatttcttcccacaacactttctcggcctatccggaatgccccgagggttactcggactacccgatgcatacaccaaatgaaacatcctatcatctgtgaggctcattcatttctctaacagcagtaatataataatttcatgattgagaagccttcgttcgaagcgaaaagtcctaatagtagaagaaccctcaataaactggagtgactatatgggatggccccccaacccttacaaaatcgaaggaagccggataaataaaatctaagacaaaaaaggaggatcgaacccccaaaggtggttcaagcaacccagtggctccatggattttctaacaacacacacacaaaaaaacacttgggggggccggccgaaaattcaaccatcggtgggggcgccaagagatgaactggacaggcaagaaccggcgaaaggggtccaaaacccggccggtgaccggtggttgcacatctccccccccgccgcacaaaccaaagaaccaacaaacgcat

SEQ ID NO: 618340 - DNA, 161 bp, Homo sapiens
tggaccacttactcgattggacgaaataccttgtgaaactatcagattttgagtcagggagcactatagtgaagtgtatgtggatctgaaatggtgtgaaagcaaagtaggtagcaagtacctcaatgaagcagcatggtgtcgcagtataagaagccagg

SEQ ID NO: 618341 - DNA, 587 bp, Homo sapiens
gcctttggcaccatggagtgcgtaacctatattacccttctttgtctctgtagctcggcttattccagggccgcgtttcgacgggatgcacacatgagcgaggttgcccagtggcttagacgagagcgagaaggtccagagccttggagctgacatgccttcgctcagcctcttcagcagtgtacatcaggcgagcatagtgcaatcagtgaatgaagtaactgaatttgtacagtcatgagctgctgatgagtcacctgcaactctatgggaaacctatgatgaaatggatgactgctgtgcataacaagaacatgcgagcaacgcatgcttattgcagcacaaagatgacaacccatagctcccgcgactggcgagaccagaggatgacgttatgtcactgcttttgatgaagcttgaaggacattcctgatgaatacttgactgaaatcgtgagaagacatcctgactttatgccccggaacttcctttctttgctaaaggtataaaggtggctttacagaacgttgccaagctgctgataaagctgccttgctcgtggcacagctcgatgacttcggtttggg

SEQ ID NO: 618342 - DNA, 303 bp, Homo sapiens
gctgactcctacttttccaatttggatgccttttgttttttcctcttgcctgactgcgctgtgggtacttccagtactatgttgaataacagtggtaaaagtgggcatcctcatcttgttccagtccttagaggaaaagctttcaacttttccccattaagtatgctgttagctgtgggtttgtcatagaagacctttattatgttgaggtatgttctttctatgcctagtttgttgaggattttcatcatgaagtgatgctgaattgtattgaatgcagaaatccttgacaaaatacttgca

SEQ ID NO: 618343 - DNA, 356 bp, Homo sapiens
ccctgcaccgtctattgccagactcatcttcctaaacacaaacccagctgtgcccctgcctgagtgcccttcacctgcaggatagcccaagccctcctgtgttcagccctggccttctctctggcagtgggggtctttgctgtggaccctccaccccctggccctgtcccacacctctggagcttgccgttcccagggagcctcactaaagcctctccctctcagccaagagtttgtgtccgtctcaaactcctcaagaaaacaatgtcctggcacatttcacttggcagttactcccgagaccacccctgcccccgccctgacgttctcgttagccacataaacactttattctc

SEQ ID NO: 618344 - DNA, 234 bp, Homo sapiens
  misc_feature (1)..(1): n is a, c, g, or t
ncggagtgcatggctattgacatgcaggtgagatagggtatacaagggtaaaagcgaatactctcacccccagaccccctgttaacacaagtgaagaccgctttgacaccaacctgtccagtattctgtgattggggatacagggaggaggatctgctccccttttttgtagatgagtagccattcatcattagtctgtataacctttctatctttaaataaaaatatttggag

SEQ ID NO: 618345 - DNA, 963 bp, Homo sapiens
cacagtgtcaagcccacagctcttcaaggaggaagatggtccaggctgggagcatccccttagcagcagcctctgatcccattggccaagcaggagggaaccattagcagccatgaggagctggctggctgggcagcctcgtgggacctgcccagccttgctcccagctcacccacaagatgtggacgagctcttgctgctcatttggattttctccttgtacttatctgaacagccatgcggcatccaacgatccacgcaactttgctccctaacaaaatgtggaagggcattcagtccacagcaggcaatgcatctgctggcaacacgagctctgccatacatcacaacacgtcctgcaggcatgtcaccccatgcgcacccagccttcatccatgtccaccattgcacacaaaaggcgcactctcgcgcctagcccaaccctcacaacctcctcttgctacagtccacaaaccagcagcgcacaccaacgccaggcaccagcactcgtgcagttgaacccgagccacacctatccaggcagcgtcgcaacgctgactcggcatgcatgaaccctcaacactctggcatcacacaacgtgacatgctcggccactacccacgataaacgacactgcggagaccgtccccactatacagcagattggcagtagccattccccaagctaatgtacatagtggagcccctacccaagctagactaacaccaaccagcacccctggaccaggacactcgcccatgcttaaccaaccatggattacggcccacaaacccaagtaaggccttcacaacacgcaaccttaggcaagagaccgtcaccaccgttacgtgatacatatgccgccgccctctccaacgcccagctaccacacacatcgaaccacaatcaaggacaacccttacacccacaggcagcccccaatactgagtttccaaacatt

SEQ ID NO: 618346 - DNA, 1917 bp, Homo sapiens
  misc_feature (1250)..(1250): n is a, c, g, or t
aacaccatgaatcacacatgtccaaaccattcttctctcctgtcaacagctggccagccccccaacgatgagatgctcaaggaggagcacgaggtggctgtgctgggggcgccccacaaccctgctcaccccgaacgatccaacgtgatccacatccagcagacgagacctccgctgcacgacacatgtccgtctggtccctgatacaaccacccatcactatcactgaacctccatgcctgcactggcgcatttacactacgccattcagacctagctccgatagaacgcacctgcgcccacccacaacgccctctcaccccataaacagatgcaagaaacagcgcacacatccatcaaggcgatgccacatatacaccaccaccacatgacactcgagcagtcactgtacaactacgacccataggaaagacactaagaacactgactaccaaacgcgcaccaactacacacgcaacgaccagcacatgcaacagaccccacaccagcacccgacgaaccacacaccccctgcgcacaccgcaacgcctcaccaccgcacacacacacaccacgcgaccaccccagacgcgcgcgcctacgcacacacgagactagacagaacagagccgcaaaccacgacacacgagcaacacatccctgcacacccaccgccaagcaaacaccacaaatgagcacaaaccctagactccacccaacacaccacgacacacgaacacccacaagcaaacgtacaagcatgcaaagacaccaattacaactggccgccgacccccccacgcacccaaccaccctccgacgacatccactcgcgcccaccaccgaacaccagcacgactcacgcacaaaccccactctcaccctcctctacacccccaaaaccagagataacaaacaccatacccaccacgacaggaaccaaaaaacacagcaacattcaatcaaaaaccacgatctcaagagtacgcacatccaactgcaccaccaaggtagacacgcacacgcagcaaagcgatacaagcgcacgaacacaaacaactaagaaacacgacgacagacaacaaccaactccaacacagaataatacagcaaacaccaaactaacaccctcttagccaccaaccacacaactacacgagcacacacatacatacagagacgacaccagagagcgagagcagaccacacgacaacacaaagatgaacgtctgagagcatcagatacaaanaagcggacgccgcgccaggcaaacgaccaacaatagtagcatgaagacgagccaacgacgaagatagcagcgcgcgcgacgcaagaaccgaccggcgcgcaccgacgttcacacacaagccacgcatagcaagagagagaatacagacacacatcaataaccgtgagatccacgccgagcgcatacagcccagcggacgacaacacgagaggcacacccaaagagagcagctagagcaaccatatcacatggcatgatcagcgacgatacatccacgatgaagcaagacaacacaaggagcacggacaccaccacgcaccacgcgctcagaaccccagacacgcatctgcacgcacgatccagcgtagcaaccgagcacgcgactacgaggaccagcaacgacgatagcggacgtatacgactacggcacgccgaacaaaggatagatacgaacactcagaagcaaggctgagacgcgaccagagtacgcgatgtccctcaacagaaagatgctacagaactagtaaacgcaaccgatacgtacagacggagcaggcgccgaccaagcgcgacagctacacgccaccagacacgcaccagccgccgccatagcacagggcgaatgataacacgagagctagacacacagacacacccgagcacgcgc

SEQ ID NO: 618347 - DNA, 450 bp, Homo sapiens
aaccaagccacttcctctacactttgcttagaaatctcctgagataaatagccaatttcatttctcacaagttttaccttccataagatactagaacacagccaagttctttgccactttatactaagcaccagctttccttcagtttccagtaacttgttcctcatttctgtataaatcctcaccagaatagccgggcatggtggctcacacctgtaatcccagcactttgggaggctgaggtgggcggattgcctgaggtcaggagttcaagaccagtctggccaacatggtgaaaccccgtctctactaaaaatacaaaaaaattagctgggtgtggtggcgtgtgcctgttaatcccagctactagggagtctgaggcgggagaattgcttgaaccagggaggtggaggttgcagtgagccaagaacgcaccactgcactccagcc

SEQ ID NO: 618348 - DNA, 126 bp, Homo sapiens
gcacaaagcccagtgaggactgaacgaagctacactccctccagttgagcgagtttgcaatggacgggagtgaggtcacgggcagcacgggacaacgttggcgaggggccagcactcccaggggag

SEQ ID NO: 618349 - DNA, 210 bp, Homo sapiens
atattggaatggtgtggattcagagcaggaagtggcgcgaaggccatggtaaaccattcccttacaggagacctccctgtacacacagtgaccgcctgggcgctaaacggaaatggacaatgcagagacaggtagatgtttctaggatacagcaaggggacctatcttcagattgtctagaaagagtgggtttaatgccactacagtcat

SEQ ID NO: 618350 - DNA, 335 bp, Homo sapiens
  misc_feature (189)..(189): n is a, c, g, or t
acacacacacacacacacacacacacacacacacagagctgcagctgcagcactgcctagctggcccccaaacactgtagcgctgaacagaccaaagatggagacactaactgtgatcatcataaccagtgtgcactgaacactcagcacgtgccaggctatgctaagcccttccatgtgaaaaagaantttccacttgattcccacgacaactcaacaaggtaggaactgttaaaagaaaactttagacgaattaagtttaaattaatctagcatcaattgagtttcatttgaaatgaattgagttttatcaagcaaaggattcgaagatgaga

SEQ ID NO: 618351 - DNA, 1382 bp, Homo sapiens
agtctaaggctggaaagaacgggggagccatgtgacattcagtcccggacacttcaggaaacaggacgtggaagatggttaggactaggaggagtcatggctggagcacggtggtacagatccgcagggccgtagtggacaacggaggtgtatcttgtgccagtcgatcggtgcacgagtagaaggaccccaatctagtcctgggcaagtgcttgaagtcccattccactcccacaaggccttcagcgttcccacatggcccttctcgtaaaagacaggagtgtgtagtcgtgtgatactgatggtgcattagtcaggtggacggaaggcatgacagctccatcacgcaatgaaataaagtgggctggtgcaatgcgtggcgatggagtaggtaagaaataggatgacatcttttcatcgtgcggtggtgagtcctgaagaatcttgtcgactgatggtcagtggagggcgattattgggacgcaggtatcgcgaaggtccatcataaggaagacaatgagtggcctagtggtagtgggagtcccataggagatgtgggcaacccagtagggggagtccaagtcacagtagggtgggttgtgatactccgccacgtgggcctagcgcggtcagataccaggtggaacctagttgagtctatgggggggcaccaccaagtggactacgatgtgtggtgttctctctaaaagtttagacaatcgttcgaaacgcactctgccagatgttcgattataagttaaatcctaatgggccacctaatgtggtggcgaaggcatactcgggaggtcaatccggggacgttctttcctaccagtggcccttaaatttggcctccgcgaaaggcccgtcgtactggcggcctgtggagaatgaaaggtctagggtgaaacaggacgcaacaggctaagtgttgccgttcacgacgtgtggaaacagtttaaggcgattacaacacgtgtagcttggttcaaacccctaaagaggcatgtgggtcaggaaaaaagcccggggaccaaactcggggggaagtcgcggagggggcccccccggagtggaaccacattttttgggccggcgcaaggcggaatactggcagagcggcattcgtgacacgcgagggagggcctgcagaggggaccgtgtgtctggtggggaccggcccgcggggttacaccccaacacggagaagcgggcacacttagagacgtggggccccaggggggatacttagggttagacagggcgaacgaaagggggcgccaccatccgacggatgtggcgaacttattggcgcattggaaaccggcctttaggtacttggcgcgcataacaaagcctggcccatcccatggccccccttg

SEQ ID NO: 618352 - DNA, 1121 bp, Homo sapiens
  misc_feature (1121)..(1121): n is a, c, g, or t
gtgttaaagcctttaacaagtcttcaactttttctgcacacacgaggtattttatactggtgagaaaccttacaatgtaaagaatgtggcacagcttttaactaatcttcaaaccttactgaaagttgagaaaattcgtactggagagaatcctacaaatgtgaaaaatgtggcaaatcctttaactgatcctcaacttttactaaacataaggtaattcatactggagaaaagccatacaaatgagaagaatgtggcaatgcctttaatcagtcctcacacctttctacacataagataatttatactggagaggaactctatagttgtgaagaatgtggcaaagcttttaaccaatcctcataccttactatacagaaattcatactggagagaaagcctacaattgtgaagaatgtggcaaagcttttaaccttccttaacccttaactgtagataagaaaattcatactggaaagaaaccctacaaatgtgaagtctgtggcaaagcttttaactgattctcaactcttactacatgtaagagtatttatactgggaaagaaaccctacaaatgtcaaacaacgtggcaatggcctttaactgggtcctcacaccttgttacatattagacagtttaatactttgagagaaaccctgccaactgtgactactgtggcataccttttaaaccaatcctcaaacctccacttaaatctattagaataatacctggcaaaacattcacaatcctggatcgatggtgccattcatgttgggcaacctcggaactctctcaactgagtcctccgggtgaaaatcctgcaatgttgcaacttcgcagcctctaagggttgccctggaggtgggtcacaaccccacggggagaaaccccgggcacgggtcacaaacggtggcacattcaaatggagcgacccctagtgcaggaaaagcttatcatccaaactggcccacacgcagagggcacagctatcagccgataaaacgagaggcgaacaacatgacaggcgagtgaacaacaccacacgaagcaggcccaacacaggcagagcgaggagccgaccacaatgcaccgccgaacaccgagcatgtccagacn

SEQ ID NO: 618353 - DNA, 196 bp, Homo sapiens
ataaagactcatcctctatcttccaataacctctcctgaagctaagatcatgtacccctgattttcagcctatcctggctcgcttctagtgtaagtacttctagtagataagcccattcattatccccagctactctaacgaccacggttcatccccagagacctacttctatctatcctacttactagccctatt

SEQ ID NO: 618354 - DNA, 154 bp, Homo sapiens
catacatttctactaagtaactactgaaaatatagataagagtgatggaggtaagtatattaaatgataagtgtatctacccagaccaattggctcaaattggtaagcccaatggaccaagattttccctggagacttgttttgatttgtccag

SEQ ID NO: 618355 - DNA, 913 bp, Homo sapiens
ttgcaaatggagacagaagagttgtagaaaaagtagcccttagactttccaagctgtgaaaagtcctaactctttatcgatctgttgtggtcgatcgaggcatcagttagagtaacagggaaaaatttgctaccgaatttaggtagagccacgaatcgttgatcttattaatagtagcagtgttagtttgtcaggatcatagaagtaagtcactttagacatagttatttctgaaataagcggatgcttggtgataggatacatgggttcctgatcttgtctgcacgtgggtatgttgtgattttaacgtaggagagtcgtgagtcggttgcatatcaggttggtgtaatactattctagtatgtaatatgaacaatggttgagaaaatttgatggaagattcagttaacggtaagctaaatgatgaactcattccattagtgttggaccccacgtgaagacgagtagaggcttagtcgagaacatatagtttggtaagggtagattctcgaggcatgatctgtgcttgtggtgatttcgtgacgtgcatgagtagttgggccgattttaagcaattgctggttcttataccaacatacaattggtggaatagcctctgtagtatgcatgtgcgcatagtatgtgccatgtatacacattgtgtatggtagaaagtccgaaattagattggtaagcgcaggtcaaaagggaagtgtggattattgatcgctgtaggacgtgctcataatcttgttacttgaaaggatactacttgacgcgacagattgggcaatccaaggaaaggtgacgtcaatggttaacaattacttaactaaattggtgttagaagaacctagaaaaaattgccaggcattaggagaccgaatgttaaatggggggggaaagggggacg

SEQ ID NO: 618356 - DNA, 214 bp, Homo sapiens
tggattaccagtttattaccaaaaaatacaactcaggaacagccaaatgaggggacatgtaccctcaacccatagggaaggtgtgtggagtttctgttgccctgtgagcataggtcacctctgcactcacgtgtactaacgaatctgacttctgtctctggttgagagcctaccgcatgatatatcatgctatggacatcactactctcgagag

SEQ ID NO: 618357 - DNA, 139 bp, Homo sapiens
tgctgcacagttgctgctggtggcctgctccatttgcctagcctcccttgtgggtgacactaacaacagtcaccctacccaagctgcctccaagggacgcctggttcccctcccattctccatcctttccatgacgatt

SEQ ID NO: 618358 - DNA, 454 bp, Homo sapiens
cacgagggaaaaaccagcattaaagcggcggaggaagatggcggtcctggggtagagtttgcatactttctgactaagctaccctactaattactccagtcaaggtgtcaaactcaactaagtccttcctggcatcagccggatatggcgaacaggaactggatgccaacactgcccttatggaattggtcaaaggcctaagatctggcaaacttggcgaacagtgtgaaacagttgttcgctttcccagactttttcagaagtatccattccctattcttatcaattctgcattcctaaagttacctgatgttttcacagttggaaataatttcctgaggctatgtgttcttaaagttacccaacaaagtgagaaacatttggagaagattctaaatgtggatgaacttgtgaagagaattttttctgttattcatagtaatgatcctgtgga

SEQ ID NO: 618359 - DNA, 318 bp, Homo sapiens
agaaaccattttaatagagtgatcagggaaggcttcattgagaaggtcctgtttaggctgagatgtgaggatgacagggagatcatcagataaagaataaagagagaatattctaaacataggaaatagcatgtgcaaaggtcctgaggcaggaaagtttagtgtcacagtgagaaccatccctatgggaacattccttgattctctcctttccacttgtgccacagaggctaccttttagaaagggaacaggcatttcagtttttctgtatgtgacaaatattttttctcatttctctcttccagaaatggtttaag

SEQ ID NO: 618360 - DNA, 156 bp, Homo sapiens
ggtgtcttcgatttatggcgtactctgcccattcgcctttcctcctcctgtgctctggccgtgccatcctcacacagctgggcaatctggccagcctggtggcgtgccctcggcattcaactttcattttgttccagatggatagccaaaccatgg

SEQ ID NO: 618361 - DNA, 764 bp, Homo sapiens
tggaacatggctgtcgagctggtgttaattggcacggaggcgtcgtcggtgacgctactgctgcgctgtttgcgtgtgcaggcagcggcctggtcgcgaggtgtgtcgcgatgccggagctggcgtgcaaaggtggtggtccaccccctgttgctgctcaggtgtgctggatcatttcaccgatcggccggttgccaagcagaagcgtgttgttggtgtgcttatggggtcatgtgccaaagaaagtacttgatgtatcgaacagttccgcagttccttttgatgaagatgacaaagagcgagttctgtagtggtttctagaccagtgattatttggaagaacatgtatggagactgtttaagaaagtcgaagtggcagtggaaagaatagttgggtggtaccacacaggccctaaactagccacaagaatgacattgccatcaacgaactcatgaacaagatactgtcctaattccgtatcggtcatcattgagtgtgaagccgaaggacctagggtcgtgcctacagcaagcgtacatttcagtggaagaacgtccagtgatgatggcacagcgtccaatctcgaaaatcgattgaaccacgtgaccagtgaaattgcgacgcagaggaagctgaggaagttggcagttgaacacttgttagcgagatatcaatagacacgacggtgggcactctgtcccagcggatcacaaaccaggtccatggtttgaagggactgaactccaagcttcttggatatcag

SEQ ID NO: 618362 - DNA, 208 bp, Homo sapiens
tgcatttaacccaggctatgcaagttgaaaaacaaacaacaaaaaataatatttcttttctttgtttatttttttgagacgaggtttggctcttgttgcccaggttgcagtgcaacagtgagatctcagctcaccacaacctccacctcccagcttcaagcaattctcctgcctcagcctcctgagtagctgggactacaggtgccca

SEQ ID NO: 618363 - DNA, 407 bp, Homo sapiens
  misc_feature (81)..(81): n is a, c, g, or t
  misc_feature (282)..(282): n is a, c, g, or t
  misc_feature (394)..(394): n is a, c, g, or t
  misc_feature (401)..(401): n is a, c, g, or t
aggtgatctagaggatcctgaggtggttgtgggtagctgcatgtcgtcagcaaggagcggagtggagcaggtggttgtggngctgtgctgctcctttccggagaggggctaggtcgagttggagatttcttcttcttggtcttaatcttgtcttcataagggctgctaggctgtttcgtagcagtctccgggctactaggccgttgtgtgctggtagtacctggttcactgaaaggcgcatctccctccccgcgtcgccctgaagcaggggaaggacttcgnccagccaaggcagttgtatgagttttagctgcagcacttcgagacctctgagcccacctccttcaggaagccttccccgattaaggaagccagggtaaggattccttcctanccacaancacctg

SEQ ID NO: 618364 - DNA, 232 bp, Homo sapiens
acgttctcgtgagactaggatgtccacgatgagcgaagtgcgtccaattacacggtagtgctgtgctgatcaccgtcggtggagacgggggctgtgacgcgaggtgcctaggagagcccttcctggaccctgggtagaggcagctccttagtggaaagagccttagactgagtgttaagatagaggctgtcacttcagactccacctgggccactcaaagtctcacggaaag

SEQ ID NO: 618365 - DNA, 118 bp, Homo sapiens
  misc_feature (23)..(23): n is a, c, g, or t
  misc_feature (40)..(40): n is a, c, g, or t
  misc_feature (70)..(71): n is a, c, g, or t
gaaaacccgccacatctaccatnaccctctacatcaccgncccgaccttagctctcaccatcgctctttnnttattgaaccccccctccccataccccaaccccccttggtcaaccct

SEQ ID NO: 618366 - DNA, 281 bp, Homo sapiens
cgtatagctcagagtgggtacagcaaaatcacccagggcatgaaaggcacaccaggcaacggtgaatcatatatggtggtaacgaaaaacggtaaaaactaaaaatgaatttcacgtttttcttctcaatctgggcttattgacgaggaacgacacacgaacaatttaatcctcggctccctagaaaaaaaatagaaacacaacataaatgctatacttaaaacaagtcattttaccattccaagtctccgggattagggatgctgtcgggtaccgagctc

SEQ ID NO: 618367 - DNA, 850 bp, Homo sapiens
gaccagtctgagcaacatggaggaatcccgtctctgctgaaaatacaaaattagccaggcatggtggcacatgcctgtagtcccagctgctcgggaggctgaggcaggagaatcgcttgaacccaggaggcagaggttgtggtgagccgagatcatgccattgctctccagcctgggcaacaagagtgaaactccatctcaaaaaaaaaaaaaaaaaaaatagcccttatgttttaaatgggttcaaagaaaagacttttaatgggatttgaccattgttggttagctgttggagcatttttatatggcgcaactttttaatttcctaattagggtctacacagtcgaccaggctgggagtgcagtgggccacaatcagggctcactggcagcctcagcctccgtgggctcaaggcaaatcctctggcctcgaacctccccaagtagctggggactacgggtgcacaccaagattaccgggctgatttcaatattttgggtaagagacagacgtttggccatgttgctcgggctgatctcaaactctggagctcaagcattctgtctgcctaagcctctcggaagtgctgggattacgggcctgagccaacaaaacctggcaagtaaatttctaaatcttaacctccctggttctatgggcctaagcccgtacttttggaggcttccatgggagctttcgtggggtaactggaaaccacttgggagttgaacctgcaaacttgggagttgaactatatccaacctttctataggtgggtgggcggaaaattcttgtacagcagtggggaaaaaattagcttatagaaaagacataatagatccatatgaa

SEQ ID NO: 618368 - DNA, 102 bp, Homo sapiens
agttctggtccccactcccaactatactccacagaaacgtataggcttagacgaagttctacgctacaacgactgcaagttgggaagtgggggtgactgagg

SEQ ID NO: 618369 - DNA, 87 bp, Homo sapiens
cggtggatttccaggttttgcttgtgcaggtctgacagctgctggtgtttgatcagaacttctttattgggaaactgccttctgcaa

SEQ ID NO: 618370 - DNA, 226 bp, Homo sapiens
ggcgcgggagccgaacccagcctctcccctactcgaacaccgagcctccgtggatccaccgaggtgccgggtctcccagtcaccgtctcgcacgtgcgctcatggctggacccttcatatatagcgtctcgacacttctccggcgagttggcctaggtagatgatgcacacgatgttctagtgatacaccggtgagcgaccgtactcttgcaagtatgcatcaagg

SEQ ID NO: 618371 - DNA, 854 bp, Homo sapiens
  misc_feature (241)..(241): n is a, c, g, or t
ctcccaatctccccaccttgttccctttccctctggatcaccaattttctctgcactatgttaacccctccgccgtttacaacaaaataaccaagtttcctcttccccaaaatgtttcccattaatattgaagctatttacacgctatgaaatccatttaatattcggcccctcctctctcatggtaacccaaacctaggatctccaccagcagatggtactcacccacaaactcctcctntatccctgtgtatgacaaaaagccataccactgtctccctcctaccatataccccggcgagataacaatcgttcatgagaaaacaccccccgaaatatttttttaattatattgttacaataaaatattattctacattcacatgttactcaacagcaggcgttatctcagcatttacgaccacacaaatgggaagaaaccatcccggcgcactactattccactgtgtcaattctccatcaccccccacccccacctcaggttcaaaaagaatgtatactctaaccccccaatcccccctcctcgaataaccgtcatcgagtgtattacctacacacgtacgcccaacacctctccattgtttcaatagggcacatccgacccacaggccctgctctcgtattacctcgggccttctactccacccaccctttactcaatcccccttgtaccccccgtgtcctgtctaatattagattaaaaagggaaggacacccactttacggaccacccagttattctcacaatcctctacatacaccctagatgcctcccccaccctgccaccccctttgaaaatttaagggccccataaaaacccccccacataaca

SEQ ID NO: 618372 - DNA, 250 bp, Homo sapiens
  misc_feature (207)..(207): n is a, c, g, or t
taccctgaaggtctcaacagttactccctggcaggtcttaggctacatgagtccttggggcacacatggagtaggagttctaggactgtcccagtacatctcacaccacagccttttttggcttgattcgagcctcaccctaggccttttggcttcccctgcctgagagagacctgaggaggggacagagctggagacgaagatggnggtgacggaggttgtggagaggtgtgtatgggtgatgatttgc

SEQ ID NO: 618373 - DNA, 1303 bp, Homo sapiens
tttcgttgcgctgacgggccacatctgtgctctagcgtggctcccgcgtgttgttgccgtcgggtttattttctccggatctgtgtcgtgtcgctgtgtgggccgcttgtccactgtttctccgaaacagggtggcccgtcggggtatcccgggttattttgtgcacaactgtcgctcgcaactagttgagatgtgtcgggtgtgccgggccacgtgtcttttcctccccatgaggattcatccctttagggggggggtcaccgttggtctcgcgccgcccctctacgtctgcttctggggggttccccgcggtagtttttctccctttcccgtgggtcaccttggtgggtgtggggcctcttcgctttttttttgaaggtggggcgccacatcgcgcgtgtctccctttctttttcaccgggggttcacctccgctttgtgtgggggatactttatcaacctcgtcgtttattttctgccctatttttttttgggagcgtccccccctctcctgggggggacaccctgggtccccgagagctcctcgttgtccgccacgagaggagtgtgttttaaaaaggaatatccactgtgtttcctccctcatttgttccctggtcgctagagagcgcccctcttgttttgctcctcccccctcccccccccgccttgtatttatcccgcgggggcgccgcgcaacgtctttctctctcacacaacggtttgtccacgctttatagagggctctcaatatctggagttttctcccccccgaggagggtccccctgtgagacaactcccctgttttttctctccgcatctttggggggcgccgggttgcccccacactttctgtgcccttatttctccatcatattttctcctctaaagagagaggtttccggtctccacacaaggagggccacccctcttcgtgtttttttgagatagcccttttttcttggctgcggcaccctctttcgcgcgctgggtgtggacacccgcgcgctttttatagcccccgcgcccgcgcgggcccccccacgcggccccgcgcgctcgtgaggggagatgatccccaccccctctcccgcggccgcgccccccctctacacttttttcctccgtaattctttggcccatacctgccctggggccactcgttttcctctcgcccctctgttgtccctccgtggcccggtcccccacacaccccccccctctgtggcctgttctacaccccacccccttggcctctttttttggggggttacccaagttttttctacccccttctctca

SEQ ID NO: 618374 - DNA, 120 bp, Homo sapiens
  misc_feature (100)..(100): n is a, c, g, or t
  misc_feature (107)..(107): n is a, c, g, or t
tcggagagaacgggagataaggaaaatcagttagtaggtaatcttcaggtcagattgaatatattgagctttgatgtgtctgtgaaacatccaagttatncaatganaaataggtgagtc

SEQ ID NO: 618375 - DNA, 147 bp, Homo sapiens
cagaagataaaagacaagctaggaacacaaagctcgggcaaaatgtacaaacttagaagaaaattggacgatgaaacaagatagaaaatgaaaatattgtcacgacgtttcagactagaaacatgaaagcacaagctaaagcacaag

SEQ ID NO: 618376 - DNA, 210 bp, Homo sapiens
  misc_feature (18)..(19): n is a, c, g, or t
  misc_feature (49)..(49): n is a, c, g, or t
  misc_feature (64)..(64): n is a, c, g, or t
  misc_feature (70)..(70): n is a, c, g, or t
  misc_feature (85)..(85): n is a, c, g, or t
  misc_feature (94)..(94): n is a, c, g, or t
  misc_feature (100)..(100): n is a, c, g, or t
  misc_feature (106)..(106): n is a, c, g, or t
  misc_feature (115)..(115): n is a, c, g, or t
  misc_feature (117)..(118): n is a, c, g, or t
  misc_feature (133)..(133): n is a, c, g, or t
  misc_feature (143)..(143): n is a, c, g, or t
  misc_feature (161)..(161): n is a, c, g, or t
  misc_feature (177)..(177): n is a, c, g, or t
  misc_feature (180)..(180): n is a, c, g, or t
  misc_feature (197)..(197): n is a, c, g, or t
  misc_feature (199)..(199): n is a, c, g, or t
  misc_feature (206)..(206): n is a, c, g, or t
agatgatccagcttctcnngagccacaggatcaagacacccgtggaccnggtttctgcagaccnggaagnggtagctcagaaatncggcttgcnttacanggcccnggttgcccncnncgcgggtgctgctgngctcagttcncggctttccccgtgaacngcgctgatctctacgnggnactgaagacccccactncnatcctgnccac

SEQ ID NO: 618377 - DNA, 731 bp, Homo sapiens
  misc_feature (20)..(20): n is a, c, g, or t
  misc_feature (37)..(38): n is a, c, g, or t
  misc_feature (44)..(44): n is a, c, g, or t
  misc_feature (50)..(50): n is a, c, g, or t
  misc_feature (79)..(79): n is a, c, g, or t
  misc_feature (81)..(81): n is a, c, g, or t
  misc_feature (110)..(110): n is a, c, g, or t
  misc_feature (114)..(114): n is a, c, g, or t
  misc_feature (116)..(116): n is a, c, g, or t
  misc_feature (123)..(123): n is a, c, g, or t
  misc_feature (132)..(132): n is a, c, g, or t
  misc_feature (134)..(134): n is a, c, g, or t
  misc_feature (235)..(235): n is a, c, g, or t
  misc_feature (259)..(259): n is a, c, g, or t
  misc_feature (271)..(271): n is a, c, g, or t
  misc_feature (280)..(280): n is a, c, g, or t
  misc_feature (389)..(389): n is a, c, g, or t
  misc_feature (472)..(472): n is a, c, g, or t
  misc_feature (612)..(613): n is a, c, g, or t
  misc_feature (627)..(627): n is a, c, g, or t
  misc_feature (649)..(649): n is a, c, g, or t
  misc_feature (724)..(724): n is a, c, g, or t
tagtaatccaaatttggggnagggcaaactttaaaanngcagcnaagtgnagaagggttggggaagggagaggtgagtnancaggcacattggaactgtggggacatgtnactnancactgtnaaaccagtntnagtttcttggtttctcatggaaaacattttatacacctatttttcttccttccaacttaagttcatcagttttcaaatacgtttgttccattttttgtctnatttttgttgggatattacaacanagttttgcattnactccagtncctgctccatgtgaaaaaattagatgatttcaaatactttcttcagctccacaataagctgccagttactcttctgcatttcatctcttaaccagtttttgagttcatnaatggactgccggctgatcttactaacaagaatatctgtggcttcaaaatgtcttccaaacattttgggtgagtgagcagggntaggttctatttttacacaaacttcttgttctttttttgcaacatccacttgtttatggtttatttcaatacttgttactattccgatgtgaacaaaatttttgcttgggacagagatgggtgttccctgtttcacctgnnctgctttcgccgtnacccccatcactataggatctngagaataaaaaatgtactgagggaggatttttatcttgcagggaaatactgctatgtgcttaaattcttcttgtntctgtat

SEQ ID NO: 618378 - DNA, 244 bp, Homo sapiens
gatgctgagtagtatcgatggatatggatgtactatagtttgcttcaacctcattcaccctactaaaggacataagcagtgttttcagattttaagccctaataacagctgctgtgaacattcatgtacaggttttcatgtgaacatacattttcattttctgggatacaatgctcaaaagggcaactgtagggttgtatggtaacaccacatatatttttgtacagcaaactcaccctactct

SEQ ID NO: 618379 - DNA, 177 bp, Homo sapiens
tgtcgggtattttagaatcttcgtaccagagaatgtagaactccttcagccccagctggccactcccgtcggaatctagcatgtcaaccataaatttggcatgtctcgatgctgaagccatctgacttgatatctgggcgcttggctagaccccttctcagggcagcgtaccacaag

SEQ ID NO: 618380 - DNA, 1006 bp, Homo sapiens
  misc_feature (47)..(47): n is a, c, g, or t
  misc_feature (114)..(114): n is a, c, g, or t
  misc_feature (116)..(116): n is a, c, g, or t
  misc_feature (160)..(160): n is a, c, g, or t
  misc_feature (167)..(167): n is a, c, g, or t
  misc_feature (175)..(175): n is a, c, g, or t
  misc_feature (184)..(184): n is a, c, g, or t
  misc_feature (186)..(186): n is a, c, g, or t
  misc_feature (189)..(190): n is a, c, g, or t
  misc_feature (214)..(214): n is a, c, g, or t
  misc_feature (217)..(217): n is a, c, g, or t
  misc_feature (229)..(229): n is a, c, g, or t
  misc_feature (236)..(236): n is a, c, g, or t
  misc_feature (239)..(239): n is a, c, g, or t
  misc_feature (241)..(241): n is a, c, g, or t
  misc_feature (243)..(243): n is a, c, g, or t
  misc_feature (252)..(252): n is a, c, g, or t
  misc_feature (264)..(264): n is a, c, g, or t
  misc_feature (277)..(278): n is a, c, g, or t
  misc_feature (291)..(291): n is a, c, g, or t
  misc_feature (300)..(300): n is a, c, g, or t
  misc_feature (311)..(311): n is a, c, g, or t
  misc_feature (313)..(313): n is a, c, g, or t
  misc_feature (322)..(322): n is a, c, g, or t
  misc_feature (334)..(334): n is a, c, g, or t
  misc_feature (377)..(377): n is a, c, g, or t
  misc_feature (401)..(401): n is a, c, g, or t
  misc_feature (424)..(424): n is a, c, g, or t
  misc_feature (442)..(442): n is a, c, g, or t
  misc_feature (449)..(449): n is a, c, g, or t
  misc_feature (488)..(488): n is a, c, g, or t
  misc_feature (511)..(511): n is a, c, g, or t
  misc_feature (594)..(594): n is a, c, g, or t
  misc_feature (609)..(609): n is a, c, g, or t
  misc_feature (612)..(612): n is a, c, g, or t
  misc_feature (661)..(661): n is a, c, g, or t
  misc_feature (774)..(774): n is a, c, g, or t
  misc_feature (776)..(776): n is a, c, g, or t
  misc_feature (810)..(810): n is a, c, g, or t
  misc_feature (863)..(863): n is a, c, g, or t
  misc_feature (885)..(885): n is a, c, g, or t
  misc_feature (932)..(932): n is a, c, g, or t
  misc_feature (935)..(935): n is a, c, g, or t
  misc_feature (1004)..(1004): n is a, c, g, or t
gaaggaaagaggtgagtgttcactatagaggttttatcagcaaaggntgccttcatattgataaaaataccttatctaatttgtaatcataaacattattccagtagaagaggnanattttctctcctttttgtcttcttgcctgtttaatcaccataanaagtaanaatgaaanagctctaananaannaaaggagaaaagaaagaaaaaaanaanatgcaaaagccnagaaaanacnancnagcactgcngcatccagaacngtatactggctcnntccacccagcacngcggcactnggatcgatgtntnctggctctntcctcgccccantccaataaatttagcccccaaccccatcctactttgtgagggnggaggggcaccaaaagaaggggcnggtgcagaagagaaaaaataaanggtcagtgcaagtagaanagaaagnaccaaaaggtggagagggctgcgcttctcttttaatcancaaaagagggtaaactaaaactnaagagtgtacttaaatgactgaaccctgaacaaggctttggccctgcaaactgctgcggtacaaaacgtgaaaggattatgcngaatccatttttgangtntctttttagtggtctgctcattagtggtcttctcttcaaatgggttgtnttctcactaggaaaaaaaatgtaccatctctggaatcaacgttgatggtgtgttgctcattctgaaagtttttatcctcccttctcaagcatgctctgtttggcatgattgananagtgcatatactgggtggccagagcggagatttngagggtatggtgggtgttctcacggtaacactgaagaattttggcctgcagancagcacagactggatgagattnatatagcttgaactttgcttccacctctccagcagcctcctgacatngtncagtggtgactttgtagaactctgagcccttctcctccagtctagccagccgtcctttgtagaatgcantc

SEQ ID NO: 618381 - DNA, 238 bp, Homo sapiens
tcgctttttccataagtattttaaccctgggggctacaaacaaacctgaaagtagatgctgaagagaggtagcgttacgtttcagaaaatcctcattaaaactttccaaatcctttttgacaaatattttctgcatttcttgagatagaactttgctcacaatgtctggaagattactatgattagacactattaaaacaaaaacatttggattttttgtttttgatctgtcctttga

SEQ ID NO: 618382 - DNA, 349 bp, Homo sapiens
tggaacttgatgcctgtccccgactctagaggaaaaccggcttatcgatgccatcacgcccagctaattttgattttttttttgaagcgactctggcccaggttgtttttgaacccctgccctcaagggatcctcctgcctcagcctttaaaagggctaggattacaggtatgagcaacatcccttggcctcaatcacctttcacctaagggtaagggcactatgtacccccaactatgtaacctgagcactgtcttctttgttcagtaccacattctctttggttttttcctttcctggttgagcctgattctaattttctctgagaggaattttcagagaggaaaga

SEQ ID NO: 618383 - DNA, 297 bp, Homo sapiens
aggatttcgcttcccctccaaaacgctgggggttttggctgctcccttacttcccaaaggctcctgctgacttcggaggggcggatgcaaagcccagggccccccccggaaaatgtgtacccctggtttttactccctcgggcggggcccgagcccagggaccagtgacttggcctggccctcccggtttccctccagcatctccccaggcaaggcttgtgggccccggagcttgaaaaagggcgggagtgggaaggctaaaaatttgcttagtaaatggtttgaactttttcccca

SEQ ID NO: 618384 - DNA, 553 bp, Homo sapiens
  misc_feature (79)..(79): n is a, c, g, or t
  misc_feature (144)..(144): n is a, c, g, or t
  misc_feature (186)..(186): n is a, c, g, or t
  misc_feature (371)..(371): n is a, c, g, or t
ggggccaagggtttttgtccttggttaaatgggattcggctttccggggtttttctcggcaaacccttgtttggggttntgtgggtttgggtgggaaaagggccttttgcttaaatgtaacctgatagttttccaaaggccctnggggcctggtttgtgtgagggtgtggaaagtgggggcccccntgggcctgtttgggttgccaaaatgtcccggggggttgggggggggtttaagccggccccccccccttgtttaaaaaagggcccttttgccctttttaaaaaaaaaggggggggggggtcttgggcctttggttttttggtaaaggggggcatcccaaagggttttttgggggtggattgaaaantggggggtgggggttgaaaaattttttggggcccctttgggcccccccgtttttgtcccttttggggtgccgggggacagcaagcaaagcccgcgggacatgaggggggttttaaaggggttttgggttttttgttttgccctaaagtttttgggttttaccaaaaaaattttgttggccca

SEQ ID NO: 618385 - DNA, 412 bp, Homo sapiens
  misc_feature (3)..(3): n is a, c, g, or t
  misc_feature (156)..(156): n is a, c, g, or t
  misc_feature (161)..(161): n is a, c, g, or t
  misc_feature (185)..(186): n is a, c, g, or t
  misc_feature (188)..(188): n is a, c, g, or t
  misc_feature (195)..(195): n is a, c, g, or t
  misc_feature (199)..(199): n is a, c, g, or t
  misc_feature (229)..(229): n is a, c, g, or t
  misc_feature (300)..(300): n is a, c, g, or t
gtnagaaaagcgggtgccacaaactatggtttaatagtatgcaggccctgtacctgtttatctaactatacctgaaatttgctgataccccaagccagctacttacactaaaggcatctctggggggcatcatctagatgaagtcttttaatctgntgggnaattatctggtttttgtttcagtnnanataggangtgnggcttatgcttttgttcagctgactggtgnatgggaaggattaaagcccatattcttaacttacagcagtgtcttcaagcttattatcctgtcatgatgtncataaagtatgacaaactcattcatttgggagctataaggtcaaaagtggccagaatgcaactgcgctgtttacactgtgcaaaatcaagtcaactgtcttgtaggtccttg

SEQ ID NO: 618386 - DNA, 725 bp, Homo sapiens
ggacgctcgcagctgactttgtcttctccgcacgagtgttacagaggtctccatgagccttctctctcctgtgcaaagatggcgactcttaaggaaaaactcattgcaccagttagcggaagaagaggcaacagttccaaacacatcaaggatcagctgtagttggggtgttgggacaagttggtatggcgtgtgctatcagcattctgggaaacgtctctggctgatgaaacttgctcttgttcggatgttctttggcaacgactacagtcttacgaggagcaatagtgatgtgatctgcagcgatggtgcagcttatcttcgttcatgactactctaagaagttagtgtgtcatgcactgaagtatatagtatctcgtagacactgtcatacgttctagagcgaattttggcttcaggttagggctaacctgccagggcagttccgatctagcgaatgcagagggtgatgacgtcgagctcaaagtactggagtgacagtatgaaccgtgtctacagtggtcctgtgcgaagtattcagtttgacttcccatcaggatgcgtgcgaagctagcagatcctgatttgcactcgatatatctgtggtattccacacccatgtggaacattcgttgacggtagtagttaaccgttggagaacttaagatgcgatttacgccaagacaaccgtgtcgcatggcgaacgtgggactgtacacgtctgg

SEQ ID NO: 618387 - DNA, 596 bp, Homo sapiens
  misc_feature (29)..(29): n is a, c, g, or t
  misc_feature (70)..(70): n is a, c, g, or t
  misc_feature (117)..(117): n is a, c, g, or t
  misc_feature (247)..(247): n is a, c, g, or t
  misc_feature (292)..(292): n is a, c, g, or t
  misc_feature (327)..(327): n is a, c, g, or t
  misc_feature (332)..(332): n is a, c, g, or t
  misc_feature (367)..(367): n is a, c, g, or t
  misc_feature (397)..(397): n is a, c, g, or t
  misc_feature (399)..(399): n is a, c, g, or t
  misc_feature (431)..(431): n is a, c, g, or t
  misc_feature (449)..(449): n is a, c, g, or t
  misc_feature (476)..(476): n is a, c, g, or t
  misc_feature (481)..(481): n is a, c, g, or t
  misc_feature (483)..(483): n is a, c, g, or t
  misc_feature (568)..(568): n is a, c, g, or t
ctcgtgccgaattcggcacgagtatatanaaaagtttcatttattcgaattaaattatggtatgagtttnatatacaaataaattctgtgtaaataatacaaaatgctacaaatttnaatcttgtaaaaatgcaaaaatacttgtaatactatacatatataattcctttcacatgaccaacatgtacagtagttgacacgatgcacacgcgcttccccccacagctgaagctgctgagacagcatnaagccttcgcttctgtgacgtcagcgctccttccgcggctgcctnacggttagccagcaaggccttccccttacaccccnagctnaagatgcttcagattatgagccatcatcaggaggnaaagctacctattctctggctagttagaangnactgtcatggggaaactgggtccttctacagncttaacaccagcctgctnaactgagaacacgcctctaccgtgganaagcncnggtacatactggctaactcggtttcattctgcaccgcttcatcgctagcccccaaagagtcatgcttgagactgccctttgagtnctatagtggtggggatgcttcgctggcc

SEQ ID NO: 618388 - DNA, 583 bp, Homo sapiens
  misc_feature (299)..(299): n is a, c, g, or t
tggtttgggaaaaaatccgggggcacccaggaaggattggaaaaaaaatccttttctctacagcaatttaatgtgaggaagctcctccaatcctcgggctatttaagggttcaaaatcaagtgcctagggaaatatcccaagggatgattttctggggagctatctggtctacctggaggttcctgaacaatgatatccccattaatggagcagtcttcagtataaaaaccactggtctggtcacctcatttggcatactggtctccggggaatgttccagttcacacccggtactgtntatttatagaaacacactttatcccattaaagcataacctaattcttccaactatttaatggaataatctatggtccatatttgggtctggccatatgttttcggtacaactagggctggatactacggtcagggttgggggtctggggtcacaaggtgtataatactccctggagagttctataacctggcattcggacagaatcccctttatggtacctataaagatttggcccaaacggtccctgtcacagaaatctgactcctgcgcaactcgccattgg

SEQ ID NO: 618389 - DNA, 585 bp, Homo sapiens
taaaaggttaaaatagattttatggttacaaggggggaccccaccaagcagggtcagtgacccccaaggaggtcaccagggagacttcaaaaggtcatgatggcagaagaggtgacgggaatggaattgacatgatccaggggaggccggccacaaagtgcagtaacattgaccaggagtgggccggtggggctggctcaggtcacagctgtgagggacagaacggaccccttcactcgtggccctccgtgataggtctccaggtgtgacaggatccagcccgctggcaggaggaaggtcacgaagcaggaggtaagcccaagggccaattccatgatcccaagtttcccctcgggggggcaacgaagggatctgggccgcgcggcactggggagccgccgggccgagcctggtcaagccccgaagacagcagcggcgtacaggacggacatgatgggcccggaggcacgcggacatcggtcaccaccattactcacaagactcttcgaggggccaggtcagggctcatcttctaccggaacacggggtgaaggctggggaccccaagacggccgggagatccct

SEQ ID NO: 618390 - DNA, 1007 bp, Homo sapiens
gccctcatgtgccccagttttggatgagagactcggggaggtgctgtcctgaggctgctgtgcgggggcggtgtgtggcctcagggtcccttcccctatctgcagtggtcgtgattgcttcttgtctgtatcagggttcaggcagccgtgggaattgtaggttgctacgagaatctggtatctagtcgcagtgcgcctcgtgatgcgacgaggacccgggttgggactccccagtctcgcatatccagtagggcacagagaaagctggggttctaggaagatggcccttccctaggtctttatgtgttcccctcccactcataatgactgactggaacaatcgattgcattgcatgagtggccattgctcggattgatgcatgcgcagccaagtcatggtggtagaagagtccggtcgaggaagcggcaaggcacttgtaggcactgtggcgtggggaattatggggtgtatttgacctgcactttgctcattctgctgggctacgcaggaggtaatttgggcactgttttggaatgagaatcaatctgttatgtttgctagagggtgtaaatttctcattatgaatagggtggaactctgaagttgggaggaataatatacgagtgtctgactggtaattgctggagatgacaatgattagctaggttaagaaggattacctaaggagggtaggggaagcatattgatgatgccccctcagaggtgggtcctccctgcaaggccagcgaatatgcgggggcgaggcctagcgcaccgaaccacgctcgcggcaagcggtggggtgacactgccgcggttcccttcgcgccctgggcgcgagggattaagcggagggccacagggcctggtggtctcaactaccgcgggaagggaaccacgggcggtcgggccggggcacggcgtgcacaaggagccccaggcgcccagggcgggctaggcgagcccaaagcgtagacgcgcccgggggccacacaccgcgggcaag

SEQ ID NO: 618391 - DNA, 1274 bp, Homo sapiens
agcgggcggtcggatcacaatggtcggcggcggaggaggcccagaagaccggagcgcggacgacctcatccagcggcctacgtcccatggccttttcgtgccatcggggtgtatcgagtggaaccagtaggtcattcagtcaacgaggatggttactcagtgcctcctgctgcatccccctgtcatgtagcgcggccccagcactcgcgtgctggcaggttgctcgtccattccattctctcacttcccatcgtcgctcatcctctttttcagctcgcagttctcggcagtccatatcgccattgctcgcggcaacttggacagtttcactctgacggtggcactggcacgagttggggcatttgcaagcaacatggggctgtataaggctaggactgtgccacctctctctggtcggcacctcccttccactcggccgggccccgcctggcgtagtctggggcgcgcaaggaggggcgttcggtgacctttgacctcgagtcaccccgcgatattaggaaggcacttgacacatattgcgatttctaaaggaggcttcaacccggaggtagaaaagggaaaccttcgccaccgatacaacggtaaggaagacactcgcatcggggcaatgcgtatcaaggacagggagattgagttcgcctcggaagagtaatatccaaaggccaattcgtaagagtcttttggcaaccgacggcgctcttttaacaaggtggcgacaaccgcaccggaactcttcttggcgtcacagcaacgttggcccccttgttggcagtagaaattgccgaccccaaaacaataccgcggcagatgttgccaacggtcatggtaagctagtggtgccctcggtgatattgtagggcaaaccgcgggctcacgtgtgccatatatatggagagtctgcattgtagaacaccacggtgaattttccaccctgtgaattgaaaccccctttttggctacatgggctccggaagagcacttatttgggagcggccggatattactccggaagagtggagacatcttggggcgatggtaccttgggtggacagcctgtaggggtttttatccgagagacaccctatagtgaggggtatacggttatatgccggacattgagcacagttatccgcgcaataggcactaaacatactctgcggacgacacaggaccttgacgcaactgtggggacctccatatgggtccccacaaagacggaactatatgggtgcccctaaaagaggtgcgcagaa

SEQ ID NO: 618392 - DNA, 327 bp, Homo sapiens
agcagatacagcaggctctcaggcacttgagtggctgccgttctacaacggcgcgactggtgctttgggagggcgtccaccccgcattcatgtcaggagtgagtcgcacgtggctttgtggtcatggcgacttaatccgcctggacggtggctccgtctccctgcgcttagacgaccttggcacttctggagataagcccatggctcccaggttgcgcacatgtgacgtttccttgagagaggttctggctctgcgttttgtctaggagtgtcacaggatggacactgcctcctggcaggggctgcccaatgcagatagcctcctgc

SEQ ID NO: 618393 - DNA, 191 bp, Homo sapiens
accgtactatgtaggcaaaatagtgggacgataatataggtagaggcgacaaacataacgagactggtgatcgctggttagtaccaagatagactcttagctcaacgttaaaatttagcccagagtaaacgctccaaactccccattgataaatttacactgtaagatccaaagtatgcaccgctactttg

SEQ ID NO: 618394 - DNA, 592 bp, Homo sapiens
  misc_feature (592)..(592): n is a, c, g, or t
agggtggcaagatggtgttggaaagcactatggtgtgtgtggacaacagagagtatatgcggaatggagacattttacccaccaagctgcaagcccagaaagatgctgtcaacataggttggcattcaaagagccccagcaaccctgagaacaacgtgggccttatcacactggctaatgactgtgaagtgctgaccacacttaccccagacactggccgcattctgtgcaagctacatactgtgcaacccaagggcaagatcaccttctggacgggcattcgcgtgggccatatggctctgaagcaccgacaaggcaagaatcacaagatgcgcataaatggctttgtgggaagcccaatggaggacacatgagaaggatctgtggaaactggctaaacgcctcaagaaggagaaagtgaatgttgacattatcaatattggggaagaggaggtgaacacagatatggtgacagtgccttctgggcccagatttggtgatgctctcataagagtttcgaatatgggtggtgaaggtggtgccatgctgggtcttggtccagggattttaatttggagtgtccgctgcctcn

SEQ ID NO: 618395 - DNA, 1069 bp, Homo sapiens
gctttccatagtggagcctgggctactctgaaatagaagcacctctccttcctttggacccctggagcactgtgttctacagttcttagctacttatttctgtgtgcattatttgtatgtcattatccttggtggtcaaccacttcaaggtgagagactggggtggtggttcctttaaacttattttctaatctcaccctggcccatctttctctttcccacttcctatgttgactgacaaaatcttcgtattatcccagagtaccagagttatttctgtgagaggctaggtcagatgtttcataccccaagcagaggctcaagaagtacctgatgcagtcatataattttcagaatgtgtgtagatagaactaccagcggatagcctgggcagctggcgatgtgctatcaggggaaaggtggtccataccacattaaacctgaacaggctgtgcatgcagccttgacatagcacaagtctgcaggagcatgaaagaactgaagatacagtattcgacttccagtattactaatcactttagagacaggatgacgataggtttagaagagaccagggatgactaaggagcacaatgtaaaacaataatgttacagaatagaatataagatatctgataggaaaaataaataaaaaaatcaatgaatcttatagacagaaaatggaaagaaagcatcaagagataaagcatcgaagaatgaaggcctacacgtggtggtcgcaaagggaagggcatgaaaaaaaggagaaaaagaagaaacacataagcagagcataaacagggagtgggacacacataaccaacagaaacggaagcggaacaagggaaacaaaagggcatgggaaatacaatagggatgacacacgacaatcaagaaatagcgaagcacagaaaacaggatagacgaagagacacaggacgatacatcaaaaaaaaacactcgcacaaaaaagcagagcaacacgacacagaggaaccacacgacaacgaaaggaccgcaaaagacacggaacaaaaccggcaacacggaagacagaaagacaagaagg

SEQ ID NO: 618396 - DNA, 159 bp, Homo sapiens
cattctgcttctgccatggggataagttttttgatgtgctgctagattcagtttgtcgcagttccagtagtgacgtgcttcctgcttctgccaggctcttattgtgctccattaactctcaacagaatatctcatctcttacatgtgtgcttcctgctt

SEQ ID NO: 618397 - DNA, 310 bp, Homo sapiens
ccgcattctcatctcaatagatgcacagaaagcacatcagttcatgattttaaaaattcagaaaattggccgggcgcggtggctcacacctgtaatcccagcacttggggaggctgatgtgggcagatcacgaggtcaggagtttgagaccagcctggccaacatggtaaaacccattctctactgaaaaaatacagaaattagccaggcatggtggtgggcacctgtagtcccacttactcgggaggatgaggcaggaaaatcgcttgaacccgggaggtggaggttgcagtgagccaagatcatgcca

SEQ ID NO: 618398 - DNA, 828 bp, Homo sapiens
acctagtggtcgctggcgacattgccaaacgtaccaagaaagtctgggatcgtcggtaaatacgtggaccctgctatgtggtgcctccctccgagaaaatggtgaagaaaattgaaatcatgcagcacgccaatgtacacttgctacttatctgtgtgcaaaaccaagatgaagagacgagctgtggggatctggacactgtggttcctgcaatgaagacagtggctggcttgtgcctggacagtacaataccactatcacgctgtcacaggtaaagtcctgccatcagaatgactgaaggacgttgaaagaccagtagactgctccatctactcttatgagacatcacatggacctataactacaatgggttaatagaatgtaacgaaaaataagaccaacagcaagtgtggtgagccacgcgatcgataaaaaagtattcccaaatagaagtgagtgcaccagagagagttacaacgacatataccagagggatttctagtgagataaacaaaagagtggagtcccccagtagcataaggcagaaggtctgaatataatttacataataacaaaagagacacatgagtaccgcggacacatgtatataaccaaaaccacagactccggtgagaagcagttgaggaagagaaacacgcggtaggctataaggaccaatagacgatagcaacaacaaccgtaacagttgagtgagacaggtggggagcgacgtcatattagaaagccatgcccacgagctggggctgacgaaaaggcaccgagatatcagagaggccgacgcagaacaaagagcgatgaaactacgaa

SEQ ID NO: 618399 - DNA, 153 bp, Homo sapiens
actgaccgttcggggctcgcgggtatgacgacgtaagaccacggcccgggcggcgacggtgtgacgacgtggtgcgccgacggacctggactggccgacggggcgggtggagacactactggacgtcgtgtatgggtacggggacgggacgga

SEQ ID NO: 618400 - DNA, 343 bp, Homo sapiens
gagttcacgacagccaggtggtggaggccaagtcccccaggattaaacagcgtaagtattgaaacacaggccctcctgccccagttgtaatcaatatgagggctccttcaagcaacgatgctgctctgaagcatatatataggaatgcctccttttaatatactgaaattcactttcttgatcgtaagtcccaacattcattcaaaaatattattaaattaacctaaacacatgccatttctattctatgggttaagcctgttctgagttgtcgagactgtgtattggatgggctcactggctcacacctgtaatcctagcactttggtagagctaacgtacg

SEQ ID NO: 618401 - DNA, 269 bp, Homo sapiens
tggccaggcttctctacctttgcagggggggggggcctaccaagtggcccccccggccccccaaaaaaacagggccaccggaacacagtctcggcttcaggatcccttcacctacctcgggtctctccaaaaaagacacaattcttccgggacactctcaaggcttcctccccaaattcattctggcggcacgacacacacaggctctccagtccggggagggcacctccaggagccagcaccccctcctcaaattcctttctcagtct

SEQ ID NO: 618402 - DNA, 301 bp, Homo sapiens
agatgtcaagcaacccaccagaactgaagacacagagcttgaatttctcagcgttgcatggctggttaccggccaagttgggattagaactcccaagcgtcttgttaaaccaagctacctgtcaggtactgaagcaaggcaagctttacattaggaaaagagaatatttgctctttatgtccttagctttttctttcttgaaaaagataaaaacattgaaagatttgttatactttgatttaccaatcttacacttgtaggaaaagacaaagtgaatcgtaaataaagcagtgattttctt

SEQ ID NO: 618403 - DNA, 183 bp, Homo sapiens
atgctcgtgtagtctacgataaatacctactgttaaatatatggtgtgctcacacgataaaccctaggaagccaattgatatcatagctcagaccatacctatgtatccaacatgttctttttttccggagtagtaggtaacaatatgggagattattccgaagcctggtacggctgccattg

SEQ ID NO: 618404 - DNA, 752 bp, Homo sapiens
cggggaatataatcctgaggtgtttgactatacataccaattctcgaatgacatccgtagcgtaaagagaaagagcttgtgaaaaaacagttgaagaagcacctttcaggagaggagcatcgacgctaactgcatgcatactgcttcagcgtaatggagcagccaagaaatcggcacagcaggaaccgaaagcaacagcaggagctgcacctggccctgaagctaagaacgtcgggctcaggcccagcagggccatcggccgatactgtccgtggaaaagaatctgagcagcgccagttaggcactagctgcacgaagttgcaaggacgctcgaaactgcagcaagaaattcggagaacttcattgagtcgaaagaggcagacgaaatgacaggcaaggtacaggagatcatcgtccctttgacgcaagagagtaataaggaactatcctctgctctgccactgccccagggagacatggatgctgtgacggatcagagtttggtccacggcatggtttccagttccaagggccaaggatcacagctgcccgtgaatcgtgctattgcctacagagatagactagagggctctgtggactatccctcagggctacaacaagaatagttcagccttctgccatgccacacagcctcagattgaactctggttcattgcgtcctcgtgttcttctctcatccttgccattaaaccagggattctgataccgaagaagaggggccaatgaaaacc

SEQ ID NO: 618405 - DNA, 799 bp, Homo sapiens
agcggagtgtttaacagatggcggtggagcgcaacctcagcctgctgaagcaggactcctcttgggcagcgcagtcccggaagcgtgttaaacctagtaactgcgtcgctactgatgataggccgactcatggcatcacgcagtgaccgcagagttcacgtcaacgaatgcattgccgtgtgccacgtagatccgcatctgcgctgatctaagcatgacggactagggacgtcgtcgtcgagtctcctatccaacagggcacgttgatgcgtagaaggagtgacaagaacaagtacgtaattcgagaccgtagaggaatcaagaagagaactcttcctagcaaataatagttcctctgctagcaaattccagtcgacatggacgctaatgagccgctttggacagagtcaatagcttagttatcttaactcgagaggtcttttctctcgagactgtgcatcctcatcgtttggcagaatcgtgcgaactttggcgatagcgagcttgaacatagccaacacggagacagctctggacagagactgagttttcacaacaggcataagtttgtcgatgcccgatagtgcacgcaaaccggtgacatgatcccgtgggttgcttctcccaaggcgggccattatctcactggaagtatacggcattactttgcagcgcattgtatacgccactccaaacatcgtttacgaatgtgcaccccttgtaattcgaaagcaactggctgagtaggaaacgcaaagacacttcttgcttggggccgcatcacttgccgtgggcccca

SEQ ID NO: 618406 - DNA, 850 bp, Homo sapiens
gagggatcgtaagccggttggggtgtgagaggtttgctcgctctagggagatacttcaagcaatcactatgtcaacgagacacaggtgtctcccttccttcatagtgaggaagatcagggatcaaacatctcattcgaaatagctaaagaggcaccattctgtacccgttgtaatagcgggttaagcagcgaaatgtagcgatatggatttatataaattgaagagcaggggaaatactaaaatgtccattcatctgatccacatggcgttgttggccagcccaaggctttgttgtaggagcaatgacttgtgtggtatggcgctattcccagtgtagtcgggaattctgtgggcaaaacctaagcccttagaagaagagatgctgtctgtggtctttgttgggcggagctttgcatttaaggttagatgtcttatttattaaagttaacctatggatttgttcggaaaataaagtaatatgtatggggttcagatggtcacccatgggcatttgtgaactatttggttcccttttctttgcgaggctcttgattgtgctttggtggacccgaaattaactagtagacttaagtttacgtaagctcaaggttcatccccagggaagtccatgtgtcactttaaaaacgatgttgactaaattgcccttggatggtcggttgacatgtcccacctttcttaaaattttaagaatggaattaagccaaagagaagagaaacagcgccaacctcgaaggatcccccgggttgggggcggccacggccccgcatattcggggtgcgcaaaaagccaagtgccccctttaatcaccattcgtcgcccctcacggg

SEQ ID NO: 618407 - DNA, 130 bp, Homo sapiens
tgtaacctctaggtccatgaatgacccttatcttctgtaaaagtggatgcacgctggcaaagtatgttttgttttattgtgactcatggaacattctggattgtggtgattaaaatctaacttaaattga

SEQ ID NO: 618408 - DNA, 136 bp, Homo sapiens
tctgtagtcgatgaaaccgcgatcaatctcaccagccctaaactcgcacctgaaacaagctaacatgaataagatccttaattccatccaccctcctagggagaggagggtggatggaataaagggggtaccgagc

SEQ ID NO: 618409 - DNA, 1231 bp, Homo sapiens
  misc_feature (873)..(873): n is a, c, g, or t
aatcgtaaggaggggcccgtggttaatatctgacgagggaacggcacggcgatttgctgactggtcgcagcaaagtccaggctgctgctgcggtgtgctgtgtgctgtgctggaagctggtcggtgactgagtgatagagagccacagcacgatggagctgccagtgcctgtgacatgccatgtgtgctgccatgcatactgaaaactgtgctgcagagtgtgtgctgagaactgtccactgctgggcctggctgaaagctggttcctctgtggatgaagcactggtataagcagttgtggatgtgcatactgtgcatgggactgggtgaccatggactccagacaccttaccctgtgctgcatcaacaattgccacaactctttcaagatgagataaacttgtgctgcctcaaggagtggactggtggaatgtgctgagtgattattgttgctgctcccagcagctgctatgtggattaccttggtcagctggtattgtgtctagagcatggacagccacccattgaacgcaaggtcatagagctgcccaacatccagaacggtcgaagtgtacccagtagaactgctgcttgtcctggcacaatgatttgggcaaatctcacactgtacaggttacagacatacctgattctattggcctagtattgagcacagctcgggagcggtttcttggtggagccccagtgaagacactcggctttgggccaaggaactcagaaggctctctgggatagggttgtatgacagcacacattaccgggtactcgaatgcggcccttgagaattgggcagttgatcatcatggcagcaccgcaagacgagatggcacttggcccagatgcacagcgtgnatgtcaatgcaacacacacatgtcgcaacacgatcaggaactccaaggtcaacaaggcatttgtggctaaccatatgggcaacaagtgaatatcatgaaactcggcccttgcggtgctcaggcaatgtccacagacgcagaggaactgtgttcaaaaagtgaacattgtagaagtcaagattgtgagcaggtggatgaagggtgagaatgaaggcgattagaacattgtgagaaagattatatgaaacaagagaatgttgagatgttttaataaagggttatatgtagcaaaatgggaagcggagtagaagtagagtgattattaggagaggaaatggaacaagtaggtagaaaataa

SEQ ID NO: 618410 - DNA, 757 bp, Homo sapiens
tctgttcttttttttccttttgttttgttccttttgttcttttttttttcgtcttctgttgttataggttttgttttttgatttttggttgtgctagcgtatgtctggggtcctcaggctttctcttttttgttgtacttataccttgctccgtgattttggggtatcggtcgttgtcccgttttgttgtattgggtgtttgtatttgggatgtcatttgttgtttcgtttacactcttagttctctagatatttgatagctggacctctgtgttcgctgtgtttgatgaatgtgttatatgtattgagttcgtgggagttggtacgtatgtgaactgacgtgagggggatgtgactgtgtataaatgattccttgctgaatatcttaaggttttgtgtaagaggagaagaaaaaccggacttaagaaagcttattttcacattaataatggaacctctgtttgcgagcgtaagaattctatggaaaagcagtttttatcatattttgtgtccatgcaccattgttcgtaaaatggcgtacataataagaatgtatatacaatttgtgatctggccagttgtacttgtagctctccagagggagagttggtggtattatgagttgagtaaataccatccaggggaacttgagggagcatgtctgttgctcagtaatgttccttgtgtgccattaataccacctccagatgagtggaggtacatcacttttgatatcttcaagggtatttggaacttg

SEQ ID NO: 618411 - DNA, 996 bp, Homo sapiens
ccttttgatgtaatatagacaactggactaaagagatgatatatatggagaacatgtgattatcatgaaatatcagcatcttctcactagtacgtgtaaaagtagaggtaactcgtctatagtaaatctcctataatcatgtatatacttatttcgtgtaataatctcattcagttaggttcaaacatcatactaaacatgtcactggtatacttagtaacatgctaatatatttctacttctcccctccttttggactgtgaatgggagctattcagatttgtaacctcactatgtaggtattaaactattaatcacataagaagtatccggaaatatgtagtcatacatcatggtcattagctaaatattgtctattctagcaaaattgttgacacgcctatcgctttttcataacatgatatatatttataatagatgatactagggaatgtattgtatgtcctttaatacatttgtacggtaattttcgttgaatattgaaaaggtaagcatagttgtcaggagggtgaaattaattcttatttgacagtagtgaggacgttggtagttgaaagattttgttcccttttatggataatttgtgggaagttcttgacacatgagatcgaccaaggtgtagaagtaaaattagtcggaggttggctcaggtttggtaaaaaacgttggtataatggatgcgaaaagatttccctaagagaattcgagtggggggtcgcggaaaccaaataatgccctggaatgaatacgatgttaacatgacattgccaggctaataaaacgcacgtggcgtgggaaacccggggggatcccgataaaccactgaaggaacaaccccgttgggcgggggcgcaacgccaggcggcccgatgacatcacagcaggggatcgacacggggatgacaccgggcacacaatacgcacagacacatctcgacaataaaggaggggcaacacatctaaccacccgacgct

SEQ ID NO: 618412 - DNA, 499 bp, Homo sapiens
  misc_feature (46)..(46): n is a, c, g, or t
aaaatccatttgaactctacgaatcgctaattcgcttctttattanaactttcctttttttaccccctttatccaatcagttatcagttactgtcttgtctcatcgctacaactcccgtacgggctcgggtgtcacgttctgtccatcgttcgtatgtgttttccttgttttagtgtttggtcaggacgtgagctgggtgggcattctatgttgtgggtctggtttgtctatttctatgtttggtcctgatatggttctcaatcagaggcaggtgttagtcattgtttctgattgggaaccatatttaggtagcctgtttttgtgttgggtttttgtgggtggttgtcttctgtctttgtgtcattgcaccaagacagagctgtttgggttttcagatttgttgttttgtatttggtagtgttcacgtttatcgtctttattaaacatgatgaacatgaaccacgctgcgttttggtcctttccttcgtccgtcgacgc

SEQ ID NO: 618413 - DNA, 240 bp, Homo sapiens
aaagtgtgagcaagagtcttgaatcaacaactctgactgaaaaagaaggtgaaatctatagtaacaggatgctatgcaaagaacttagggcccaagggattaggctatggccaaggcgcaggggctcttgttcatgcccagtaagatgtcaaccctgacctaaacatcacacactgagaatctctttataatctaggcacagatactctctaacactcacctactgtgaaattctaccag

SEQ ID NO: 618414 - DNA, 465 bp, Homo sapiens
atgactattgatgccaatggtacactcaatgtctctgctgtgaacaagattacggaaaacgagaacatgattactatcactaatgacaagggccgtttgagcaacggaagacattgaacgtatggtccaggaagctgagaagtacaaagttgacagtatgagaagcatcgggccaaggagtcatccaggacaagttcacttgagtcctatgccttcaacatgaaaccaactgttgaagatgacaaccttcagaggcaagtattcacgatgaggacaagacagaagatctgtactagtgtcatgaaattatcaactggcttgatacgaatcagactgctgagagaggacgaatttgagcatcaacagaagtagctggagacagtatgccaccccatcatcaccaagctgtaccagagtgcaggaggcatgccaggaggaatgcccgaggttaggaggtgggtaccg

SEQ ID NO: 618415 - DNA, 198 bp, Homo sapiens
atcggtcggtcccgctggcttggcccagaagcaggcgaagtagatatccccggctgccagccgtgggtggtgaacagcgcgctgatgtgccgcgcggtacgccagcatagcgcgagacctcgtcgaggaaggcgtcggggtagcgctcggcgtagtggttgatgtcctgcagctgggcatcgacccagctgtcgccgg

SEQ ID NO: 618416 - DNA, 251 bp, Homo sapiens
ttctcagtgcaggggagtggtgacatccatccacacggcgcgcactttagtgtgtcgtatctaccatccgtgtgccttcgtcaacttacatagtattgtatagcgtgcagcatacatagtctcctcccctcttacagatatttttcgccacacactcccatgctactaatctcatcacttgaagccccatccatcccaccctgttcacatacaccattgataaccccataccccgaaccaaccattcccca

SEQ ID NO: 618417 - DNA, 453 bp, Homo sapiens
aggagtggcttgagaaagtgttaacaaatgttgagttcaatgttagtaaagctcagtgttaggaatggcagtcatttttcagacttccaatgtctctgaactcataaccattggaaaactttaattgggaaggaaaaaacttaaaagtcccctattgaatttgttcattaagtgaaattataaaacaaaggagatggcaaaaggaaatactaaacaatttctcttctaccatgcttaacttttttctctttataaggattcacaaaacagcaaaccattcagaggttttgaacacaagcatgaatttcattttgctctgacttttgtaacttaaataactaagtgattttcaattcagcagttagaaatctttctgcaaaaacatgcgcacaatttttattccaatgtgctgcccccctcttaatactcaccaataaattctacttcctgtcc

SEQ ID NO: 618418 - DNA, 352 bp, Homo sapiens
  misc_feature (10)..(10): n is a, c, g, or t
  misc_feature (18)..(18): n is a, c, g, or t
  misc_feature (22)..(22): n is a, c, g, or t
  misc_feature (76)..(76): n is a, c, g, or t
  misc_feature (168)..(168): n is a, c, g, or t
  misc_feature (190)..(190): n is a, c, g, or t
  misc_feature (195)..(195): n is a, c, g, or t
  misc_feature (198)..(198): n is a, c, g, or t
  misc_feature (200)..(200): n is a, c, g, or t
  misc_feature (216)..(216): n is a, c, g, or t
  misc_feature (223)..(223): n is a, c, g, or t
  misc_feature (237)..(237): n is a, c, g, or t
  misc_feature (276)..(276): n is a, c, g, or t
  misc_feature (299)..(299): n is a, c, g, or t
  misc_feature (316)..(316): n is a, c, g, or t
cacaactagnagatggcntaantgtagaaatctctccgttaattaaatgcctttaagagatataattaacgtcagnttaatatctactaaattaagaatgacttcattatgatcatgatttgccacaatgtccttaactctaatgcctggactggccatgttctaganctgttgcgctgtgtacaatctnatatntgntnctagatcagagaaatntcctagntcacatagacccanaaaggggtgcgaggggagagggtggattaccagtatgtngttcaaataatccaatgggttcnaaggactgtataaatgnattttattttaaataaaagcaaaacttttatttaat

SEQ ID NO: 618419 - DNA, 452 bp, Homo sapiens
cttcaataggctcaattcttatttccgtcatgagcctagcaatccaatccatcctgtgccatcatgaattctgagcgtgcacacttggggacctgcatcagcgttaggtcagcgtagtgggttaatgcattctggaatagtgaatcacttaatcacggtccgcctagtccctgcagctttggggtccatgcagagaccacagtgcaacatacgtggctagccgctgagatccagctgatctgaccggtcagtcacgttgtcactcagaaacagagatgcgattgaacatggggagtcgccggtggtctgccgcggtctggggtggtgctgaatcttgcgcctggaagtcgggagagtcatatcccccgaggatactgccgatcgtggcatattcatcagggtcgtatcccagggactgcacaaagcgggtcggaagcagctggtcccgattc

SEQ ID NO: 618420 - DNA, 1051 bp, Homo sapiens
catgtactttctcagctgtaatggtgcgtctaatgctagtgttggcacctgtgatgtgctattctctctggtcattggagtctcccaggctgctgtccacgatacatgaagcaatctggtacgatacatgtcgtccaagtagccacacgtaagatgcaatgaagcaagcatggagttccacgcttacccggattatcgaaattgaaagctaggtagggtggagatcgatactgctcattggcttctacgtttctcgattcacctacacccttctctattcataccctgggtattccatctgaatgatgtcaacaatgtttcttttgagattgggtcccgagattcggagggtagtcaatgaatatacgtgctgaacatattcgaaggcacgaactagactatttatacttccaatctggatgagacgtctccagtgtaggaccgttgactggttctccaagggtctgctcaaactggtcctcaatcgtactaaggattgttgttaacttattccgcttaggtaacaagtgtctttaactcaagtaatggccagagacagtacctcccaaggcatttagacccgtgttcctgaaatcgctagacgattgggtaatacacacgactttgatgcttttatcgtcctcgcgatgaatcgccttattacctactagatcattggctgggtcagtgatatacccgggtaaaatggacctcggataaatcgaggcttgtccagtggacatcaaaattgttcaacgtccagctctgatatgctttcgctacttgagcactattcacaaatttaggaactgttgacagatggctagttgtaatctttgactagtcttccccggtttgttcaaaacccaatgtggttttgcgctcagtaattcgtctttgccagtcttgccgtagaggcgtatttggtgttcggcccactcgcacaaaggtgtttttgttcttctcaacctcgtttcccacacggaacacttcgtctgagctggtcactttgggccaatccaggggggcaaactttcctttaacgttaaac

SEQ ID NO: 618421 - DNA, 519 bp, Homo sapiens
gattagaggatcccagtagtcggacgtgtagtgaatgagatgatggtctcacaccatcacccagaccaggttatgcacacagggcggtggtcagaaggattggcaggacgttgatatacgatgacatcaggttgtctgacgaaggcaggattcatgataagtactctgacgctgtccgcatcctctcaggttcacgcatgtgtgctgcagctcccatttcatcagcaagtttggaagaaccccacatttttcctgcgcgtcatctctgacacggcctccctctgctactccatcctgcggtcctgagcttaacagcttctactttctgttctttctgtgttgtggaaatttcacctcccagggcgggtgccaggctcgcagtggagctggacatacgtccttcctcaggcagaaggaactggaaggattgcagagaacaggaggggcggctcagagggacgcagtcttggggtgaagaaacagcccctcctcagaagttggcttgggccacacgcggtc

SEQ ID NO: 618422 - DNA, 1014 bp, Homo sapiens
  misc_feature (288)..(288): n is a, c, g, or t
  misc_feature (386)..(386): n is a, c, g, or t
  misc_feature (509)..(509): n is a, c, g, or t
  misc_feature (760)..(760): n is a, c, g, or t
  misc_feature (1014)..(1014): n is a, c, g, or t
agcgggctccgcgcgcgccgcgcgaggaggaagcgcgccggttcctattaggggtccggtgcccggccgggcgcatggattcacagtagcctgagcccgcggtaccggcgtgctcttctgcctgtcttccacgtatgactagctgctgtgtgacgtgctgcatgcttgcacgggtgctcgcggtagtcttggggcccagagccaggccaggaggctgcaggaggaagctggaaatgcggattacgtcctgaccactaggactaaagtgctgaagggtgatgatagaantcatgttagcatgctgtgcaggctgagacgatgatccccatttgcaggggatacccgcgtgaagaaccatacgggaggctgcacttggtcaccgaggnctgtactgggcagtctctggtaaacatcatagggacttcctggcacgtcacacactaacatccaaagatcaggacttgtcggtttatattcgaagatagatgcagtaccaagtgatggctaangaagggcatcgatagggagttgatagagtctgagcagcaagagaggatgaagagacgcaggaagataaatcggaattaggtaaaggggcaactagtaatgacgacgcttatgaagacgtttacatcaacttggagtagacgataagggggtcaagggtcgggtagatggatccatccgacataatgacgactaggtagagaaaccgtagatcttcatcggcggagggttcggcttgacactgcagacgaangcaagtgtggatgtgctgccggggacagaggtacgaaggacggtggatcggagagacatggatacccgtgaacacatccacggaaggataggacccctgagcgtgccgttcccctcttgacgcccaaaccaacgttgcttgagacgggaagaaaagacgaggcgagtaggcctggtgtgaagcacgtgaggcggagcaaggaaggggacaacacatgccttgccttgggaggggaacggacgttcccgaccaan

SEQ ID NO: 618423 - DNA, 156 bp, Homo sapiens
ctcctcccgacctacctcagggagctgagcgtgcaggcgctcacgggcagcgcctgggacagagtcacgcctcagagaataaaggtagctcatcccaccataatactttcattagaatgttctgatgataaaaacaaaacttgttttccttaaaga

SEQ ID NO: 618424 - DNA, 347 bp, Homo sapiens
atgataatataaaaatgatttcttctggctttggaataaggtgtttgtttttataaaagatttaccccatagctgggagtggtggctcacgcatgtaatcctagcactttgggaggccaaggtgggcagatcatctgaggtcaggagttcaagaccagcctggccagtgaaacctcatctctactaaaaatacaaacattagctgggcatgatggcgcacgcctgtagtcccagctgcttgggaggctgaggcaggataattgcttgaactcggaagacggaggttgcagtaagccaagatcgctccactgcactcctacctgggcgacacagcgagactccgtctc

SEQ ID NO: 618425 - DNA, 1185 bp, Homo sapiens
cggtgtatgtggtatcgatgctttctactgtgtgaccggagttgtcggtggcgatgggatgggggcctggtttagtgtcggccgttgtggatatgagtgagtccttttgtttttatgcttttcctgtgggtatgttttgttccttgttgttgcgattgatcgtgttttagaggtgtgtggctgctggtgaagctttgtctccatcttttgtgtttttttatttattttattggttggtaatatttttgtgtggtagtataggtgttattatgatgtgggttggaagtaagtatgatatttgttgttgtgcgttagtgggtggagagttgtgggtttgatgttggtgggaagttgttcaatgcagtgtgggtaagttggttgaggatgtttagcgcgagggctaattatatgtgatttttagattatgatgcgttgttgattgtttcaagggtggttttagaatgggtagtagttttggttttgttgttcatgcggagatgatttatgagaggattggtctgtaagtttaggggtgattgtaggtgttataagtatgcgtggcggtgggtggcatgtttatatatgggtttacgtatttgtagtagtttttagtgtgtccgagggtttgtgtagagtagggttgagttttagtggctattggtgttttggtgttgtgataattagttagttgttgggtgctatttgggtttttgtgtaaatttactgtggtagtgggcttaattggtgttattgtgtatattagtgtatggagggaatacatgtgttggtagtttgagctgttgtagtagtggctttgcagttgtagcattagtagagtgttgtagccagtagtgtggtggttaagtgtagtgtaggagttagggagtctgtgtagcagtaaggttcttgacatatagctatctagtcgttaggaatattatgaggtgtattgactgtatgctttacgtgatactatgttgtgttagtgtagtgttatgttaaatagatactatccttgttcagatattatgctgtgttgaatgtacccttgagattgatatgcaagcatatagtcagtttgtctaattgtgtgtgtgagaattttgtcgttatatacctaaacattgtcatctatatctgtgccttacctatgttataaatgttcataagtaccttcagtacctc

SEQ ID NO: 618426 - DNA, 913 bp, Homo sapiens
gctagaacagcggcgacaggggagcccacttgacgagaagcgaaacttacggtgtggtgcaacgccttagtacagctactggggagctgaggcagaaaattcacctgagcccggaggacagaggtttccaaggagccaagagtgcaccaatggcactccagccagggctaacagagcgagactctgtgctctaaaaagtacgagacaaaaaccacatgggaaacgaactttgaatctgctcaattgataggaaaaatgcaaatcaagagaatcaacgttttacgaatgttacatagactggtctcttatcccccgaatgcatgcatgtcagaggggcacggacatccctgaagagtgaatgaggagcccccactggagggcgggggcagggtgtgctcactggctctttcctttcagcatttggtgtatgtattcaactgacatgggagccgcatattcagtcttgctgcttgcactcaaaacacaagtcggagtcacagcaaaaacacttttaaagttaagataaaatattgtttatttttgttataacctttaaagtgtgtgtgtttataacaaagcatattagtgcagtagttgtgcatatacgtgtaaaatcagtaacttacttggtgggtgctttctgaaagtctaataggggtgcaccattggaagtctggaaattatagttttaaagtactgcacaggttgagcatccctaatcctgaaatccaaaatgctccaaaatttgaaactttgagtttccaaatccaaaaagtttgatatgatgccacaagtggaaaatttcatacctgaccttggtgacacattgtggccaaaactttgttttatgtacaaaattatttagaaatattatataaagttatcttcaggctattactgcaggtgtatatga

SEQ ID NO: 618427 - DNA, 383 bp, Homo sapiens
agctgtaatatgtaacaaacctgcacgttatgcacatgtaccccagaacttaaagtataataaaaaaaaaaaaagaaaatggagtgatcataaaagtttacaaccaatggccttctggtggagtaaactggaggaggaagcagaagaggaggggtgggcttgggggcctcagtggggggagagacacgggaaattccaggtgtaagtggaccatgcgggtaaaactggtgtggtccaggtgatatgagaagaaaatggacattcggtcatgtatgattagacccaagccctataaatgcttgtctaaaacaacaaaacaataattccagggaaaacctatagaaatggattttatgcgggactctaaggtaacatattagggg

SEQ ID NO: 618428 - DNA, 114 bp, Homo sapiens
agaagcggccacacgctttgaatgtcctgtcgactgctgcttccgttctgggcttggcttctgcagggtcagcagtacatggtccagcagttccaggtagccattgcactccgg

SEQ ID NO: 618429 - DNA, 346 bp, Homo sapiens
taaagaagaaagaaggcaggatagtgcttatgaacaagcctatttccattttgaaagtagatttcaggataggtgcggtggctcacacctgtaatctcagcactttgggaggccaaggcaggcagatcacttgaggtcaggagttcgagaccagcctgaccaacatggtgagaccctgtctctactaaaaatacaaaaattagctgggtgtggtggcggcgcctgtaatcccagctacttgggaggctaaggcatgagaattgcttgaacccaggaggtggaggctgcagtgagccgagatcacgacactgcactccagctgtgtgacagaatgagaccgtctcca

SEQ ID NO: 618430 - DNA, 403 bp, Homo sapiens
ctagaggatccccatggatcatcatcgctcattcattttcctgagtccccttggtggggttggggggaattctgcctcaggaccctgaggggtcttctgtgagcaagatgtgccttggtaatgcagccgctacgaacaggacttcattcacaggcataatgatgtatccaggtcgaccatcaatgtaccattaaagcaccagatcattgtaggaggcttccttgtcaaagtcgtgactgtggaattcctgcgcaccatggtgtgtccactcatcactgcatgttaggaactgctgtctctttgggacacgagttaaaagaacacactaatttctggagtgtgcctgcagcttcacggccttcattttgttactaagttattttctggaagaacagcaaaaatt

SEQ ID NO: 618431 - DNA, 748 bp, Homo sapiens
gcatcactgaactgtttgcagcgcctcaagtaaccagactggtgtcacaggttagtgagcaaagatttcatgtggggactctcacctggctaatcttacgtatactggatagcatcagttcccagagcagtagagaggctcggcaggctatgttacagtgaacatttacgggctgtcacgcctgaaaagagcgatagtgcaactccatgttcccgtgctgaaattagtgtcttctatagtctgcgtataccaagtgtattacatttctgatgtgtagctggggattaggacggaaagggggtatcaaaaagggaaaggacatggtctgcactgtattctaaacctattttacccataactcttatacatccacgaggatacttggaatgctagataccaagacgagtcgctatacagaataggaacacaaactgcctgtcatgtgcagaacatctggactaagaattttcaagccctccattcccagtaattatactcgaagacagggaggctggttaggatccgattgcacgtcaaacaccacaaccgaaacctgaagttgggcaaaacacctgggagacacgaatacaggcagcaagggggcacgggcaaagacgggcgcgaccaaaagcacagggccgaggaaggaccagcgacggaacaatgacaccagagacagtagcgagacgaacgcaacacaaccagggacaattgacacgggcacagctggcgccccccagtgcgagtc

SEQ ID NO: 618432 - DNA, 486 bp, Homo sapiens
ggatctgtatatgttagctcacagcctccatggtctccctgggatataagttgctgctggagatggagggcttaggagtctccactgtgcagaaaacagggtgaagattgccgtgtgtggcgcctttgattcctccaaaggcatttttcaatcagaattggcatttcccacctctcagcccacccaagtccttaaaagcccatggcaggtgtgtgtgatacaagacagatgcatggcaatctgagggctcagagattgtgaggctgcctgcttcatgtgggagaagcacagactttctcaagtgtgaattgagcagcagcattgggtcatggaaagacacaggaccagcagtcacagcccctggtgcctctgtgtgtccctccgtctccaactgcctgcctggcccaccttgtggtcctcacttggagcatgcagtgctggaatcttgttagtttcagtctcactttgcccactgaggtatgtttt

SEQ ID NO: 618433 - DNA, 306 bp, Homo sapiens
cctttttttgtttcccccggggggggccccccctcccctggggggtttttttttggggccccccccccctttttgtgcccgcgtgccctttttttcttttccccgggggcccccagggggtggccgggttttttttgggggggactttttttttccccccgcgaaaacatgtgttttttttttcggggcggggggggcgttttttggggattgtccttccccctgtttatgtgttgttttttttttttggggggggggccccccccgctttttttaattgggggatttttgttgttttttttttga

SEQ ID NO: 618434 - DNA, 581 bp, Homo sapiens
acccttcggagaataccttaattgtgatcgcggtttatggggcgaggccacgcaacgacgcgcagggtgaaaccctatggacccacgagtgcggcgtgctgggacaaggatgccggactttaaggaaaaaaagatggtaaatccactgttcctaagggttccaaaaaggacttcaaggtctacctgaggggaatggtgctgaatgaatagggttactcaccgccactctgcgttatataattatgctcttataaagtgtgttttttaaaaaaagtggtttgtcaccatccgaaaccaggaccaaaataagtttaaacccctagtttatatcaattcttagatcacgttcatctctacaactattcaagaaccaaatggaaaagactcataaacctacccaaaagttttaaaattctctaatagtgtgacctagataacggcctcgttatagagaaattcaggaagtatggaaacttaccaagtatatgtcatctattataaaaaactgatttttaattatggatttttacccttaaccccggataagaaaaaatttggaaacaaccaaaaaaaccaaacaa

SEQ ID NO: 618435 - DNA, 346 bp, Homo sapiens
cgcccacaggataccggagctcatggccaaggtctggcacaaggggctccttcccgaagtcccacagaaagttggggttcaacttcagccctcctttaactgtgtctacatcaacttcgagcttcacagacgccttcctttatgagctcaggtgtaaacctgctgtgtcccaggcacgtgtacagcaacgtggtaatgtagaggcgccccttgcctcatagggctctcgtgtctggcacttatagttcctcgtcctacagcacgtgcacagggctctcccttaacaaatgctgcctcagagaaagagctgtcctgtgaggcggtgtctctgtgggtcagatatgtc

SEQ ID NO: 618436 - DNA, 259 bp, Homo sapiens
  misc_feature (189)..(189): n is a, c, g, or t
  misc_feature (201)..(201): n is a, c, g, or t
  misc_feature (209)..(209): n is a, c, g, or t
  misc_feature (216)..(216): n is a, c, g, or t
  misc_feature (231)..(231): n is a, c, g, or t
  misc_feature (240)..(240): n is a, c, g, or t
agccatggattacctggaacaaagtgcagattagggcccccggtcctttccaggtagaacaagctatcgttctttaattttattaaaaaaacaaactttttttttgttttttgctttaagaactaaccccgatcaagagtattttttttaggtagcttaaaaagaaaacatatattttatgtaaaaacncaaacatggccnaatgcaanactgaanagacaatcatcctgnattttttanggtttttcccggttttgag

SEQ ID NO: 618437 - DNA, 238 bp, Homo sapiens
  misc_feature (176)..(176): n is a, c, g, or t
  misc_feature (185)..(185): n is a, c, g, or t
ccagtaaaaatgcgcgagagagtgtgcacgtatcacatctcagaagggcattgtctgagagaattatcactttgggtggaccactaattgcatcttcaaagcctttgctatgatcattgacacactggaagaggacataagcaggtctatgaccaatagcacagctgccagtaganccccggtcnacctgaggctggtggccctgctagtcagtgtggctctctcattggaaaaggtg

SEQ ID NO: 618438 - DNA, 1494 bp, Homo sapiens
  misc_feature (1280)..(1280): n is a, c, g, or t
ggacaggtctgctcaccaggtggccagataccgaccaggtgcccccatcatgctgtgacccggaatccccaagacagctcgtcagggcccactctgtacctgtggaatcttccctgtgctgtgcaaggacctcagtccatggaagcgccgtggcgcgtgaggacggatggagcctcgcgggtgaacgtttgccatgagagtgttggcaaggccctgagtgcttcttcatagcaagggagatgtggtcagttgtgctgacctggatggcgccctggctcctggcttcatcctaacagcatgcgtgtcgttcctagtgcccgtgatgggaccccaaggaggacccttacctaccatgcccctttggtcacaagcactgacctctcgcggctaggctgagtaccaagttaggcgcacaaaggcaaacgactttgccaagatccttcagactcctggtgagtcgggtaacggtcggtagccttggctaagggttagggggaccacacatgggtaacatgcaccagactcattggtggccctccatttgaacacaccgagtgggcatgattgtcatgctgggcacctgtgtgcatagcgtgggagcaataaggcccaatagacccatgcgtatgagccgaatcgagtgcttgggagcgcccaaccccgataatccacacgaggtaggagaaaagggcagcgaaagtgcgtggggcataatgggaggggcctcgcttgcgcacgacgcatagcagatgtgtccacatgccaagtgcgtggaaccaagggtttcctcctgttttggcctggtgctgattagcgtgcgtggaaaggcacgatttatccctatgtagacacttgaagactgtgcgtgtgacacgccacgaggggatgttccaccatatccccttgggtgtttggaccgtttccgaacgcaatcccaggaggcgatgccatcgaagtaaagggggcgcctctatgcgggcacactcggcgcctcgtgcggtccccgagtttgaacacgtcctgacctgcttgcgctccgttggtgcccgtttgacctctggctatccctccttatgcctcctggctacggtgcttgcttcccttggtttctgcgtcacattgggtccttcccagagcacctttacccaggttcccgccatttgtcctcgtgtgtggcaaaaccaagtttaccaaggcccttttcaccatctcccacttattccccccataggtgctcgcgaagatacgccttctagaggcgccgtgatagggcgtattanggagccccatccactggtagtggttccacaggaaaaatacactcaaggtggaaacgtcaagcagaatacaaagattggaccaaaaaagcgcccccgaggggtttttcatatggcgcgccagaaggataaagaggacaatagacaccgcggcagagtgggcagaaatcgtgtttgcaagacgccacagcagtcgtcttcacaggacagatagtga

SEQ ID NO: 618439 - DNA, 632 bp, Homo sapiens
ccactctctacagaactattcatctggcttaactgtgatgagaaaatttacgtgcctctcaatacgaatgccctctctgcagaaaatcatacgatgtaagcagaatccattgggcaaccccaccacgcttctcatgatatacttcctctcgtaccttgtcattctaccttttttgctatacatattgtgtaacttacactgttattaattcaatcggatatatatgttatcagatgctagacttctgctgtgaagtgcaaggtattattttcacgatgagtgccagtcttgtcagcatagtaatctttcaaatatctccagtaatgcttcttgagaataagtgaagtgcaattgaaaaatacgcacttgcttggaaatttattcccttactgtctatctaaaaggaggtatgtttggaaacttgaaaaatcttaactttagcaagtgctggtacatcttatttctaattgtggaccatcaggaaggaagatttattttgatattgatactataaaaggactttatatcttgtaacattgatgttaaccagtttacttagtctaactcagtactttgcatataatcagcattcaaccaaaatttattgactgaaatgaattctaaatgatacc

SEQ ID NO: 618440 - DNA, 176 bp, Homo sapiens
tttttttgggggggggcccccccccccaaggtccctttgggccccggaatggggggggttcccccccccaaaaagaaaagggcccccccaaagggcggggggggggccccaagggtggggggggttttaaaaaaattttggggacccccccccccaaaaaaagggggggcctttta

SEQ ID NO: 618441 - DNA, 228 bp, Homo sapiens
  misc_feature (80)..(80): n is a, c, g, or t
  misc_feature (125)..(125): n is a, c, g, or t
gattgccctgggttcacttatccaactgattccagtgttgaaacccagaatgacgtccgagagtcaattattaatatganggcaactaagcgcctgactgttccggaagatgttgcgggaagcgnggtgttcttggcttcacgactggcgaataatgtaaccgggcagtgcctttatgtggatgggggattggtgatgcattagtggagagagtcatttattgggatg

SEQ ID NO: 618442 - DNA, 787 bp, Homo sapiens
aggttttgtctggcaacatgatgcgtgcattcaaaaactgtattttctattatcctttcatttctacatttatagtataactagtttagagcacaaaagagatatggcaattaatatgggaagtgatagacccaacacatattctatccaattctatccccacaaagacgaccggactaagcagcagccccagggtcttgccgcatcgtttcctttcgggagcactcacccacaatgtgttgggtgccacaatgcactgaaaatgtgaccactgcccttgatcatagaactatggaaccttagtgctagatgagaccttagaggttttctagtccagtggttttttggattagaaactaggaagagcattacttggggactgtcaagtaaaaacatttttaaaaattctaccatcaagaaattacgctaagtgaaaggagcaagatgcaaaaagacactgttttatgattccactcatttgaagtacctagagtagtcaaattcatagaaacgaaaataaatgggtggtgcacaaaaacaggggggagggggaaagggggactattgggtaatgtggtaagggttcaatttgggctatgagaaaagtatggggagggatattgggggatactgcccacattgggaatggtttaaaggcctgaaccgtcccattaaaagggaaatatatatgtgtttggccccaaaaattttgttttttaaccgtgtttgaagaaaaaaattttttcattttaagaaggggaattatagaagatgaggaggggggggg

SEQ ID NO: 618443 - DNA, 114 bp, Homo sapiens
ggacgggcattgtattagcaaactcattactagacatcgtactacacgacacgtactacgtagtaggcccacttccactatgtcctatcaatagatgttcctgttcccacaatt

SEQ ID NO: 618444 - DNA, 1069 bp, Homo sapiens
gctgatcataatattctgtcagataatggctaagattgagcgttgaagaacgttgagccatcttgaggtacccggtctcagatcggtgcatcctattaaagtccgaggtgcagcattgtgagtacgttcgtctctctacgagttgtcacgtcttgcttatgtaagtggaggcttcgagaggattgatccctcaaggaaggtgttccttcagaaacagagactgtagtgttctccttccgtttggtgtaggacttcttgcgtctagatattgagtcgtgcttgggattatgactaacgtccaatggcggcttaccaaacaagtggtgatatctgtcaccgagattatatgcgttgtcccttgtgcacgtaggtagatagcgtcatgaagattgttcttctccactactcttccactaccaatgttcgtatccgtctgctgccgtgtcgcgttgtactcttccgtgttgttcgtgcataacacagtgtccaatttgttcagataatttgacacttgaactaggatactcgtgaagcggtgagttactgctgagaactatgcggtacagatcgctgcgttactgcgtgacgaagcggacacttttcaagttgtattaacgattgacttcagaatgaccatgagtagtacatgatatggtcttcagagtacgagatgtctcgaagcaggcgagttttgtagtctggaacaatgcgttgccaggtgttagggaaagtttgagagagacgttcgataggcgaagtgcttgttgtccgtaatggtcgagcactcattgagtgtcttccctactaagtgccccccaggggaggctgcattgcccgttgtcccgcattctaaggtaattgggagggtggtggcatgggtttgggcaacgttgtgcaaagtggcgagtgcgttttaggacaagaacgtgggtaggacaataacgtgggactgtggctaattgaggttgggtccacagaaaatagggccttcacttgctgatttctgggaagaccatttcgggttgttggagttcagagctgtctttcacaactaaacgggtcctggggg

SEQ ID NO: 618445 - DNA, 937 bp, Homo sapiens
tctgggacaagcaagaaaggggcccccccccggagaggcaagcccgggcttcaccacgcttcatgcgggaatatttccctggtacccacctcccttggccccaaatatttaaggctggcccgggctaatgccccctgtagttggggacgtgccacaaaccggcgttccaccatctcaaagggacacaagtttcctggaaggctgacaaggaaaaaaacagtgtgagtcgccgccttttctgggggaaaaaaaacctgggagaagagatgggcgcccccaaattctcttgaaagtctttggtagatgacgcctcccccctatcccttgaattatggtgtcctgggcaagaagaccccacagccattgttgttgaaggaggcttttctccagaaggctaaatcccacacccctttgggggtttacgcgcatctttgtctgttctgtcgtgtattaatgtaaggacccacgcaccacacattgttcgcggtgtgggggttcaatcaacaaaaaccacggtgggaaacaaaaagaagaggctgcgctgtggagactgggtccaagaggtttcacaccacagattgctcgccccgcaaaagtctcacgaagggcttatatggtaatatttatcccctatacctgccacccccaccttcttaaatcacatggtggaagaaacggtgttcagagactgtgttgtttcaacatgggcacacttaagtttagtagaattaaagactgggtaatgataaccacaagcgcttcgttaatccccttcagaaggaaaggagaaatttttgtgggaccaaccttgggttttttttttggggttggcaattttaagttaattgatttttaaaaccgagacttttttatgggaacaaattggccccaaatttttcccaagaatttggaaccccatttaaaaaatttaatgaga

SEQ ID NO: 618446 - DNA, 467 bp, Homo sapiens
cccaaggtcagcacccccttcataggttggtacccctgcaatttcaatttccgaggcaatcgcccagatatccctaacccccaagatggcaaagagacaaaagcagccgatcccccagttgagaatttgtccgctcccgaggttgagcagggcggggttgagtaaacgccggcttaccatttctcccatcatccggtttagtcatcccacaagaagaaatatgaaattccagcaataagaaatgaacaaaagattggggctgaagccctaaagggcttgctttttgcccgttgcccaaataaatagaactattggcattatttatgcggcagggggtttttattatttttcccaaaaaaggttttttttgggtaaaaccaaaggggttttttaaaaaagccgggtttttcccaaaccccctttaaaggtttttaaattgtttcaaatcgggccaagttgagattttt

SEQ ID NO: 618447 - DNA, 266 bp, Homo sapiens
atctcctgaaaggaaaagaacccctccccattcaacgttacaaagtcacaaggggcccggtgcagtggatcacagccagcacatcctagcacttgaggagagcaagatagagcggctcattagaagtcaggagtcacacggatctaacaaataaaaaagatcaaatagtgcaccagaagtccctgtacaaacctttaagacttcttccccttcaaatggaggcagacattacaaacggataagcatggatatatgttctctctctc

SEQ ID NO: 618448 - DNA, 414 bp, Homo sapiens
  misc_feature (71)..(71): n is a, c, g, or t
tgggctggtaaactggccacctgaacaccgctgaacttggctaaatgctttgcagaaagtgatgaccttanaccacaaccagcttctcccaggtcatatgtgccttacctccagagagtctttttttttttttctgagatggagtttcactcttgttgcccaggctggagtgcaatagcatgatctcggctcactgcaacctccgcctcctgggttcaagagattctcctgcctcagcctccccagtagctgggattaacaggctcatgccaccatgcccagctaatttttgtattattattattgttttttagtagagacggggtttcaccatgttggccaggctagtcacgaactcctaacctcaggtgatccacccacctctgcctcccaaagtgctgggattacaggcat

SEQ ID NO: 618449 - DNA, 194 bp, Homo sapiens
atgccgtgtgtcctgtatcatcattagcgcatccctgggagtcgtgtggttgtatatgagcgtgagggtatagctggtgccgatgtatgagccccagagctgggacagggccggccggggctccctcctgcactcctacacgcccaagatggctgtgatcccctctactccgccgaactcgcttatattacgtt

SEQ ID NO: 618450 - DNA, 152 bp, Homo sapiens
acccaacagtcatgcagggatgccttctcatgagcatccaggtgagtggcacttgttctctcaagcaagtgaggagtctaagtgcgtgatacctgcttcgggtgataatgcttgaagtgaggttgttcccaggcataggccttcttcctccg

SEQ ID NO: 618451 - DNA, 971 bp, Homo sapiens
cactggagagtgtcatggaggcctacgagcaggtcccaaaagggaccccgtgcaagctgaaaggcgtcgccagcagctgggagtgcaccaagcggcaagaagcaacacacagcacaggcacacacagcacaacagcgcaacactccgtggcacagccacatgggcaacgcagcaaacacagcacaccgcaggcaggcagcacagcgtgccgctggccctggaaccacagcgtgcaccctcgtgaccccagggcggaacattccgcagcacacacatgccaggcagcacagcgcgcacaatcggcaacaggcatccgtaacagcacaggccatcctaaacaaccgacaccaatgcaacgcagcagtgcgcagcgcacttccaagccagcaccaccctggcacaacacctccactgcgcagccattcacgcaccattccgcaacagtccagctcgcgcaacgcacagtcagccagcacatgcacccccaagtactggacgccagacatcagacggagtatcagccaacaacggccacaactcgagcgggtctcgtcgtcgtcgtactccattcagggtatactatcttggaacacacttggcttacaacaacacaccatctgcatcattctcggcctaaccaggacgtggcattattcgcaagacctgtggtacggcctaccatttctggcaaacttgcatctaacacgtaaagactcgatcctaggtacctccaggttcaagggcctttcctttgggccaacaatacccgacagattacaccccattaaccgtaccgggcattggacaacgcctttcctaaacgtcttatcccagcaggcgtaccagacccattcgatgtgatctgagagtcaatgtccaacactggtataaaccccgcagtagccactgtaaacgcctctgcaggcccgaccaagctgtattctccgtggccgcagcaccaccccgaggga

SEQ ID NO: 618452 - DNA, 147 bp, Homo sapiens
agcacatgtaggcccaaaaaacaggaatgcagacaacatgcatcccctgggtccataagttacatgtgtttttttagggtccccgttgttttgatgttattcatggaaacccttttggggtaaaaacagtcccttaattccttggca

SEQ ID NO: 618453 - DNA, 492 bp, Homo sapiens
tagtcccaatttctcctgtactgggagaaacctcctagcagagatcgagaggatcagcgtcatacagataagctccaactggacatctaggatgggtgccgctctgggacaaagcttccagagagaaggaacaggcagcaatctttgctgttctgcagactcagctggtgatacccaggcaaacaggatctggagtggacctccagaaaactccaacagacctgcagcagaggggcctgattgttagaaggaaaactaataaacagaaagggatagtaagaacatcaacaaaaagcacgtccacaccaaaaccccatccgaaggtcaccaatgtcaaagaccaaaggtagatacatccacaaagatggggagaaaccagcgcaaaaaggctgaaacttgcaaaaccagaatgtctcttctcctccaaaggttcacaactcaacaacaagggaacaaaactggacagagaatgagtttgacaaattgacagac

SEQ ID NO: 618454 - DNA, 405 bp, Homo sapiens
ctgatgtttaggccactggcgataggtgatagtctcaccgctggtgatggtctcaccacttggcaatagtctcactgcttggaatagtctcaccagctggtgataggtgacagtctcttcaaagtcaccaaaattagtacggaattgatgggttcttggcctcactgacttcaagaatgaagttgcagacccttgcggtgagtattacggttcttaaagatggtgtgtccagagttgttcattcctctcggtgcattcgtggtcttgctggccccaggagtgaagttgcagaccttcgcggtgagtgttacagctcttaaaggtggcacggacccaacgagtgagcagcagcaggatttatcatgaagaccaaaagaacaaagcttccacagcgtggaagggaac

SEQ ID NO: 618455 - DNA, 957 bp, Homo sapiens
  misc_feature (23)..(23): n is a, c, g, or t
  misc_feature (146)..(146): n is a, c, g, or t
  misc_feature (151)..(151): n is a, c, g, or t
  misc_feature (171)..(171): n is a, c, g, or t
  misc_feature (196)..(196): n is a, c, g, or t
  misc_feature (253)..(253): n is a, c, g, or t
  misc_feature (320)..(320): n is a, c, g, or t
  misc_feature (944)..(944): n is a, c, g, or t
ggcgtgtaccagaatttatcctngaaaagataccagcccatgttgggtattgatggtctctgtgctactccatcactggaaggctttgaagaaggtgaatatgaaactcctggtgaatataagagaaagagaagcacaaagtgtangagcntttgttagtggagcataaancaaatttaaaccttaacagaacacnttctattacacctcaagaagaaagaattgcccagctatctgaatcaccagtgactcntaccccaaatgctaagcgtacatgccagtagattctctcatgtttctcagtagcaaaggaagtccancaagcacaattttaactttgagctgttgccaagtaatctcttcaatagcagttctacaccggtatcaggtgtgccaaggcgaagtaaaagaattgcaggcaaaaaagtttgcagagtggaatcaggaaaagcaggctgcttttctcctaaaatcagccataaagaaaaggttcgaagatctctgcgtttgaaattcaatctagggaaaaatggcagagaagtaaatggatgttctggtgtcaatagatatgaaagtgttggttggcgacttgcaaatcaacaaagtttaaaaaatcgaattgaatctgtaaaaacaggtttgctttttagcccagatgttgatgaaaagttaccaaagaaaggtacatttacatactactgttagagttttacctaaaaatcctgctttagttgcttttttaatggcaaaacatattaattaatttactgttctagagattaaaagttcatgtttgaatagtgaaaatattagaattggcaatgtatttttctatcaacaattgggaaatgcttatacatgtaaatatgaaaatgtttgacattcttatgttaaaaattatttcttgtaacacaaatactttattagaattaaatgcttagtgncttaaaaaaaaaa

SEQ ID NO: 618456 - DNA, 3686 bp, Homo sapiens
  misc_feature (23)..(23): n is a, c, g, or t
  misc_feature (146)..(146): n is a, c, g, or t
  misc_feature (151)..(151): n is a, c, g, or t
  misc_feature (171)..(171): n is a, c, g, or t
  misc_feature (196)..(196): n is a, c, g, or t
  misc_feature (253)..(253): n is a, c, g, or t
  misc_feature (320)..(320): n is a, c, g, or t
ggcgtgtaccagaatttatcctngaaaagataccagcccatgttgggtattgatggtctctgtgctactccatcactggaaggctttgaagaaggtgaatatgaaactcctggtgaatataagagaaagagaagcacaaagtgtangagcntttgttagtggagcataaancaaatttaaaccttaacagaacacnttctattacacctcaagaagaaagaattgcccagctatctgaatcaccagtgactcntaccccaaatgctaagcgtacatgccagtagattctctcatgtttctcagtagcaaaggaagtccancaagcacaattttaactttgagctgttgccaagtaatctcttcaatagcagttctacaccggtatcagttcacatcgatacaagctcagaagggtcatctcagagttcactctctcctgtactcattggtggaaaccatttgatcactgcaggtgtgccaaggcgaagtaaaagaattgcaggcaaaaaagtttgcagagtggaatcaggaaaagcaggctgcttttctcctaaaatcagccataaagaaaaggttcgaagatctctgcgtttgaaattcaatctagggaaaaatggcagagaagtaaatggatgttctggtgtcaatagatatgaaagtgttggttggcgacttgcaaatcaacaaagtttaaaaaatcgaattgaatctgtaaaaacaggtttgctttttagcccagatgttgatgaaaagttaccaaagaaaggttcagaaaagatcagtaagtctgaggaaaccttactaactccagagcgactagttggaacaaattaccggatgtcttggacaggacctaataattcaagttttcaagaagtagatgcaaatgaagcttcttcaatggtggaaaatcttgaggtagaaaactctttggagcctgatattatggtagaaaagtcacctgctacttcatgtgaactcaccccttccaatttaaacaataagcataatagcaacataacaagtagccctcttagcggggatgaaaataacatgaccaaagagactttggtgaaagttcaaaaagcgttttctgaatctggaagtaatcttcacgcattgatgaatcagaggcagtcatcagtaactaatgtggggaaagtaaaattaactgaaccatcttatttagaagatagcccagaggaaaatctatttgaaactaatgatttgactatagtagaatcaaaggagaaatatgaacaccacactggtaaaggtgaaaaatgtttttcagagagggacttttcaccccttcaaactcaaacatttaatagagaaacaactataaaatgttattcaactcagatgaagatggaacatgaaaaagacattcattcaaatatgccaaaagattatttaagcaagcaagaattctccagtgatgaagaaataaagaaacagcagtccccaaaggataaactaaataataaattaaaagagaatgagaatatgatggaaggtaacttaccgaagtgtgcagcacatagcaaggacgaggctagatcctctttctcacagcagagtacatgtgttgtaacaaacttgtcaaaacctaggcctatgagaattgctaaacagcagtcattggaaacatgtgagaaaacagtttctgaaagttcacaaatgacagaacatagaaaggtttctgatcacatacagtggtttaacaagctttctttaaatgaaccaaatagaataaaagtcaagtcacctcttaagtttcagcgtactcctgttcgtcagtccgtcagaagaattaattctttgttggagtatagcagacaacctacagggcataagttggcgagtcttggtgatacagcttctcctttggtcaaatcagtgagctgtgacggtgctctttcctcttgtatagaaagtgcatcaaaagattcctctgtttcatgtatcaaatcaggtcctaaagaacagaagtccatgtcatgtgaagagtcaaatattggtgcaatttcaaagtcaagcatggagttaccctcgaaatctttcttaaagatgaggaagcacccagattcagtgaatgcttctcttaggtctactacagtttataaacagaagatcttatctgatggccaagttaaggttcccttggatgatctgactaatcatgatatagtaaaaccagttgtaaataacaacatgggcatttcttctgggataaataacagggtccttaggagaccatcagaaagaggaagggcctggtacaaaggttctccaaaacatcctatcggaaaaactcaattactaccaacaagtaaacctgtagatttgtaattggtaaatgttatacttgtcattaatgtaaataaagtgagtaattggtatgacttgcaggatgatgtacatgttagtttgtagctcaggatgattgttaagcaatagatttgctctattgaaaatgtttcatttttttcactgtacaagcaacttagatttttatttgtacaaattacttctttgtttttcttaatgatggcaatttttaaactttaattttattgtgatctcttaaagcagaggttagactttacctttctgactctgtcgtccaggctggagtgcagtggcgcaatctcactgcaagctccacttcctgggtcatgccattttcctgcctcagcctcccgagtagctgggactacaggtgcccgccaccacgcccagctaattttttgtattttcagtagagacggtttcaccgtgttagccaggatggtctcgatctcctgaccttgtgatccgcccgcctcagcctcccaaagtgctgggattacaggcatgagccaccacgcccggctagactttacctttctaaagaaattgtttactggatttataagaagttaatttttgaaaatgacatatttttgtgtgatagaaagaatggagcaagttgtgcctatttcctccaagtcagataaggtttctaaaataaataaatttctagcatataaagggtagagataaactctgcaaatcttatgtctggaattatattaatgtttattgtccttgccaaaattcctagaaattaatttccttcaatagcatcctaaaactctatttttatttggggcagagtaatttcatttatagtgccagtaggtgtaccttgtgttcactcgaactaagaacaatggttaaggcagaataatgactaaaatatgttcatatattatgatgtggaaataattgataacttttaagccatactatgtttttaaagataatttgcacaaacacgtttgtgtctgttctgtccaatatagatttggcaattatttaaagagggataatcttgaaaaaaattaaccaaggtgatttcttatatgtagatgctcgattttggaatttgaaatagtagatgcacctctttaccttttttacttggataaaaacctatgatgattttgtcctgtgtgtaaatgttatttatttagcatagacattaaagataactctctggaaaatgacttgactaaggctctcatgaaattcaaagtgccatttagaacatgcaccaaattgtcaagtaaatctggctaaatttatattttaaattattacaaattacacatcctttgagggaaagagtattatgaacg

SEQ ID NO: 618457 - DNA, 106 bp, Homo sapiens
tttccccccccccccattggggtggccaatttttcgggtttgcccggggttttttttaaaattttttttttttattatttaaattaaacccccccttgggggttta

SEQ ID NO: 618458 - DNA, 627 bp, Homo sapiens
  misc_feature (6)..(6): n is a, c, g, or t
  misc_feature (478)..(478): n is a, c, g, or t
  misc_feature (485)..(485): n is a, c, g, or t
tctttnttggccagttgggggaccagacttcgctcgtactcgtgcgcctcgcttcgcttttcctccgcaaccatgtctgacaaacccgatatggctgagatcgagaaattcgataagtcgaaactgaagaagacagagacgcaagagaaaaatccactgccttccaaagggggggttgaacaggagaagcaagcaggcgaatcgtaatgaggcgtgcgccgccaatatgcactgtacattccacaagcattgccttcttattttacttcttttagctgattaactttgtaagatgcaaagaggttggatcaacgctaaatgactgtgctgcccctttcacatcaaagaactactggcaacgaaggccgcgcctgccttttccatctgtctatctatcttggctggcagggaaggaaagaacttgcatgttgatgaaggaagaagcgggcgtgaagaagtgccgttgctacaacagtgnaatttanagtaaaaccaagctggcccagggcgtcttgtaggattggaagacaattattgagggggacacgttttagatggcccaaaacaccagaaatatttgacatggcccactattttcaataagcaattaaacagtctaaaaacgga

SEQ ID NO: 618459 - DNA, 3686 bp, Homo sapiens
  misc_feature (23)..(23): n is a, c, g, or t
  misc_feature (146)..(146): n is a, c, g, or t
  misc_feature (151)..(151): n is a, c, g, or t
  misc_feature (171)..(171): n is a, c, g, or t
  misc_feature (196)..(196): n is a, c, g, or t
  misc_feature (253)..(253): n is a, c, g, or t
  misc_feature (320)..(320): n is a, c, g, or t
ggcgtgtaccagaatttatcctngaaaagataccagcccatgttgggtattgatggtctctgtgctactccatcactggaaggctttgaagaaggtgaatatgaaactcctggtgaatataagagaaagagaagcacaaagtgtangagcntttgttagtggagcataaancaaatttaaaccttaacagaacacnttctattacacctcaagaagaaagaattgcccagctatctgaatcaccagtgactcntaccccaaatgctaagcgtacatgccagtagattctctcatgtttctcagtagcaaaggaagtccancaagcacaattttaactttgagctgttgccaagtaatctcttcaatagcagttctacaccggtatcagttcacatcgatacaagctcagaagggtcatctcagagttcactctctcctgtactcattggtggaaaccatttgatcactgcaggtgtgccaaggcgaagtaaaagaattgcaggcaaaaaagtttgcagagtggaatcaggaaaagcaggctgcttttctcctaaaatcagccataaagaaaaggttcgaagatctctgcgtttgaaattcaatctagggaaaaatggcagagaagtaaatggatgttctggtgtcaatagatatgaaagtgttggttggcgacttgcaaatcaacaaagtttaaaaaatcgaattgaatctgtaaaaacaggtttgctttttagcccagatgttgatgaaaagttaccaaagaaaggttcagaaaagatcagtaagtctgaggaaaccttactaactccagagcgactagttggaacaaattaccggatgtcttggacaggacctaataattcaagttttcaagaagtagatgcaaatgaagcttcttcaatggtggaaaatcttgaggtagaaaactctttggagcctgatattatggtagaaaagtcacctgctacttcatgtgaactcaccccttccaatttaaacaataagcataatagcaacataacaagtagccctcttagcggggatgaaaataacatgaccaaagagactttggtgaaagttcaaaaagcgttttctgaatctggaagtaatcttcacgcattgatgaatcagaggcagtcatcagtaactaatgtggggaaagtaaaattaactgaaccatcttatttagaagatagcccagaggaaaatctatttgaaactaatgatttgactatagtagaatcaaaggagaaatatgaacaccacactggtaaaggtgaaaaatgtttttcagagagggacttttcaccccttcaaactcaaacatttaatagagaaacaactataaaatgttattcaactcagatgaagatggaacatgaaaaagacattcattcaaatatgccaaaagattatttaagcaagcaagaattctccagtgatgaagaaataaagaaacagcagtccccaaaggataaactaaataataaattaaaagagaatgagaatatgatggaaggtaacttaccgaagtgtgcagcacatagcaaggacgaggctagatcctctttctcacagcagagtacatgtgttgtaacaaacttgtcaaaacctaggcctatgagaattgctaaacagcagtcattggaaacatgtgagaaaacagtttctgaaagttcacaaatgacagaacatagaaaggtttctgatcacatacagtggtttaacaagctttctttaaatgaaccaaatagaataaaagtcaagtcacctcttaagtttcagcgtactcctgttcgtcagtccgtcagaagaattaattctttgttggagtatagcagacaacctacagggcataagttggcgagtcttggtgatacagcttctcctttggtcaaatcagtgagctgtgacggtgctctttcctcttgtatagaaagtgcatcaaaagattcctctgtttcatgtatcaaatcaggtcctaaagaacagaagtccatgtcatgtgaagagtcaaatattggtgcaatttcaaagtcaagcatggagttaccctcgaaatctttcttaaagatgaggaagcacccagattcagtgaatgcttctcttaggtctactacagtttataaacagaagatcttatctgatggccaagttaaggttcccttggatgatctgactaatcatgatatagtaaaaccagttgtaaataacaacatgggcatttcttctgggataaataacagggtccttaggagaccatcagaaagaggaagggcctggtacaaaggttctccaaaacatcctatcggaaaaactcaattactaccaacaagtaaacctgtagatttgtaattggtaaatgttatacttgtcattaatgtaaataaagtgagtaattggtatgacttgcaggatgatgtacatgttagtttgtagctcaggatgattgttaagcaatagatttgctctattgaaaatgtttcatttttttcactgtacaagcaacttagatttttatttgtacaaattacttctttgtttttcttaatgatggcaatttttaaactttaattttattgtgatctcttaaagcagaggttagactttacctttctgactctgtcgtccaggctggagtgcagtggcgcaatctcactgcaagctccacttcctgggtcatgccattttcctgcctcagcctcccgagtagctgggactacaggtgcccgccaccacgcccagctaattttttgtattttcagtagagacggtttcaccgtgttagccaggatggtctcgatctcctgaccttgtgatccgcccgcctcagcctcccaaagtgctgggattacaggcatgagccaccacgcccggctagactttacctttctaaagaaattgtttactggatttataagaagttaatttttgaaaatgacatatttttgtgtgatagaaagaatggagcaagttgtgcctatttcctccaagtcagataaggtttctaaaataaataaatttctagcatataaagggtagagataaactctgcaaatcttatgtctggaattatattaatgtttattgtccttgccaaaattcctagaaattaatttccttcaatagcatcctaaaactctatttttatttggggcagagtaatttcatttatatactatgtttttaaagataatttgcacaaacacgtttgtgtctgttctgtccaatatagatttggcaattatttaaagagggataatcttgaaaaaaattaaccaaggtgatttcttatagtgccagtaggtgtacctgtgtgttcactcgaactaagaacaatggttaaggcagaataatgactaaaatatgttcatatattatgatgtggaaataattgataacttttaagcatgtagatgctcgattttggaatttgaaatagtagatgcacctctttaccttttttacttggataaaaacctatgatgattttgtcctgtgtgtaaatgttatttatttagcatagacattaaagataactctctggaaaatgacttgactaaggctctcatgaaattcaaagtgccatttagaacatgcaccaaattgtcaagtaaatctggctaaatttatattttaaattattacaaattacacatcctttgagggaaagagtattatgaacg

SEQ ID NO: 618460 - DNA, 82 bp, Homo sapiens
agcgagtggggcaggcgcagtcggaagcagtgtacccggcagtgtagcggcggctcctgtacccccggcgcggacctaaagg

SEQ ID NO: 618461 - DNA, 282 bp, Homo sapiens
  misc_feature (10)..(10): n is a, c, g, or t
  misc_feature (177)..(177): n is a, c, g, or t
  misc_feature (221)..(221): n is a, c, g, or t
  misc_feature (249)..(249): n is a, c, g, or t
agaactggtnaaatttttaaaaatgcgaaggaggggaaaagaaattaggaagttgaaaatgtttgttgattattttactaaaattcctggaaatcaagtaatatcattaaagcagatcaaaaaaacctgatagaagtacaaacatagtttacaaaaggttaacaactaaattataangatagccaatagaataaatatgtcacctttcacacatatcagangtatacttaaaacaaagggaagtacacngacaacataatgaaagactgttaagggaacata

SEQ ID NO: 618462 - DNA, 2519 bp, Homo sapiens
  misc_feature (23)..(23): n is a, c, g, or t
  misc_feature (146)..(146): n is a, c, g, or t
  misc_feature (151)..(151): n is a, c, g, or t
  misc_feature (171)..(171): n is a, c, g, or t
  misc_feature (196)..(196): n is a, c, g, or t
  misc_feature (253)..(253): n is a, c, g, or t
  misc_feature (320)..(320): n is a, c, g, or t
ggcgtgtaccagaatttatcctngaaaagataccagcccatgttgggtattgatggtctctgtgctactccatcactggaaggctttgaagaaggtgaatatgaaactcctggtgaatataagagaaagagaagcacaaagtgtangagcntttgttagtggagcataaancaaatttaaaccttaacagaacacnttctattacacctcaagaagaaagaattgcccagctatctgaatcaccagtgactcntaccccaaatgctaagcgtacatgccagtagattctctcatgtttctcagtagcaaaggaagtccancaagcacaattttaactttgagctgttgccaagtaatctcttcaatagcagttctacaccggtatcagttcacatcgatacaagctcagaagggtcatctcagagttcactctctcctgtactcattggtggaaaccatttgatcactgcaggtgtgccaaggcgaagtaaaagaattgcaggcaaaaaagtttgcagagtggaatcaggaaaagcaggctgcttttctcctaaaatcagccataaagaaaaggttcgaagatctctgcgtttgaaattcaatctagggaaaaatggcagagaagtaaatggatgttctggtgtcaatagatatgaaagtgttggttggcgacttgcaaatcaacaaagtttaaaaaatcgaattgaatctgtaaaaacaggtttgctttttagcccagatgttgatgaaaagttaccaaagaaaggttcagaaaagatcagtaagtctgaggaaaccttactaactccagagcgactagttggaacaaattaccggatgtcttggacaggacctaataattcaagttttcaagaagtagatgcaaatgaagcttcttcaatggtggaaaatcttgaggtagaaaactctttggagcctgatattatggtagaaaagtcacctgctacttcatgtgaactcaccccttccaatttaaacaataagcataatagcaacataacaagtagccctcttagcggggatgaaaataacatgaccaaagagactttggtgaaagttcaaaaagcgttttctgaatctggaagtaatcttcacgcattgatgaatcagaggcagtcatcagtaactaatgtggggaaagtaaaattaactgaaccatcttatttagaagatagcccagaggaaaatctatttgaaactaatgatttgactatagtagaatcaaaggagaaatatgaacaccacactggtaaaggtgaaaaatgtttttcagagagggacttttcaccccttcaaactcaaacatttaatagagaaacaactataaaatgttattcaactcagatgaagatggaacatgaaaaagacattcattcaaatatgccaaaagattatttaagcaagcaagaattctccagtgatgaagaaataaagaaacagcagtccccaaaggataaactaaataataaattaaaagagaatgagaatatgatggaaggtaacttaccgaagtgtgcagcacatagcaaggacgaggctagatcctctttctcacagcagagtacatgtgttgtaacaaacttgtcaaaacctaggcctatgagaattgctaaacagcagtcattggaaacatgtgagaaaacagtttctgaaagttcacaaatgacagaacatagaaaggtttctgatcacatacagtggtttaacaagctttctttaaatgaaccaaatagaataaaagtcaagtcacctcttaagtttcagcgtactcctgttcgtcagtccgtcagaagaattaattctttgttggagtatagcagacaacctacagggcataagttggcgagtcttggtgatacagcttctcctttggtcaaatcagtgagctgtgacggtgctctttcctcttgtatagaaagtgcatcaaaagattcctctgtttcatgtatcaaatcaggtcctaaagaacagaagtccatgtcatgtgaagagtcaaatattggtgcaatttcaaagtcaagcatggagttaccctcgaaatctttcttaaagatgaggaagcacccagattcagtgaatgcttctcttaggtctactacagtttataaacagaagatcttatctgatggccaagttaaggttcccttggatgatctgactaatcatgatatagtaaaaccagttgtaaataacaacatgggcatttcttctgggataaataacagggtccttaggagaccatcagaaagaggaagggcctggtacaaaggttctccaaaacatcctatcggaaaaactcaattactaccaacaaggtgaaaccccgtctctactaaaaatacaaaaattagctaggcgtggtggcgcactcttgtagtcccagctatttgggaggctgaggcaggagaatcacttgaactcaggaggcggaggttgcggtgagccgagatcatgccactgcaccccagcgcctggctacagagtgagactttgtctca

SEQ ID NO: 618463 - DNA, 427 bp, Homo sapiens
  misc_feature (21)..(21): n is a, c, g, or t
  misc_feature (37)..(37): n is a, c, g, or t
  misc_feature (56)..(56): n is a, c, g, or t
  misc_feature (62)..(62): n is a, c, g, or t
  misc_feature (100)..(100): n is a, c, g, or t
  misc_feature (108)..(108): n is a, c, g, or t
cccaaattcgattgaattccntaatattgctaggcantgttttaaaaacggggatnaaatgnaaaacaaaacacaaaacaaaaagtcttcagtccctttnaaaaaatnaaacagcttcctgacacatagttcaccctaccgtagagttcaccatttaaaacgtagcggtgcctcacgcctgtaatcccagcactttgggaggccgaggcgggtggatcacgaggtcaggagatcaagaccgtcctggctaacacggtgaaaccccgtctccactaaaaatacaaaaaattagccgggcgtggtggcgggagcctgtagtcccagctacttgggaggctgaggcaggaggatggtgtgaacccgggaggtggagcttgcagtgagccgagattgcgccactgcactccagcctgggcgagagagctag

SEQ ID NO: 618464 - DNA, 619 bp, Homo sapiens
  misc_feature (499)..(499): n is a, c, g, or t
  misc_feature (572)..(572): n is a, c, g, or t
taagtttgggggtggaatatcagtatgtgaatgaataagggcgaaaactccataaagccagacaaaaaaaaacccaattaccggggaaagaacaaggagggcatgccaaataattctcacatcttacacagagccaggaactattcaagtttctaccagccaaagaacggggacgtcttggaacacatgtgggacatgggctagagaccccagaacagctattcacagagtgaaaccacacggagacaaataacgggtccgggaagccagtggcgagggtgcgtgcccataggcccactcgggaggctgaggcctgagcattactggagaccaggagttcaaggccagccggggcaacatagaaggaccctgtctctaaaagaaagagaaccgggatatgagggaacggcttttaaaggtagttaagggaggtgcctgggagaactatttatgcaaaattagggctacagtctcagtagaagtccacagtagagaaggngttatccaaaaggtttggaggaggctgagacaggcagaccatttgagcccaggtgctggagacctgccagggnaacatagtgagacccgtctccaagggtaccggctcgatcgacgcaga

SEQ ID NO: 618465 - DNA, 2364 bp, Homo sapiens
  misc_feature (23)..(23): n is a, c, g, or t
  misc_feature (146)..(146): n is a, c, g, or t
  misc_feature (151)..(151): n is a, c, g, or t
  misc_feature (171)..(171): n is a, c, g, or t
  misc_feature (196)..(196): n is a, c, g, or t
  misc_feature (253)..(253): n is a, c, g, or t
  misc_feature (320)..(320): n is a, c, g, or t
  misc_feature (2076)..(2076): n is a, c, g, or t
  misc_feature (2098)..(2098): n is a, c, g, or t
  misc_feature (2100)..(2100): n is a, c, g, or t
  misc_feature (2104)..(2104): n is a, c, g, or t
  misc_feature (2122)..(2122): n is a, c, g, or t
  misc_feature (2154)..(2154): n is a, c, g, or t
  misc_feature (2171)..(2173): n is a, c, g, or t
  misc_feature (2185)..(2185): n is a, c, g, or t
  misc_feature (2215)..(2215): n is a, c, g, or t
  misc_feature (2225)..(2225): n is a, c, g, or t
  misc_feature (2239)..(2239): n is a, c, g, or t
  misc_feature (2251)..(2252): n is a, c, g, or t
  misc_feature (2292)..(2292): n is a, c, g, or t
  misc_feature (2294)..(2295): n is a, c, g, or t
  misc_feature (2310)..(2310): n is a, c, g, or t
  misc_feature (2320)..(2320): n is a, c, g, or t
ggcgtgtaccagaatttatcctngaaaagataccagcccatgttgggtattgatggtctctgtgctactccatcactggaaggctttgaagaaggtgaatatgaaactcctggtgaatataagagaaagagaagcacaaagtgtangagcntttgttagtggagcataaancaaatttaaaccttaacagaacacnttctattacacctcaagaagaaagaattgcccagctatctgaatcaccagtgactcntaccccaaatgctaagcgtacatgccagtagattctctcatgtttctcagtagcaaaggaagtccancaagcacaattttaactttgagctgttgccaagtaatctcttcaatagcagttctacaccggtatcagttcacatcgatacaagctcagaagggtcatctcagagttcactctctcctgtactcattggtggaaaccatttgatcactgcaggtgtgccaaggcgaagtaaaagaattgcaggcaaaaaagtttgcagagtggaatcaggaaaagcaggctgcttttctcctaaaatcagccataaagaaaaggttcgaagatctctgcgtttgaaattcaatctagggaaaaatggcagagaagtaaatggatgttctggtgtcaatagatatgaaagtgttggttggcgacttgcaaatcaacaaagtttaaaaaatcgaattgaatctgtaaaaacaggtttgctttttagcccagatgttgatgaaaagttaccaaagaaaggttcagaaaagatcagtaagtctgaggaaaccttactaactccagagcgactagttggaacaaattaccggatgtcttggacaggacctaataattcaagttttcaagaagtagatgcaaatgaagcttcttcaatggtggaaaatcttgaggtagaaaactctttggagcctgatattatggtagaaaagtcacctgctacttcatgtgaactcaccccttccaatttaaacaataagcataatagcaacataacaagtagccctcttagcggggatgaaaataacatgaccaaagagactttggtgaaagttcaaaaagcgttttctgaatctggaagtaatcttcacgcattgatgaatcagaggcagtcatcagtaactaatgtggggaaagtaaaattaactgaaccatcttatttagaagatagcccagaggaaaatctatttgaaactaatgatttgactatagtagaatcaaaggagaaatatgaacaccacactggtaaaggtgaaaaatgtttttcagagagggacttttcaccccttcaaactcaaacatttaatagagaaacaactataaaatgttattcaactcagatgaagatggaacatgaaaaagacattcattcaaatatgccaaaagattatttaagcaagcaagaattctccagtgatgaagaaataaagaaacagcagtccccaaaggataaactaaataataaattaaaagagaatgagaatatgatggaaggtaacttaccgaagtgtgcagcacatagcaaggacgaggctagatcctctttctcacagcagagtacatgtgttgtaacaaacttgtcaaaacctaggcctatgagaattgctaaacagcagtcattggaaacatgtgagaaaacagtttctgaaagttcacaaatgacagaacatagaaaggtttctgatcacatacagtggtttaacaagctttctttaaatgaaccaaatagaataaaagtcaagtcacctcttaagtttcagcgtactcctgttcgtcagtccgtcagaagaattaattctttgttggagtatagcagacaacctacagggcataagttggcgagtcttggtgatacagcttctcctttggtcaaatcagtgagctgtgacggtgctctttcctcttgtatagaaagtgcatcaaaagattcctctgtttcatgtatcaaatcaggtcctaaagaacagaagtccatgtcatgtgaagagtcaaatattggtgcaatttcaaagtcaagcatggagttaccctcgaaatctttcttaaaaggntggaggggaagccacccccagngntccnaggtggaaatgccttccncccttaaggggcctaaccaaacaaggtttttntaaaacccaggggaggnnncctttaaccctnggattggggcccaaaagggttaaagggggncccccctttngggggttgggcccntgggcccaaaanncccatggggttttagggaaaaaacccccaaggttgggaanannaaccaaccatggggngaatttcctncctggggggaaaaaaaaccaggggcccctaggggggcccaccca

SEQ ID NO: 618466 - DNA, 945 bp, Homo sapiens
ctggatacgcactccacatgtcgctatttgtattttatagagacgggttcacttcctcagctgttcaactccgctcagtgatccaccacctcgcctcccgaagtgctggactacaggcatgagccaccacgcccggctagactttacctttctaaagaaattgtttactggatttataagaagttaatttttgaaaatgacatatttttgtgtgatagaaagaatggagcaagttgtgcctatttcctccaagtcagataaggtttctaaaataaataaatttctagcatataaagggtagagataaactctgcaaatcttatgtctggaattatattaatgtttattgtccttgccaaaattcctagaaattaatttccttcaatagcatcctaaaactctatttttatttggggcagagtaatttcatttatagtgccagtaggtgtaccttgtgttcactcgaactaagaacaatggttaaggcagaataatgactaaaatatgttcatatattatgatgtggaaataattgataacttttaagccatactatgtttttaaagataatttgcacaaacacgtttgtgtctgttctgtccaatatagatttggcaattatttaaagagggataatcttgaaaaaaattaaccaaggtgatttcttatatgtagatgctcgattttggaatttgaaatagtagatgcacctctttaccttttttacttggataaaaacctatgatgattttgtcctgtgtgtaaatgttatttatttagcatagacattaaagataactctctggaaaatgacttgactaaggctctcatgaaattcaaagtgccatttagaacatgcaccaaattgtcaagtaaatctggctaaatttatattttaaattattacaaattacacatcctttgagggaaagagtattatgaacg

SEQ ID NO: 618467 - DNA, 894 bp, Homo sapiens
cagcgtggaggtctatctcgacgtgtgatccgccgccctcagcctcccaaaaggcgggattacaggcatgagccaccacgcccggctagactttacctttctaaagaaattgtttactggatttataagaagttaatttttgaaaatgacatatttttgtgtgatagaaagaatggagcaagttgtgcctatttcctccaagtcagataaggtttctaaaataaataaatttctagcatataaagggtagagataaactctgcaaatcttatgtctggaattatattaatgtttattgtccttgccaaaattcctagaaattaatttccttcaatagcatcctaaaactctatttttatttggggcagagtaatttcatttatagtgccagtaggtgtaccttgtgttcactcgaactaagaacaatggttaaggcagaataatgactaaaatatgttcatatattatgatgtggaaataattgataacttttaagccatactatgtttttaaagataatttgcacaaacacgtttgtgtctgttctgtccaatatagatttggcaattatttaaagagggataatcttgaaaaaaattaaccaaggtgatttcttatatgtagatgctcgattttggaatttgaaatagtagatgcacctctttaccttttttacttggataaaaacctatgatgattttgtcctgtgtgtaaatgttatttatttagcatagacattaaagataactctctggaaaatgacttgactaaggctctcatgaaattcaaagtgccatttagaacatgcaccaaattgtcaagtaaatctggctaaatttatattttaaattattacaaattacacatcctttgagggaaagagtattatgaacg

SEQ ID NO: 618468 - DNA, 309 bp, Homo sapiens
attgctctatctcttgctcatccctgtgctcctcctcctccgggcaacaaacaggcgatcggccggcgagcgagccgcagcggacaaccatgggggccgtcccctcccttcgcctccgaacaagctccctctcatcggccacctgcacctggtcggccccgacccgcacgtctccctcgccgccctcgccgccaagcacggcgacggcggcctcatgctcctccgcctcgggcagacgcgcgccctcgtcgtctcctccccgcgcgccgccgaggcggtcctgcgcacgcacgaccacatcttcgcctc

SEQ ID NO: 618469 - DNA, 1041 bp, Homo sapiens
  misc_feature (23)..(23): n is a, c, g, or t
  misc_feature (146)..(146): n is a, c, g, or t
  misc_feature (151)..(151): n is a, c, g, or t
  misc_feature (171)..(171): n is a, c, g, or t
  misc_feature (196)..(196): n is a, c, g, or t
  misc_feature (253)..(253): n is a, c, g, or t
  misc_feature (320)..(320): n is a, c, g, or t
  misc_feature (1028)..(1028): n is a, c, g, or t
ggcgtgtaccagaatttatcctngaaaagataccagcccatgttgggtattgatggtctctgtgctactccatcactggaaggctttgaagaaggtgaatatgaaactcctggtgaatataagagaaagagaagcacaaagtgtangagcntttgttagtggagcataaancaaatttaaaccttaacagaacacnttctattacacctcaagaagaaagaattgcccagctatctgaatcaccagtgactcntaccccaaatgctaagcgtacatgccagtagattctctcatgtttctcagtagcaaaggaagtccancaagcacaattttaactttgagctgttgccaagtaatctcttcaatagcagttctacaccggtatcagttcacatcgatacaagctcagaagggtcatctcagagttcactctctcctgtactcattggtggaaaccatttgatcactgcaggtgtgccaaggcgaagtaaaagaattgcaggcaaaaaagtttgcagagtggaatcaggaaaagcaggctgcttttctcctaaaatcagccataaagaaaaggttcgaagatctctgcgtttgaaattcaatctagggaaaaatggcagagaagtaaatggatgttctggtgtcaatagatatgaaagtgttggttggcgacttgcaaatcaacaaagtttaaaaaatcgaattgaatctgtaaaaacaggtttgctttttagcccagatgttgatgaaaagttaccaaagaaaggtacatttacatactactgttagagttttacctaaaaatcctgctttagttgcttttttaatggcaaaacatattaattaatttactgttctagagattaaaagttcatgtttgaatagtgaaaatattagaattggcaatgtatttttctatcaacaattgggaaatgcttatacatgtaaatatgaaaatgtttgacattcttatgttaaaaattatttcttgtaacacaaatactttattagaattaaatgcttagtgncttaaaaaaaaaa

SEQ ID NO: 618470 - DNA, 1151 bp, Homo sapiens
taacaaccagtcatcaacagacatttatggaactcctgatgtgtgccaggccaggccccagggaggagcacacagaggtataaaattaaagtccgggcccttgaggaacttcgggaatggatctggaggaaaaaaaaagtagggtgggccagaaagctcttcgtgtacaatcccgaagggctatactcccctactctcggtggggatctcgaggaaaagttggggagagcccagaaagaggggttacctatgtccaggtgatccaagaacataccagtgccacgaggctacacttgctaccaagcacagtggtgccagaagtttccaccgcacaatataccgagggacccacgtgtgttaccgagcaccacccagaggggtgcccacttagtggtgctccaccatgcgtggggtgggacataccgagtgctggcagacagtgcccaattagtgcagcacaataagcggccacaaggccgccaccacagtgcggcacaacaacagactaccaaatactcgcagcaaaagaatacaacggggcagcaaacgaaagaaaccagcggagcgacacaaaccgcgccaagaggacacatcactacaaagaagcagctacaacaacagagcgaagaagcagcagacaagaacaacaatagacacacacaccaaaacatagcagcaccgcaagcacacagcaacaactacaccaacacgaaagcaacaacactactagcaacaccagcacacacccacaacaacacacggcgacacgcgccgacaacagaacaccacccaaaacgagagacggagcaacaccaccatcaaaccaaacagcacaacacacaccacaccatagaaacaaagacgacgagcaagacacaacaacaacacccacacactgcgcaacaaagcaatagaaaccagagagcgagcagacaacacacaagagaagagacaagcaccctaaagcaacaacgcagcgaatgacaaaaaacacacacagcacccaaagaggaaataaggacaccaacagcacagacgaatcaaaaaagggaataagacgcagcccacaatcacacaacacacaagacggacacaagaaaaagagagaagagataatcccacacacagaagagcaaacacacaaacaataa

SEQ ID NO: 618471 - DNA, 114 bp, Homo sapiens
gtagtcttacagctgtgttaccgttaaaggttttttttttaatatgtattaaatcaattaatcactgttaaaagctttgaatatctgcaatcttggccaaggtacttttatttg

SEQ ID NO: 618472 - DNA, 409 bp, Homo sapiens
  misc_feature (189)..(189): n is a, c, g, or t
actcccggagggggttcgatcctctgaagcttgagatctatctcaccgacgaagacttcgagtttgcactagacatgacgagggatgaatacaacgccctgcccgcctggaagcaggtgaacctgaagaaaagcaaaaggcctgttctgagttgggagacggcaaaagagcctacgggtcacgtgcaanaacaccactttaccagggaaattgggaatatattttggggctcgggtttttcacaaaggatttttcaatcagaggtttcaggaccctacattgttaaaggtactcctttttcccgaggtggtgattttgtaaatgtcaagggacctcttttggaacttctttcaccattcagggggtgtaggattaataaaggaccttttatggcactcagcggacgcct

SEQ ID NO: 618473 - DNA, 627 bp, Homo sapiens
  misc_feature (36)..(36): n is a, c, g, or t
  misc_feature (38)..(38): n is a, c, g, or t
  misc_feature (583)..(583): n is a, c, g, or t
tgagattattcagctagcgttagggggcagcgtgtngncccacgccctcaacgcctctgtctggggcgtcggctgctggttttgtgtccacacaggaagacagaattagggaacttgctccccacggcatgattcaacaggatgagagacgcaggcacggatgtaggaggtggtggtgctgttgatctcattcaggagagcccaggcgttggggagccccgtgacgccggtgttccctcccgcgtggatgggcaggggctgaacgtgagtctccatggctcttctcgggccaagcccatctccaggacatacctttctcctgtcgcttgttagacgctgtgcactgaagacctagccttacccaaagggaagtcttgccttgggtcttggctggagggtggtgatacctcaggtcctggaatggcccctggtagtatctttgctggcctgggggctttggatggttcaccgtctaacaatgtgatttaaggtgagggtcttggaacaagtgagatcagttccaacttccaggagggagcctgagaaatagcagatagatcccaaatactctctgtctgtctgnctggctatctatctatctatctatctatctatctatcatctatc

SEQ ID NO: 618474 - DNA, 649 bp, Homo sapiens
ggcgcctaatctcaggtggtccacctcgagaccccttgagcaccaacacctgagtccccgcgacgcggcccgttattcggctgccgactagatgatgaagagaaacaatcatgaaccaggaaaaactcgccaaactgcaggcacgacagtgcgcattggtgggaaagggaactgctcgcagaaagaagaaggtggttcatagaatcagtgcacagcagatgacaaagaaacttcagttctccttaaagaagttaggggtagaagaatagtctcgtggtattgaagaggtgaagtatgtttacgaaagccaaggaacagtgatccgactttaacgaaccgctaaagttcaggcgatctctggcgagcgaacacttgcaccattacaggccatgctgagacaaagcagctgagagaaatgctacccagcatcttaaaccagcttgagtgcggactcgtctgactagttcaacggagactggccgaagctctgcaccaaacaactctgtggatggaacaagcaccacttgctacctgggagcaggcatgcactgactgactgacagttccacgatctcgtggaccactcactgcatgcggcttccacgaatgagcgcacacctgaccttgacgtcaactttctgcaccgata

SEQ ID NO: 618475 - DNA, 136 bp, Homo sapiens
cgctatatacactgcaagaacatacccgattgttataccatcgacactataaagaaactgcattcactaatgtgaacgctaaaccgttatacaacatcatgacaggataaatttcacatgtaacaatattaacctt

SEQ ID NO: 618476 - DNA, 107 bp, Homo sapiens
ggtacactggggcgaggtcggaaagcagaggcctgagaagccagaggcaggtggtatgagagggtggaaagtgagcagcgggtctgggcttggagctcgcacacgct

SEQ ID NO: 618477 - DNA, 237 bp, Homo sapiens
tacagcacgtacgcacacagacatggggaactataggatagccgtcacaccgagatagcagcaacgacgtacacgggccatagtacgacgtaacacatataaatagtacacacagacgcggagataggcatacacacagacggtgctagcatgtaacacacagacacagagacaacacacaccatgacaacgacacctaatagataataggcaccaacatacacataggcacgcgac

SEQ ID NO: 618478 - DNA, 460 bp, Homo sapiens
atttatgtgggctcttacatctacgtctgtctatcctgtcttgaacgtgatctaataatgggctctactccatgtgtaaagatatgtgctactatatccttctagaatgggattttgagctagacctggatttagagcgagtatgggaacgagatcgaccgccttttctttcattgcacatttccagactctggttcaatagctgctgagataaatgactgagcttctcgtactcgcttcattacttcttctaactccttagctgcagcctgcggtgtcatctcagggggttttactattgcattgttggcagtgatttattttcagtggcctgtctccaaacataactccattaaaagcaagggcccttggtacagaattttggtctgccaattccacaaacgcacaccgagttggctgagtctcatcacctgccatccgcacaaacttcacttctcca

SEQ ID NO: 618479 - DNA, 597 bp, Homo sapiens
  misc_feature (409)..(409): n is a, c, g, or t
  misc_feature (516)..(516): n is a, c, g, or t
gtgtatttaaatatatcatgaccctcaaacaaacgtaagatgcacatttgtcaaaattttatttaactccctaattaatgagggaaccagtaagatgttgcaatgagttcaaaggcaaattcaaagtatcacacatatataggtcaaccatgaatgctaaaatgaatttagaaagagatgcaaaactggcttcttttgaaaagaaggggaatcaattgtccttacacagattttacatttacattcctatcagttgtctacaaatcagagttataaaattgttcaaagacaatgaaagtcacagaggtcccatagaatcagataatccagaaaggtgtgctagataaaaataaagacactcagtaatctttcggttcattttaaagtcttaaacaatttttcctcgcanatctctttgggacactgatattgtcctaatagaattctactgagagagggcattaagggccccggaagtctcctttattattattattattattatactttaagttntagggtacatgtgcacaatgtgcaggttagttacatatgtatacatgtgccattgctgtgtgctgcacccattaactcgtc

SEQ ID NO: 618480 - DNA, 328 bp, Homo sapiens
  misc_feature (26)..(26): n is a, c, g, or t
  misc_feature (35)..(35): n is a, c, g, or t
  misc_feature (38)..(38): n is a, c, g, or t
  misc_feature (56)..(56): n is a, c, g, or t
  misc_feature (71)..(71): n is a, c, g, or t
  misc_feature (86)..(86): n is a, c, g, or t
  misc_feature (104)..(104): n is a, c, g, or t
  misc_feature (118)..(118): n is a, c, g, or t
  misc_feature (130)..(130): n is a, c, g, or t
  misc_feature (172)..(172): n is a, c, g, or t
  misc_feature (180)..(180): n is a, c, g, or t
  misc_feature (196)..(196): n is a, c, g, or t
  misc_feature (199)..(199): n is a, c, g, or t
  misc_feature (208)..(208): n is a, c, g, or t
  misc_feature (217)..(217): n is a, c, g, or t
  misc_feature (238)..(238): n is a, c, g, or t
  misc_feature (242)..(242): n is a, c, g, or t
  misc_feature (268)..(268): n is a, c, g, or t
  misc_feature (320)..(320): n is a, c, g, or t
tcagggacacagaacaaatctgaaanatgtttaantanagacaactattgacttanaaatggaagggaganaaaagaactggcccnggagaaagtttacttggngcttctgaaacccncgtgcagcagcnagtcagcaaacaagccccgagagaggctgggggctggcccanaggcttgnggctggggtcttttancancagccaaanccagctttnttcaatgagggtcagaggacnccanaacctatcttaaattgtgtgagtttncccctggaaggtttcaagtccaaagtcttttttttttttttttttttttganaaagtttt

SEQ ID NO: 618481 - DNA, 546 bp, Homo sapiens
ctatagaggggctcacagtgttacccttaactacaatatttaatgagcatttcccccccatcccctggagagagaggaatcaaaaaccccttcatgggatattcgcccccctcacctctttcaattgcccctttctctttttttgaatttgaactcgggagttactgttttccagtttggcggggacggggcttggggggtttttcttttggtgggtcccccttcttttccccttttttttttttttttggtgggctttgggttaggaggctttgatttgccatttgacatgaccccaaagttggtaaatgcttttgttgacttcccgccaatgggatgggggaaacacaccagttcttggtaaagtccttgggaaaaaaagttggatttttttatttcgagagaatctttccttttcccagggaggcttttttccttttttgccccgtttccttatcccttgcggtagagggctttttttgcattcatgcagactatgttgcaagtttgtttcctttagtaaactgaaaattattgtttaatcca

SEQ ID NO: 618482 - DNA, 207 bp, Homo sapiens
cttatatttagcgggcgacggatctgacggtatagacacccccgggtaggaagccgaaggcaggagttgttgttgctgaggggctagtcgcagccgccggaggcctccggacagacgccagagcgaggagggcgctacgcgacctaggcaagatgacccagttcctgccgcccaaccttctggccctctttgccccccttaaactcg

SEQ ID NO: 618483 - DNA, 411 bp, Homo sapiens
tctggttgatcgagacacttgacacatggttcacgtcctcactggataacctcctcacaatctaagccagacgtagcagaaatatcgcgtctaacagtgcatgtggtaccacaatataccgtttgagctcagacatcatgttctatcttgtgtaatttgcgtcacaggttccacaggattgagcttagcacgcgaaggttagttagcatattccgattgtcagtctcatctatatatgattggtgctcttccagttatgaggagtactcattcgttacgagtccaatatcggggactagcctctgccgccagtgacaccggtcttccagcaactacatgtcctgtaaggaagaagacaacgtctgggaaacagtgtcctcagtgttctttacctcatcggctcgatatcag

SEQ ID NO: 618484 - DNA, 204 bp, Homo sapiens
gttacgggctacccagagcgaggaggtggcgggcaggactccgggaatgcgagcaggcccttattctcccagtggcctcggacagaatgcttgacctccaagctgttttaaatctagtagataagccagatcctgtgttgccataagcccgttggccagcatttaacgtgggaatgcagctagctgggactgtctgaacacttt

SEQ ID NO: 618485 - DNA, 578 bp, Homo sapiens
  misc_feature (207)..(207): n is a, c, g, or t
agggagggtggcccccccccggtccccaaagcctgcagaggttcggggaaggagttggccatattttccgttggggcccccaacatcaagggtggcccgtgaaggaagtctccctccctccctcggccccccgggtagggggttattgtagccacccaccccagcttttcctcctcttttataagttccggccagcagtttgcaaantggggaagggggatgccttcctcgaccagttccgtaaggaggacattttcaaggccaccttttatgaaatggcccggtttaggggggttgttcagaggcccttttatgagtcccctgcggccccccaaccaaaatactttttttgggggccccaggagcagtattttccccccccccaaccccttttccttttagatgggaaccacagcctgggccaggcctgttccctttgacccagtttcccctcatgggcaaccctttttggtttttttccagcccgtgagggggtcctgtttccccccttccaagccccaacttttaaaaagcttgttccgctctaaaaaagtaaaaaaggttgggggtcggtttta

SEQ ID NO: 618486 - DNA, 298 bp, Homo sapiens
  misc_feature (247)..(247): n is a, c, g, or t
gagtatagggggagggacagatagcttcggagactgtctctcacacaaggactagtcatctcagcactgagcctccctcacttggacactcaggggacgcacagtgaagtggatggacacttcgccatccaggcagaactaagccaggcataaccacagccaagcagattaaccccaggcagaccgattaaaagacctccagataggcagacagacagattgtaccacctacctgggcagacagccnaagcttcagagatacagtccacaggtggacaaagggatccccagccagaga

SEQ ID NO: 618487 - DNA, 943 bp, Homo sapiens
atgaccctgatggagataaatatcatactagcattgaccatctcacttctgggaatactagtatatcgctcagaccgcattatgggctccctaagctatgcctagaaggaatgaaagtgatccggcggttgcatagcatcagctcacgctcgatgaacgccatggaagaacgaatgccctcttgtagcccaatgatggtcgcctgatggccatcacttgaggtccttaggcccgctcgtgttgaaaaccgaagagggtggggcgctaggcccctgaacgtagatcgtcatttcttccgaaggcagttatggtgcctcaggaattggccgtactttttgggctgtaaatacccctatcgtacgcgttgtggctcagacaataggtgaacctcaggtcccccgaaagcatatttgacgcaagttaactttagccgaactggaacggggtgaagcttgcgcgaagagagacataccacctatttaacgtttggtcctcttcaaaaagagaagactcacaatcaccacgagctcgtaaattttagttgacggccattcgactccccgcttcctaatctcaattttcattgcaaggccaaatgattctacaaaaggacaaaccctaatattggggggtgtgttcaacccccatatggcgtttattgacctttcgcagataagcccgcgagaaagaaacacggcactcctttcgcataatgtaactgagaccctgaaacgtggatttccgctagggccctgcacagatgtgctagtggggcaaaggccaaaagagccgggaaggttgagtgccaaggtggaaatgccaacttatgtccgagggggaagaaacaggagggcttcttaacagtcggcgtaagtgactaaaattctttccccttaaaaaagggtcgtcgcttcagagtggataccccgtgtcagagagcgaa

SEQ ID NO: 618488 - DNA, 172 bp, Homo sapiens
atctgaggatccctgtgacgagacgacctgaaggtggagctgtccagctgcgcgtcgccaaagtgacaggcggtgcggcctccaaggctctctaagatccgagtcgtccggaaatcatgccgtgttcacagttttaaccagcacttccagggaagaaactcaggaattctac

SEQ ID NO: 618489 - DNA, 1229 bp, Homo sapiens
  misc_feature (523)..(523): n is a, c, g, or t
  misc_feature (540)..(540): n is a, c, g, or t
ggcttgtccacgcctgtactccaggactaccgcagaccgatgcatgggctgtctagactagggccgttcatgacagaggcatcattgaccagagatcactgggcgagtctggaatcttgcccgcgagtgggggcccaatgtattaccacacggtcctaactgatggtctctgcacagtaccacagtctgcgcagtgatcaagtctctcatgaatcccagtcgtactgtacgatgtgtgctatgcactccttactatagctccaagctcacatcagactggagcatcgatgtggagtactgacaccctaggcatggcccctgcaagtgccgtccgcaatctcctcgcgtgcccacctggcatcatccctcatcctggggaagccagcgccacttaattgactcgccgctcaatggaacttcacagtccctgcgatgaaggagcagaggggtgttgtgatgcaactgccaagagacagacaacctgtggtgtgaggggacacctggctccatcaggtcccgtcgnagcccgtgtcggctcgnctcatccggggaccttcctctcgcacgcgtcttcgacgcacatcggcggcatcttcttgtatccttctatcgaagtaccttctgcattgaccatctttcgccgggcgtccatggcccagcggcctctttcctacgtacctcggactgacggggcggtctgacaagtgccgtgggttgggcttcgccgggcttcaatttggtggcgtgtgacgaaggggatcacccatgtgtaaaggccccattgtaacgcaaggtgccattcccgcatactcgacattactcttgcctttgctcgctttcgctccgcgttcgcgctttcgaccagaggggggggggcgcacctcgcttaccgaaagtgctatatggccaccttatttaggcggttgccaaatgagttatgctctttggtggtgtcccctccttcaccaaggccaagggggccccgttggggagaacacaaaccaaattgggtttcccccggcggggacctagtataacgttcccccccgtgggacgaacggggttgtccctaggacagacggaaaagtgttggccttcccgaagagaccccggagtaggagacaaagggagatttggcaccccccttgtgggcgtttaatagaaacgcctggaaagggggccttaaaccgttctcaaacttgggggtttatattccacaggggtgtggg

SEQ ID NO: 618490 - DNA, 431 bp, Homo sapiens
  misc_feature (252)..(252): n is a, c, g, or t
  misc_feature (360)..(360): n is a, c, g, or t
  misc_feature (419)..(419): n is a, c, g, or t
  misc_feature (422)..(422): n is a, c, g, or t
gcacgaggcgcccccaggccccggtgtccactggcatgatgggggcatggacctggcaagcctccgcgccgcctaccggcgcatcgccccccacacccaccgcacccccctcctcacctcccgccttttggacgagcttttgggcaagcggcttctccttaaggccgagcacctgcagaagaccgggagcttcaaggcccggggcgccctcgccaaggccctgaccctggaaagccccaaggggctcctcgncgtgttcagcggcaaccacgcccagggcgtggcctacgccgcccgggtgttgggcgtgagggcccttctggtgatcccggaggaagcaagccccctgaagaaggcggnggcccgggcctacggggcggaggtggtggaacggggggtcccgccatcacccccacccnggngggcgaggg

SEQ ID NO: 618491 - DNA, 780 bp, Homo sapiens
gcacgagagaagaggaagccgcagcagccccagcgccgaccagcagggggcacaggacagagaagaggaagcggctacagccccagcgccgaccagcagggggcacaggacagagaagaggaagccgcagcagccccagcgccgaccagcagcgggcacaggacagagaagaggaagcggctgcagctccagtgccaaccagcagggggcacaggacagagaagaggaagcggccaaggccccagtgcccgaccagcagctttcacaggacagagaagaggaagccgcagcagccccagcgccgaccagcagcgggcacaggacagagaagaggaagcggccaggccccagcgccgaccagcagcgggcacaggacagagaagaggaagcgcagcagccccagtgccgaccagcagcggcacaggacagagaagaggaagcgcagcagccccagcgccgaccagcagcggcacaggacagagaagaggaagtgaggaaatggaagaagagggttgacctgagctgaaggacatgaacttccacgtgaaatagccccagggccgggcacacgaggtcaggagttcaagaccagcctggccaagatggtgaaaccctgtctctactaaaaataaaaaattagctgggtgcggtggcaggcacctgtaatcccagctactcaggaggctgaggcaggagaatcacttgacccaggaggtggaggttacagtgagccagatctcaccactgcactgtagcctggcaacagagcaagactccatg

SEQ ID NO: 618492 - DNA, 160 bp, Homo sapiens
ccatacgcctgcattcctttccaatactcttttgtctttcacgggatcctcaatacaaacaacccaactaatccacgatatgtgttcataacagtcttttttccccctcaaaaggcgggaaggcccacttcaaacctccaggaacacgaccctattcacc

SEQ ID NO: 618493 - DNA, 106 bp, Homo sapiens
tgacctgaggttccgtgcgatgtgcgtgccatgtccatattcagaagctatcgttataatttgttttataattgagtagtacaagcgagaaaaaaatacggaggca

SEQ ID NO: 618494 - DNA, 239 bp, Homo sapiens
agtggtgggagagcaggcaactatcattgaatatcagaatcttgttgactacaataaggggaaacaaggacagacacaattttatatggcatgcagatgagccttcttaatgctacacagattcactaaaactagttgtcacaacatagagacaaacagtaacatcatgaagacagccatcatatgggcatccatctagtagatcgaccatgcaaggacatgccaagactatggcaact

SEQ ID NO: 618495 - DNA, 485 bp, Homo sapiens
ctcccactggttgctgtaagcctgtggtacagagaggtgaagcccagctggactttccataggtcgagagtgggacattagccgagctgttctgtctagctaaaggattgtaaatgcaccaatcagcactctgtgtctagctaaaggattgtaaatgcaccagtcagcactctgtaaaaacacaccagtcagcactctgtgtccagctaaaggattgtaaacgcaccaatcagcactctgtgtctagctaaaggattgtaaatgcaccagtcagcactctgtaaaaacacaccagtcagcactctgtgtccagctaaaggatagtaaacacaccaatcagcactctgtgtctagctcaaggattgtaaatgcatcaatcagcactctgtaaaatggaccaatcagcgctctgtaaaatggaccaatcagcaggatgtgcgtgggaccaaataagggaataaaagctggccaccgagccagcagtg

SEQ ID NO: 618496 - DNA, 141 bp, Homo sapiens
ccgtggccaccacgatttgcaaatgttgtctcccaagctggagttgatcttgcctctggaatgcttttattaagggtttttaatacttaatttaattttcgaactgaccaatgcaaggctttattaaaaagaaagtttcca

SEQ ID NO: 618497 - DNA, 360 bp, Homo sapiens
tttattctttttgcatattacaaaaatgtgcatccaataattaaaatcatttgaacaaaaaaaaaaatgggcactctgattaaacggctttacagccggcaggacacctgggcccagctgggtttaactctagaatttcacggtcgtcccaccccacttctcccaccccacttctcccttcaccaacatgcaagtcctttccttcccggccagccagattagattgacagattgggaagggcgggcgcggcctccgtggtcagtagtccttggatgtgaagggggcagcacagtcttttaaccttgatccaccctcttggcttcttacaaggttaaccagcaaaaagaattaaaagttag

SEQ ID NO: 618498 - DNA, 80 bp, Homo sapiens
gtaccacatatgatcttcagaagaaaacctggtatgttgctcataatgaagattaaggatagatggaatcaacagaaaat

SEQ ID NO: 618499 - DNA, 364 bp, Homo sapiens
gggattcgttagtctgccgttgctggcgtggatcgcccagtcgccgattatcatcattaccggcgagcagttgagcagctatgaatatggcttgctgcaagtgcctattttcggggcgttaattgcgggtaacttgctgttagcgcgtctgacctcgcgccgcaccgtacgttcgctgattattatgggcggctggccgattatgattggtctattggtcgctgctgcggcaacggttatctcatcgcacgcgtatttatggatgactgccgggttaagtatttatgctttcggtattggtctggcgaatgcgggactggtgcgattaaccctgtttgccagcgatatgagtaaaggtacggtt

SEQ ID NO: 618500 - DNA, 368 bp, Homo sapiens
attcccccacctatccccattttctgcctgtacttaaactgaaatgcaggaagtggtggcaaaggtttattccacaaaaaccacgaaaccggtcctcacccagcctcttaaagcagtttttggggtcccccaaccctgtttccttttgcccctcccccctgtgtgactttgggcaaaccaagtgccctcttttaaccccagtttcctcatttgcaaaatgggaacaatgacgtgcctacctttttaacatgttgtgaggagactatgatataacatgtgtatgtaaatcttcatggtgattgtcatgtaaggcttaacccagtgggtggtgagttttgactaaaggttacctgttgttgtgattttta

SEQ ID NO: 618501 - DNA, 452 bp, Homo sapiens
  misc_feature (392)..(392): n is a, c, g, or t
  misc_feature (433)..(433): n is a, c, g, or t
tgaagactgagttttcagttcatgcgagatctgattgtttaaaagagtgcagcacttcctccaccttgctccctctcttgccactgatgtgcctgcttccccttcaccttctgcctggattgtaagctccctgagaacctcaccagaagcagatgccagcaccacgcttcctatacagcctgccaaaatgagctcctgaatttcacagacaaatccagactcctgtgtgggaaagcctgcggtgggtgttctccgtcttcccacagggactccctgcagccagggaattctaggggggagcacctggacggcgaggtattattgccccagatgggccttgaagtaacttgaaggattcacaaaagaagtggaaaatgttccttggccccgcntttaacttgatggacatttccaccacaaagggaagtgttcnattgggttgggtcccttgg

SEQ ID NO: 618502 - DNA, 400 bp, Homo sapiens
  misc_feature (223)..(223): n is a, c, g, or t
  misc_feature (399)..(399): n is a, c, g, or t
caatgctcaccttatgtgtgatacttagaacatcaccaggaactagacaagtgaaaaatttaggtgttattggaaacaagaagaaatatcctcttcctaaggatacccctcaagatattataataaaaatggcatgaaaaaacaggtgtggctgaattgtcaccactctgaagacaggagggtgaagccaaaggctataaaggagaaagaaaagactgtgtcntatatgagacggaaaaatcaagaagggatgcagagaaaaagagaaaaaacggcataaaaaaggatgcacggaggaaagaagagggacgaaaaccctccaaccacgcgccctcccccgcccgccctcgctgactagatacacacacacgaccaggcaggagagacgaacgccaccana

SEQ ID NO: 618503 - DNA, 251 bp, Homo sapiens
ttatacaactatgaatgtaatgttgcccaaaatccatttaactgatgattaatgagggaaccagtaagatgtacaactgattcaaatgagaagttaaagtatcacatacatttaaagtcaggaaagaagtgctaaatgaatttacaaaaaggtgcataaggctggacacggtggctcatgcctgtaatcccagcaatttgggaggcagagataggcagatcacttgaggtcaagagtttgagaccagcctg

SEQ ID NO: 618504 - DNA, 365 bp, Homo sapiens
gcgcggtggctcacgcctgtaatcccaatacttcgggaggccacggtgggtggatcacctgaggtcaggagttcgagaccagcctggccaacatggtgaaaccccgtctgtactgaaaatacaaaaattagctgggcatggtgatatgcgcctgtagtcccatctactcaggaggttgagatgggagaatcacttgaacctggaaggcggaggttgcagtgagccaagatcatgccactgcactccagcctgggcgacagagcaagactctgtcaaacaaaaaaaaaaacatgcggccgttcgagctcactaggccgattagacctatagggagacggattacaattgactgaccggaagtttac

SEQ ID NO: 618505 - DNA, 181 bp, Homo sapiens
gggcaacagagcaagactctgtctcaaaaaaaaaacaaaagaaaagaaatacacttacatagatgaataataaaaccaggcacggtcggttcatgcctgtaatcttagcactttgggaggctgaggcaggaggatcacttgaggccaaggagggttttttggttagtgttttgagatggag

SEQ ID NO: 618506 - DNA, 155 bp, Homo sapiens
tggtaccaaccacttcgtcgcctaaaggcaactcgtcatcagctctcaagcctataaatcccgggttggcttaatattcaggcctaccacctgaaacctggcaaccaacgccaggctggcctaacccttatcgtccttccatcgcaataacttgg

SEQ ID NO: 618507 - DNA, 810 bp, Homo sapiens
gccagactggctggagatgacatggaggtcatcgccacagaactcatgaacattctcaagaaggttgtgagacgtacaccctgatctgaagactgatggttttggcagttgacacatgtcgcagcatggtggccgctgatggagtagcaacagcacaggcaagctgggctttgaggaattcaagtactctgtggaacaacatcaagaaggtgacatggccagtatacataacagtgtcgacactgaccgatcagggtaccattttgcagtaggtgaactcccagtgtgcctttgaggcagcagggttccaccttgaactgagcatctctataacatgatcatccgagcgctactcagatgaaagtgggaacatggattttgacaaacttcatcatgctgcttggtcaggctggtacgccattgttccgtggccttcaaatctcttgagaaagatggcctctggacaaagtccaggtgaacatccaggagtggctgcagctgactatgtattgcctgaactggagccccaggagccgactcactcaccgttcttggctataggagtcacctggagcctcggtctctgccagggcccgatccctgtctgcccgtcgcatctttgtaggggcctgctgtagccactaacgctttcgtactccccgtgagcttgttacccatgcttctcaacatccagtggtccaatgtgtcctggctggagttccccctggtctaggacactctaagattgctctgtccgcgggtctccccattgccaccaggcccttgccagaccactccgtaacctctccg

SEQ ID NO: 618508 - DNA, 492 bp, Homo sapiens
  misc_feature (14)..(14): n is a, c, g, or t
  misc_feature (54)..(54): n is a, c, g, or t
  misc_feature (273)..(273): n is a, c, g, or t
aagaggaaggctangtggtgttgaagtgcctatgaagtcatccagctaagggtntaccactgggctatggattaagtgtggctgatcttatgaatccatgtgaaaatctatccggattctcccgtgtcaacatggtaaggggatgtatggcttgagatgaagtctcctgagccttcctgtatcctcatgccggggattaaccgcgttatcaaccgaagctaaggatgatgaggttgctcagctcagaaagtgcagatacctgtgggacatccngaaggacctaaagactgtgactagtgagctctaggctgtagaatttaaaaactacaatgtgattaactcgagcctttagcatccatgtacatggatcacagtttgctttgatcttcttcaatatgtgaatttgggctcacagaatcaaagcctatgcttggtttaatgcttgcaatctgagctcttgaacaaataaaattaactattgtagtgtgaaat

SEQ ID NO: 618509 - DNA, 233 bp, Homo sapiens
  misc_feature (35)..(35): n is a, c, g, or t
  misc_feature (119)..(119): n is a, c, g, or t
  misc_feature (155)..(155): n is a, c, g, or t
  misc_feature (198)..(198): n is a, c, g, or t
tggaacgcgacgctcgatcggctggagctggccgnagaggaaaccgcgacccgacctgccgatctgttgatggccggggtccgccgcgtggcagtccgggattcggccgggcactgcangcatgtggcctgcacgccggccttcgacctctattngaaagcgctcgacgcctatacgccggaacatgcggcgacgatnacgggggtcgatgcagccgacatcgtcgaagccgc

SEQ ID NO: 618510 - DNA, 766 bp, Homo sapiens
ctttgtgaaaaaggtgctcgcttttccttcgctttctgccatgattgtaagtttcctgaggtctccccagccatgtggaactgtgagttaattaaacctctttcctttataaattacccagtttcagggtagttctttatagcagtgtgcaaagtggactgttacagcacatattcatttttatatctatattatcatttaacctgtttttgaaaattatcttttaacatgtcatttttctcttgtcttattatcttcttttgcgtaaaacctgttctccagtagcttcctaagaaagggtgcacaggagacccattttttgagcccctccgttatctgacaatgttttgtttgaccctaacctttgattaataatgcgactggatgtggaacttgtgaaaggaacaataaaaagctcaggaccccaattcagtatgtcaaaaaaaaaaactaaaggaaaaaataagaccatgttgtggggcgcgcgccacgggcctccagagaagagttgcctaacaccatccggtgggggccgcgggggccccgtaggttcatgtcgaccagggcacaacgtgtgtcccagaaagaaaaccgggggtcaacggaatcaagaggccgggggaatcctgcccccgaataaacaagaagcgccgcagggggaacaacgcgagatgttttcagaaaaagtcccgaaagagaagatccagagggacaaaacgggggtctttcagagagaggcgtcaaagagacctcgaaataaagtagc

SEQ ID NO: 618511 - DNA, 292 bp, Homo sapiens
ccccactgagggtctgggttggcatcgggctattactctagattcaataatggctcgacactcactgttcaaagtgctattatattccatacacgtcacggatctatcccgactttgacacgaggacgaaactgtaggctaagatcatctcacccttacgtcacgctacgcctaccttgtaatcaggcataatctatgcctctggtgggttctttggctagctgtgcctcttaccctgccacgttgcaagacacctgcctgactctcggaggtcacagccaccaatccgcgc

SEQ ID NO: 618512 - DNA, 483 bp, Homo sapiens
  misc_feature (227)..(227): n is a, c, g, or t
ctgtatagtatgggaattattttctatgttaaatagaaactgaatgtactgggtgaatggtgtcctctccaaaattcatgtacttcctggagcctcagtatgtgaccttatttggaaatactgtggttgtggttgtaagtagctaagatgaggtcatactggagcagggcaggcccttaatccaatatgactggtgttccttataagagaagatagggcgggcatgngtgcacgcctgtaatcccagcactgtgggagccaagccaggcaaatcgcttgaggctgaggagttcaagaccagcctggccaacatggcgaaaacccatctctactaaaaataaaattagccatgcgtggtgcttgtaatgtcagctacccaggagtctgaggcacaagaatcactcgaacctgggaggtggaggttgcgagatcacaccactgcactccagtgtgagcaacagaacgagactctgtctcaaaaaa

SEQ ID NO: 618513 - DNA, 540 bp, Homo sapiens
cgtgaaatatacagtgtggctcatcatataactcacctacagcacagtcattagattgacttgtgcatcttctggtgtcattggaactagtatatgattcctgaagaaattccatttttcagtcacaataatcttctatatcaatatttggatctagcagatcttctccatatgatgaaagattcatttggtttaagattaggttttcaaatgtatcttctaaatcggtttcaccaattaagacagctcccatcattcgtccattttgcatgacgactttgatgtattctcgtccttaggtacatctcagcattaattcatgatctgaacctaagccctgtgcattgtattttcccagcagtacaaccttatagttaaaaaattttgtcacatgagcaaacagttcaaagctgaaatccatgtcaatagagtctcctgaactcgctgcagccatgcactttgctgcataccatcccatctgtctagcctgggtccacagcctcatctgctgccagactgggctcagctgccaggatgtag

SEQ ID NO: 618514 - DNA, 217 bp, Homo sapiens
actgcttgacaccatggtgaacacacaccccacccccgctgtctctactaaagatataaaaacttagctgggtatgttggcgggcacctgtaatcccagctactcagtgaggctgagcgcgggagaatcgcttgaagcctgggaggtagagaggttccagtgagccaagattatgccactgcactccagcctggccaacagtcgtgcaaccggaggt

SEQ ID NO: 618515 - DNA, 110 bp, Homo sapiens
aatgtaggcccatcccatttagtgctgcacagtgcagaagcacaaaaaacaaaaacacacagtctctgacttctcctaagcactttgagttgttgaatagggccaactgt

SEQ ID NO: 618516 - DNA, 431 bp, Homo sapiens
accatagaatgatagatatgtatgcatcactagatctagaagtcttcctaaaaccatcagtgccaagaaatcgctttgtagtatttacttgttactgacaccacagcagtatagcatatgtcacagttcctgtgattcaatgttataaaacaagcagaatttaaaagcagcactaactgactttcctgtattactgctgtatatttatgtttgtgaaaatgtccatatttctaatgatatatttaatctttgctacaatataactgattctctatgctatattgtctctatcaacgttgttaatatgaccttgtacagttatctataattagtgttttttttcactattttgtgactgattactgtcagattaggacacaaatcaccagctattgcctgcctctgggaaattgctgaatcgcacttagaca

SEQ ID NO: 618517 - DNA, 871 bp, Homo sapiens
ccgccctcacgggagggacccccctaggacccaagagtcccggaccgcaaaagcggaatggagaaaactttgcccgggagacgcttaactaacacagcacatttggcccccctcccggatgagattcccaaatatttaggaggaaatggccctgtcaaccctcggggagaaccccagacaccgcgtccaagattagaagggcccctgacactttagattgccaccccaacaccgggaagcttctggaaaggcgaagcgaagacgcacacgagatttttctgtcctgtttgcccacaaacaatgctgcctgccccgggaaccccgaggggaagacttaattctggagattcaactcccccctcctcgggtgagtaaacccccaccccccaaaaggagacaactctcctcgagtttaagacgcggttggaaaactagaagatggagcccgggtatttccagcggaaaacttttttacggcctcacacgaatgagccctggaatataaaaagtagccaccaccacactcacgtgccagccactatatttatccccccaggatttaaaagagaatccctaattttaagaaacacgctttccaatgcgcttttgcacactttttcacaggaggccccaagaatagaatttgggaatatagggataaagctctaagttttttacaacccgagcacctcctacaccacgaatttatgagaaaaaagtttacccaccaataaatcttagtttatcaagaaaatttttgggtaggaaacctttttaaagggattttggaaaccccttgaaccgcctttttttttcccgccaggaacccacccaattgggtttgcttccattaatttttgggaaaaatcca

SEQ ID NO: 618518 - DNA, 301 bp, Homo sapiens
cgggaccataatgttaacctttgataaatctgattaatttagcctagatatgaagatgtatgtctctgctgtaatgccagcaaagcgcttttgtttaaagtctccattcatttacaggctgggttgtggctcatgcctgtctgtaatcccaccactttgggaggccgaggtgagcggatcacttgaggtcaggagttcgagaccggcctggccaacgtggtgaaaccctgtctttactcaaaatacaaaaaaaattagcagggtgggtggcgggtgcctgtaatccaagctactcgggagg

SEQ ID NO: 618519 - DNA, 355 bp, Homo sapiens
cttagtactcagacattgactttccgtcagcaaaccggggaagacaggttctcctaagttatccaaatgcaaataggaatttattttatctttttatttttgaggcagagtcttgctctgtgcccaggctgtagtgcagtggcgcgatcttggctccccgcaacctttgactccctggttcaagcgattctcctgcctcagcctcccaagtagctgagattacaggcacgcaccaccccacccagctaatttttgtatttttagtagagacagggtttcaccatgtttgcgaggaaggtcccaatctcctgacccggtgatccacccgcctcagcctcccccacagagagagcgt

SEQ ID NO: 618520 - DNA, 571 bp, Homo sapiens
agcgagagggctgcctgcttcctccctaattgctttatgcccagatagcaagtgtgggcaggagacaggcctgactcacaggaactgcaggagtctgggcagggtggggcagcactcgtcgggatataacagaaataaaaccacaaccccacagatacctacacaaccccacccacaacccaaaccaaacaaatacgcccttccagtaacaaaaacagatcggctcacgcttcaccatcatgtaggggtcgtctacgatcgggtcacaatgtcaatctgtggtatgaacaaaggcaagcccaccgtgcctaaaaggaatgacacaagtatccattccaatgcctgtggcagcatggccgtcatctcacatccaaaactacaacgggaaagccatttcctatcctatcaccagtgctctggacaggcagcgcatcataagatacttatggaaactgcaggctgccaatgaagccatgtgtcacctatcacgaagcgtcactgacactacacgtgtaacctatccagattaggatggacacatacaatgacactgtaactcatcacgactcag

SEQ ID NO: 618521 - DNA, 332 bp, Homo sapiens
cagtcggtacctgtgggtagcacaataaggaagggtccccaggttggggagagccccaagttgagaacaataatgaacaattattgtatgaacaattgttagaaacagctaatcacaaacaacctgtgggcacaatgacctcattccacacgtagcacccttcagcaggaccctataaaactttcctccagcccttgcctctttgcaggtagccccttctctgctgagctgcccactgcaacatattttcacaatttctctaataaatctgcccttctttacctacaactatcttggtaaatggcttcaccacctgcaaaactgaccctagg

SEQ ID NO: 618522 - DNA, 297 bp, Homo sapiens
ctcatcgcgagaatactccttgtgactgctgcaggagaatcgcctggagctgtcacgagcagaagctgcagtgagccaagatcgcgccactgcactccggcctgagtgacagagtgagactctgtctcaaaaccagacaaacaaacaagagtcaaactctgtaaaatgtttaaagaggtttattctgagccaaatatgagtgaccaaggcccgtgacatcagccccaggaagtcccgagaacatgtgcccaaggtggttgggttacagcttgattttatacgatttaggggaacagg

SEQ ID NO: 618523 - DNA, 805 bp, Homo sapiens
cttctgtgggctggctctgccaggtggcggtggctaccaggagcttgtttgctggccagtggcccagcaggtgcctgcgaagctggctggcttcgcccggcagcttgggcagcccgtattttgctgctggtggagctggctggctggctgcagtgagcatgggtggtggtgacaactcactgctggtgctgggctgctggacctgcttccacctgggcgcttgcggtggctccctgtgggccctgctggcctgctgcctgcggctcgcagacgctgccacggagatcgtggaacgatgtggccctgcgagcgcctggtgccaccacctgcatgggtctccgggcgggcttcctgggctgcctgacagactgtcctgccatggctgctgtgcagcacctcgctgttgtgctcgggaacgtgatgttggccctgtgctctggcctgatggtttgctgtgccaattgaggccatgctcccatcctgagccacattaagtggcctctcttggcaagcatgttgcacctttatcagccgccaagagaggtgtccttctccaacaagcccctacttcctggtggatgagttctggcagtcatgggtgtcctgttgagggcctcatcgtgggccttcggacccactctattgtgccagacggctcagagcttcttgcagacagccctgggtgagaagggggggtgccaaccgatgcatgcctgctcttgtgctctcccgccttctgccttgggagtacgagacggcaaccatctcctacatcctcaactctcactgatgaacaagttctggg

SEQ ID NO: 618524 - DNA, 724 bp, Homo sapiens
ggttctagtacgggcctggaattccgtgatgtaagtgagatgatgctaaggttgctgcttcatacagtatgatatcggaggcaagtattctcactgccatataacaaatagtccgaacgtttccccgccattggtggctaaccgaaggaaaagtccatttgttgttcaccgtccggtcagcgaagctatgaagggtcccgtggagaagttggcttccacatggaggtaatgcagtagacctacagacatggatgatgcagcacatgtctccgggaagcgcatcgaggcaagtgggtctccgtcctcaccaagtggaagttgtctgctgactggtgccatgtacttattgatacgatgggggtctcgctatgttgatgaggctcgggtctcgagctcctggcctcaagtgatcctcgccacctcagtctcccaaagtgctgggattacagagcatgatacattgataactccatttgtgggttataatagaccacaacttccaggcccagccgaatcctgctgaagttaaggatgtattcctggtgcctctggctatttcctgcatccacaggtccatgaccagcattacgtcacacgtcttggtcaccgttttattaatcatatctttgagtacacaaaccctgaagacggtgtcacttaccagatcaatggaatgacggaaaccttgcagtgttggtggctttatcattttggaaaaaaaacc

SEQ ID NO: 618525 - DNA, 113 bp, Homo sapiens
gtgatctagaggatcccttcttgtgttggtgctggtcgggagggatgcttgtttatcgtggatcttgtagtcagacaggtgcgtcatcgttccagctgtttcccagcaaagaa

SEQ ID NO: 618526 - DNA, 355 bp, Homo sapiens
tcctttgtctaaacaatagaactggacacaagctctgtgtgttacacatgcatgtaaattatgccttagtaactaaacacatgcattttctcgttttgaaaatctcattgggagccataaagctacataagtgggatgcaaatttctacaaggcaatgaaaaatttagtgagaatttaaattgtgctatacactctttgaccactcttattttcccttagaagaactggtcgccgggcaacatgtggaggctcaggcctgcaatcccatcattttgggaggccaaggtgggaggatcgcttgagcccaggagttcaaaaccagcccggacaacagagtgagatctcatctctacc

SEQ ID NO: 618527 - DNA, 908 bp, Homo sapiens
cgaagtgaagcggcgccatgtacgccctcgccctcttcgccaggccttctggccaccgctctgaccagccctgtccaagacccgaagacatgctctgggggctcagcagtgctgtgcagagatgtgaagacggcggtggactgtggggccgtgaagcactgccagcagatggtctggagcaagcccacagcgaaatcccttccttgcgacatatgcaaaactgttgtcaccgaagctgggaacttgctgaaagataatgctacgcaggaggagatccttcattacctggagaagacctgtgagtggattcatgactccagcctgtcggcctcgtgcaaggaggtggttgactcttacctgcctgtcatcctggacatgattaagggcgagatgagcaaccctggggaagtgtgctctgcgctcaacctctgccagtcccttcaggagtacttggccgagcaaaaccagaaacagcttgagtccaacaagatcccggaggtggacatggcccgtgtggttgcccccttcatgtccaacatccctctcctgctgtaccctcaggatcacccccgcagcagccccaactaaggctaacgaggacgtctgccaggactgtatgaaagctggtgtctgatgtccagactggtgtgaaggaccaacttcagctttatcagggttcgtggaccacgtgaagggatggtaccgcttggggccggcgtgttgacttgtttggctctttttagcccagggtggtttggtctggctggtataccgaatgtacctccctggcccgggaaggtcccgggtcccggggttgtggcacaagctgggtctgcgtctcggggctcggaaggtttccctgcgttactgtccccacgcggaaccgggggtgcggcaactgggccagg

SEQ ID NO: 618528 - DNA, 249 bp, Homo sapiens
gttgatgggcatccatacggaaagtcataactttattaggatagaaacagtacaaatttcaaaccaagcggcagttcacccctttgagaacaccaaaaaaagtggctgtccataagggtctacataggttgatcccatacatcgctatttacaataatcattaacggtgggtcctgtcaggggctcaaagggcctgtggctctcgaacacatatggctggtggacatgaccaattctatggtccttaac

SEQ ID NO: 618529 - DNA, 686 bp, Homo sapiens
  misc_feature (64)..(64): n is a, c, g, or t
  misc_feature (481)..(481): n is a, c, g, or t
  misc_feature (667)..(667): n is a, c, g, or t
gtggagccctctcaggggcaggaggagctctgtgaagcacaggaaccgaaagcacgtgatgtcnccttagagatggcagagccaccagacccgccccagtcatcaaagcagagagacgtggcggcatgtgggcagcatgcccaggttccttgctgactcagcacttatttctgtagttttaaaaaagaatttaatgtttttggttgtatttttttgggggggtgagggtgggcaaaaacatggggggagttctgagttgttagaaatgtttctgaatcaagtttgtttgaagacacgtgtgcctttgtacccattataagatggtcataagacccaagaacgtgataagctattggttatttttttgtgtttgtgttgttgtttttatgcttacatattaccccattcatgcgctaggggttcccaattaattggacacccataaggcttggtgggaggtatattttctcattctactcgnctcaaaggttcactccaccacagagtcttgagttttatcaataaaacacacatcttggtgcacctctccggcaataagatgtgggttatagtgtgcccatttcccttgaagactggcacatcgcagaatattgttcaagaataacttctctattttttttaagttagaaagatataatcattcacnggaggaagaaagaaataaa

SEQ ID NO: 618530 - DNA, 117 bp, Homo sapiens
  misc_feature (67)..(67): n is a, c, g, or t
ttggactacacatcaggtgtatgacttggctatggactacactctacgatcacgagctccacatggnaaaatagtgttgcacaatgttgtgacacgaggcgctatgtagtgctcatg

SEQ ID NO: 618531 - DNA, 583 bp, Homo sapiens
  misc_feature (166)..(166): n is a, c, g, or t
  misc_feature (175)..(175): n is a, c, g, or t
  misc_feature (254)..(254): n is a, c, g, or t
  misc_feature (345)..(346): n is a, c, g, or t
gggatacccccggcctgtctgggatatttgcaccccgggggcgagcaccttgttctcccggttctgggagatattctgcgggggtccttaataaagaggggggcgcgatgtctacaccggcttatatatcaaaaatatattatatggggtattataggaccctttnaaattgtgnggataatgcgagagggggcttattgggggcaatatggtgtttgttaatgtgcgaatttttttcaagattatttccacgnggcgggaagaacaccttctcaaaaaaaaaaaaaaaaaaagaccttccgagtttcttgtcaacacttttaggtaactcaattctacaaattnnaaccccccccaggaaggtcttaaaagacccgctagaaataccctactgctttttatgggcccccgcttttttggtgttggaaaaattttaaatccccctttgttaccccacttttttttttccccccccaatttttgtccaagggttttccacggaaaaagaaaagctttttcttttttcctgtttaaaaccttttcccaaaaaaaggccccaacatattgggcccttttttcttga

SEQ ID NO: 618532 - DNA, 884 bp, Homo sapiens
ccacgcgtcgcacaactcactgtagccttgacctcctgggctcaagcgatcctcctgcctcagcttcctgagtaggtggaactatagtctcactctgacgccaagctggagtgcagtggtgtgatctcagctcactgcaacctccacctcctgggttccagtgattctcctggcctcagcctccgaagtagctgtgactacaggccaggtgcagtggctcatgcctgaaatcccagcaatttgggaggccgaggtgggcagattgcttgagcacaggagctcgagaccagcctggccaagatggtgaaaccctgctctactaaaaatacaaaaaattaacctagcatggtggcgcacacctgtagatacagctactcgggaggccgaacccgggaggcagaggtggcagtgagctgagatcgtgacactgcacactccagcccaggtgacagagcaagattccttcttaaaaaaaaaaaaaaaaagagaagggaaaagaaaaagacaacagaagggagaagagaagagacgagaaaaaaaacttcggaaggggggccaatgcctgaaaataccagcattgggaggccaaggggggcagaatcacttgtgcccagggggctcgaagaccagcctgggcaacagcggaaacctgctctctacctaagaacttttcaacaaaaataagcgttgagctggtgacgccacaccttatagttccacctaaccgggaggcggaggtctcgaatcgttgagcctaccaacggagcccggaacgtgcttacgctgggacgaggactgtgttccacaaggtacaaaacaaacaagcaaaacaaaaagggggggctagaaccagcgcagcaacgaccagtgaaggccagggatac

SEQ ID NO: 618533 - DNA, 187 bp, Homo sapiens
  misc_feature (180)..(180): n is a, c, g, or t
ctgtcggacaatggttacccattttccctctcttgggtgtagaaatattactacggtctctgtatgtaatagcacagttttccttttcatcttcattttaatgtgtaaaagtgaactatgcgtggaaatagaaatcttatattcaaactttgaggattatgaaatctataactcagtgtnatttatc

SEQ ID NO: 618534 - DNA, 137 bp, Homo sapiens
cctcttgactcgtttactctcctgaggaatcgatgctgcatggacatgtcttctgtatgcagctggcggcaagaattcgagcaagggatttggcagagttttgctctacagtaggatagagatgagatgttggaagg

SEQ ID NO: 618535 - DNA, 272 bp, Homo sapiens
tggtgctgtctgggcacgtgttgggcttgctctgcagcgactggctgccgtctgggcgtggtgaccaggcacggacttgggcgaggtcttgcatctctactaccctaagtcggagtctcgctccgtcgcccagtcaggagtgcactggtgcgatgtcagctcactgcaacctctacctcccaggtacacgtgattctcctgactcagcctctcaagtagctgggattacaggcgcccaccaccatcatcggctactttttgtatttatagta

SEQ ID NO: 618536 - DNA, 105 bp, Homo sapiens
tatactcttttgccctcctccctgttgccggcatggtgtagtattcagccaccccctccatctgttcccagcacctggagaagggggtgctcaggtggcgcgtgt

SEQ ID NO: 618537 - DNA, 331 bp, Homo sapiens
aaaggcacaacattttttttgcttgcttggaacataatagaggcaacaaaaaattggagctagaatttgttaggcggcattttgatttgcaagctggtttcctaacttggcagctttttgaccttgaaaaaaacaagtgattttggagtctacagctctgttgcaattttctgattatggcaaaggcaggggctcccttgtcagtcctggttgacttttaagtcaggcggatcccaaaaaactgctgcctggacggaaatggaaatatggtctggctgggaggacaaaaagccgcatttacaaatttgacacaaacaccagctcctaatac

SEQ ID NO: 618538 - DNA, 450 bp, Homo sapiens
cctagcctttgtataagggcactgacttttaatatttaacttaccactcagtcagtactgaaacagttcttagtgagacctgacctgccacaatccccactgtcaatttgcacatgatttctatcatgcttgtatatttatttgtcacaagaattgtagggagatggggcattataatctttctggctacttcctgctgagatggggtcgttgttacggagcatcgaacgcagcgctggagtgaaagagttcaatttgttcccagtagcagtctctgttttgggggcgtagaggcagcgcctgctgaaacatagtagtgtgcaacagcaacacatataaataggttgccactgttttcttctgaagtttaagttgtctagtcttcagttcacagggcttcaagaaggcacagcttaggtttcagtggtttcaaattaggaaaaaaaaaaa

SEQ ID NO: 618539 - DNA, 145 bp, Homo sapiens
actgttcccacataaattcagacccgcagtatgtctgggaatgacactgcagaaagtggtgagtgcgagcaaggagagcgtcctgctaagaggctgaggtcgcctctggttccaaggatgggatgtcagccttgaccttccgggg

SEQ ID NO: 618540 - DNA, 978 bp, Homo sapiens
ctcggccacgggcgaatcggcctagtcgtcgctgcacaagtatcgccggaaggtcatattatcgacgccagttccaagcccactagacctaaagccgggcggacatgcggtgtgatccctgatcccatacagaggtgggtggctaatctacacacactatgatgggcccgtgtctgaaagcgtggatcttcctggcatgtctggaagacccccatccctctgctccagttttcgaagtacgcagactccggattcatatttaaaactcgtggaccaccgctctcaatgaaatcacacggactgaaatcatgacgctcgcattttttcgatcatacactgacaagacggagggctgaacggggagaatggagcacagacatatctaagctagccagagaatgctaagatggatagacggctcctaggatgggcacccgtggagtcttcgacaagaaatcaagaccctaattcgaagttgctgacttcaagaagaatcaatcgtctataccatgaagtgactagccattagggctcaaagggcaaggggattggataagatatggtcattagtgcaacctgggggacatcgaaaaaacatagcacactcacgagccgagagtccacttattcattatattccagaataaaactagaccttttcaaccccacgcaaagtgtaggaatgaggatgagagcacggccctcacatgaattgatccatggattccagtttaccagagacagcaggataacaagtcgtaaagatatgtgcgcccaaatattggagagcgaagagtcaataaaccgagacattctcgacctatgaaagctacgacaagcagtaaacaagagggggggaaaagaagacattaagaaggcattgaagacgagaacaaaccacgaagattgtgataattggaacacccgctgcaaaatagacttacaaacccgtaaccgtatcgactagcccaaattata

SEQ ID NO: 618541 - DNA, 386 bp, Homo sapiens
  misc_feature (74)..(74): n is a, c, g, or t
ggggtgggtccgggccctttttcccaagatgactgggtgggggttcccggtttccccgggtttttttgaaaaantccaaattgggggggggaagggttggttttgggagggggcaaattggctttttaggggggtgggggttttgccggttggttttggggggcgggggggtcagggggggtttgggggcccctttcaaaggggggttttattttggggatttgggggggaccccttttttatttttcgggagggtttttttggggggggggggggggcccaaaggggaaacgggttttgggaaataggggggttttgggggggtttgggtttttttttgggggggggtcggggtttaaaaaataagggtttttaacgggccccca

SEQ ID NO: 618542 - DNA, 226 bp, Homo sapiens
gagaatcttttccataatacaaatgtaaggtaaacacaaaaacgtattgagtgcataacaagaatctatggtctcacagacattagcttataatttggaacatcaaaaatcaaaagtaacgggcaagtgcagtggctgatgcctgtaatcccagccactttgggatgcttgaggcgggtggatcacctgaggtcaggagtttgagaacagcctggacaacatgaag

SEQ ID NO: 618543 - DNA, 198 bp, Homo sapiens
tccactcatctcttccccaggaagcctcggccccaagatgggagacagttctgctgaagaattgaaactggccacccagcttgaccgggaccggtcatgccggtccggaaggtctataagagggagaaagctcgagtcatcactgaggacgagaagattttcaaagcgcttcgatagtctccgaattggctcagggct

SEQ ID NO: 618544 - DNA, 186 bp, Homo sapiens
actgtccaccgtgggccaggccggcgcctgtctgacctaccgtggctacgacgtacgcgaactggccgccgacgctacagtttgaagaagtcgcctacctgctgctgtacggtgaattgccaacccaggccgaactggccgcttacagcaacaagctgagcaaattacgtgtgggtaccgagctcg

SEQ ID NO: 618545 - DNA, 328 bp, Homo sapiens
  misc_feature (87)..(87): n is a, c, g, or t
ggagcgggacggcacagcttctctatgtcagggtctcagcatgctgcagaatatgtgccccagtgtctggatgtctgaatgacctanatttgagcggtcatcaatgagtatttattagcacatgctcttaagaagttaataactcggccaggcacggtggctcaggcctgtaattccagcactttgggaggcggaggtgggcggatcacctgaggtcgggagctggggaccagcctgaccagcatggagaaaccccgtctctaccaaaaatacaaaattagccggctgtagtggcatatgcctgtaatcccagctacttgggcggccg

SEQ ID NO: 618546 - DNA, 266 bp, Homo sapiens
ataatgtaaataaatagaaaacgaagcctccacgcgtggtttttaaggggggatgatgaatgtgacgccacccacagaatgcattagaagctggtttttctgtgctttgtcatttgactctgataggaattgttgttgcctgagtttgtgcataacttagttaaggtactgtatagatgaaccaaaactgttaaatatgtagttagtttgttctacttagagtagtcaataaaagggctatattcctggaaaaggaaaaaaaaaaa

SEQ ID NO: 618547 - DNA, 1224 bp, Homo sapiens
ctttccaagggagtggttgtgtgatcgccatcttagggaaaagatgttctcgtccgtggcgcacctggcgcgggcgaaccccttcaacacgccacatctgcagctggtgcacgatggtctcggggacctccgcagcagctccccagggcccacgggccagccccgccgccctcgcaacctggcagccgccgccgtggaagagtacagttgtgaatttggctccgcgaagtattatgcactgtgtggctttggtggggtcttaagttgtggtctgacacacacctgctgtggttcccctggatttagtgaaatgccgtatgcaggtggacccccaaaagtacaagggcatatttaacggattctcagttacacttaaagaggatggtgttcgtggtttggctaaaggatgggctccgactttccttggctactccatgcagggactctgcaagtttggcttttatgaagtctttaaagtcttgtatagcaatatgcttggagaggagaatacttatctctggcgcacatcactatatttggctgcctctgccagtgctgaattctttgctgacattgccctggctcctatggaagctgctaaggttcgaattcaaacccagccaggttatgccaacactttgagggatgcagctcccaaaatgtataaggaagaaggcctaaaagcattctacaagggggttgctcctctctggatgagacagataccatacaccatgatgaagttcgcctgctttgaacgtactgttgaagcactgtacaagtttggggttcctaaggcccgcagtgaatgttcaaagccacgagcagctgggttgtacatttgtagcaggttacatagactggagatctttagtgcaattgtttctcaccctgctgattctgtggtatctgtgttgaataacacgaacaaggtagcagtgctatctctggtcctcaagagacttggatttaaaggtgtatggaagggactgttagcaccgttatcatcatgataggtaccccctgacactgcacacataaccaggcatgggttaccatctcactgacctccggtgaagcgtctacattcagacttcctcgccctcctccaccgagatgcagagtctctgaagaagaagctagggttacctcagtagattagatcaaagcaacatgtggactgactctgcttcgtgatcagctgttgaagacagtgcaaaagga

SEQ ID NO: 618548 - DNA, 523 bp, Homo sapiens
ctttccaagggagtggttgtgtgatcgccatcttagggaaaagatgttctcgtccgtggcgcacctggcgcgggcgaaccccttcaacacgccacatctgcagctggtgcacgatggtctcggggacctccgcagcagctccccagggcccacgggccagccccgccgccctcgcaacctggcagccgccgccgtggaagagtacagttgtgaatttggctccgcgaagtattatgcactgtgtggctttggtggggtcttaagttgtggtctgacacacacctgctgtggttcccctggatttagtgaaatgccgtatgcaggtggacccccaaaagtacaagggcatatttaacggattctcagttacactgaatctgcttgttgatcagtgttgaaagtgcaaaggaacttttatatatttgacagtgtaggaaatgtctgttcctgatataattactgtagtacccttgcttaaagcaagagtttcaaacttaatgctaaataaacccatctattcctg

SEQ ID NO: 618549 - DNA, 1067 bp, Homo sapiens
gctagaaggtctccagagacgataattacattggcccaaggtatacttcagtggcgtcgaacccggtgaggcggaaatctgctttttaagaaaactgcttgggtgatgcacgagtgtaagcacgattctggtccactaggaatcagccaaggaattggtgaggcgcaggtgggcccctgatttgaggaacgtttgtccggtagcacgttccggagaatcaagtgtgtgaatacacttgtttgctagttggagtggctttgttctaggtataagcatgttgcacgatactgtaagggtgagtgtacgtgtgagtctactagaactagggtagcttcacgccatgtatgggtggcaggggcgaaggacggagataggttttcgccaatcgtccggaacctggtgttcggacgcatgtttctgaccatttgcttgtcattttacgaagattacgtgggtataaaggatctgggattaaaattaaagctctatgtgacgatggggtgggacgtggggtcctggaatttgtcctaagttgacttcggattaaaagtctcgtttagacattttgcatactttcggaacgttaaggtactgtagaagaagtaaaggtttggtggttggggtccggtgacaatggccatggatatgggagtctggggcatgtgagggtcggggggcatacaaattaaaatctgtagttcggtgtggggaagaaaacaaggaaatcccgcaggtaactttttcccaggacatgtccaggtcgcctgggtttcctaagaattgggtgctaacggccaagtgggcatattggttctgaactgtgtgccccccagggtggggcccatacgggccacggcggtcgggttataattggataaggccaggtaacgaggagtccgggataagggttaatgacttggcagaatcttggcccaacgaggacgcattggtttgttgttcactgggcagtgggctcttgttaagcacggctgcaacattttttgacagctggtttgaaaaggaggggaacaagttcgtggggagcaccctattggattacggggagc

SEQ ID NO: 618550 - DNA, 1016 bp, Homo sapiens
gctcactgcaagctccacctcctgggttcgcgccattttcctgcctcagcctcccgagtagctgggattacaggcatgcaccaccacgcccagccaattttgtatttttagtggggacggggtttcaccgtgttggccaggctgatctcaaactcttgacctcaaataatccacccacctcggcctcccaaagtgctgggattacaggtgtgagccaccatgcccagccttcattccttttgtggttaaataatatttcattgtatggatggaccacatttggtttatccattcacccattggtagacatttgggtcgtttctaccttttggcgactgaataagctgttttgaacatttgggtacaagtatctgtttaaagacctgttttcagttctgttgggcatacacctaggagtggaattgctgggtcatacggtaactatgttgaacttcctgaggaactgccaaactattttccttaacaactgcaccattttacattctcactagcaataacgagggttccagtttctccatgtcctgattcttatatttgaagtgttcaattcttgcaaacattttactcatgtcttggtgctcctgcttagctggtgcctgaatctgtgcgtggccacaggttagcctggtgtaggtctcgtggttccaagatggcaacaggaggaccggagaggagaaccaagccagctggggagccccagaggtgggagctagcttgtagggtccgaaggagtctgggcctctctcagaccatctcggaaccgtcgacccctggttccctcggaaggccgatgatacaccaaccacgcacaaccccacgcaagagcaacgacgacacacagcgcacgccgagtgcgcagagcagcgacgagacaacgacaagcgccgaaactccacacagagcgaacaacgcacagaccaacacacaagagccacatctacagaactcgccagcacgagcaagcgacagcagaagcacacacaggcgagaagaac

SEQ ID NO: 618551 - DNA, 496 bp, Homo sapiens
ctttccaagggagtggttgtgtgatcgccatcttagggaaaagatgttctcgtccgtggcgcacctggcgcgggcgaaccccttcaacacgccacatctgcagctggtgcacgatggtctcggggacctccgcagcagctccccagggcccacgggccagccccgccgccctcgcaacctggcagccgccgccgtggaagagtacagttgtgaatttggctccgcgaagtattatgcactgtgtggctttggtggggtcttaagttgtggtctgacacacacctgctgtggttcccccatgcgcatttcaggtgacaaattgcctgatattcgcgagcgtagtggaccgccaccgagagaaaggtaacaaaagggtggcaagtatatatacacatgggcatttcatcgaggttaacaacatttaaagacgcagtgcattgggtagttatcagtatgggatttatgtggcttaaaaaagtgaatttgggtgcatacc

SEQ ID NO: 618552 - DNA, 349 bp, Homo sapiens
ctgccttaactgatgacattccaccattgtgatttgttcctgccccaccctaactgatcaattgaccttgtgacaatacaccttccccacccttgagaaggtgctttgtaatattctccccacccaccccacgcccgcacccccgcacccttaagaaggtattttgtaatattctctccgccattgagaatgtgctttgtaagatccaccccctgcccacaaaaaattgctcctaactccaccgcctatcccaaacctacaagaactaatgataatcccaccaccctttgctgactctttttggactcagcccacctgcaccctggtgattaaaaagctttattgttca

SEQ ID NO: 618553 - DNA, 139 bp, Homo sapiens
ttgactagccgacggtgttcgatatgttctgtgcctggtatgatctgctgtgacggggtgtggtgatgctgccgtgccaggggcgtggatatgctgctgtggataggggtgtggatgatgctgtcgggctagtcggggt

SEQ ID NO: 618554 - DNA, 936 bp, Homo sapiens
  misc_feature (29)..(29): n is a, c, g, or t
  misc_feature (76)..(76): n is a, c, g, or t
  misc_feature (80)..(80): n is a, c, g, or t
  misc_feature (89)..(89): n is a, c, g, or t
  misc_feature (98)..(98): n is a, c, g, or t
  misc_feature (101)..(101): n is a, c, g, or t
  misc_feature (111)..(111): n is a, c, g, or t
  misc_feature (127)..(127): n is a, c, g, or t
  misc_feature (136)..(136): n is a, c, g, or t
  misc_feature (142)..(144): n is a, c, g, or t
  misc_feature (146)..(147): n is a, c, g, or t
  misc_feature (150)..(152): n is a, c, g, or t
  misc_feature (154)..(154): n is a, c, g, or t
  misc_feature (157)..(157): n is a, c, g, or t
  misc_feature (161)..(161): n is a, c, g, or t
  misc_feature (163)..(163): n is a, c, g, or t
  misc_feature (168)..(168): n is a, c, g, or t
  misc_feature (182)..(182): n is a, c, g, or t
  misc_feature (190)..(190): n is a, c, g, or t
  misc_feature (197)..(198): n is a, c, g, or t
  misc_feature (203)..(205): n is a, c, g, or t
  misc_feature (213)..(213): n is a, c, g, or t
  misc_feature (218)..(219): n is a, c, g, or t
  misc_feature (223)..(223): n is a, c, g, or t
  misc_feature (244)..(244): n is a, c, g, or t
  misc_feature (248)..(248): n is a, c, g, or t
  misc_feature (261)..(261): n is a, c, g, or t
  misc_feature (274)..(275): n is a, c, g, or t
  misc_feature (288)..(288): n is a, c, g, or t
  misc_feature (292)..(292): n is a, c, g, or t
  misc_feature (296)..(296): n is a, c, g, or t
  misc_feature (312)..(312): n is a, c, g, or t
  misc_feature (319)..(319): n is a, c, g, or t
  misc_feature (352)..(352): n is a, c, g, or t
  misc_feature (445)..(445): n is a, c, g, or t
  misc_feature (448)..(448): n is a, c, g, or t
  misc_feature (458)..(458): n is a, c, g, or t
  misc_feature (744)..(744): n is a, c, g, or t
  misc_feature (764)..(764): n is a, c, g, or t
  misc_feature (770)..(770): n is a, c, g, or t
  misc_feature (800)..(800): n is a, c, g, or t
  misc_feature (840)..(840): n is a, c, g, or t
  misc_feature (886)..(886): n is a, c, g, or t
ttttaatatcaaaagacaaaagaattggnacgtaaaaagaacatccttcccatcttcaaggtcaagattgaacgcngacncctgccggncgtcttccnggnttcccaggcnggaatgatggctcccngtccctgtngctccnnncnnccnnncntcncgcncnccccncataccagactgantgccggcnggccgcnngaccnnnccggccanccgcnncccnaccacccacaacacgccagcnatcnacccgggtgtgtntgtaggacagaannaaccatgaagggnggangaanacgcctggagcaattngggggcntggagagaacctcttaggagagtgtcaggctcnaggccagtgtcaccagaggaggtcagtctcagtccttggagtggtgggatggaaaccagacgggactggcatggtccacagttcttgccacanganggcttcaggngaggctgagggcccctctgacgcgtgtgcctggtcagggtgagccagggcaatgcagctcatacaagggcccagatggacagacggacctagcccagcccacgcatcggtaccgagcctggctcaggggcaggccgaggcttgtgcagtagacaaacatttacagcagacaccaggcagctcctggaaaccactccccaaaaaacagcattggaatcggggaccccagctgtgaacgaaggagcaaggaggccctgggagaggaggagaaccccagggaagatggngggaggactggggggctganggacgnagggggcctgggctcagaggtaggcgagcngctgctgtgctcctggcaaagggcctctcctccgccaggnctctggccctgaaggtctgccctgggccccattcgccctgggtgcnactgaggttaaaatgacagaggatgcagagtgcctcagggtgacacgaga

SEQ ID NO: 618555 - DNA, 327 bp, Homo sapiens
  misc_feature (9)..(9): n is a, c, g, or t
  misc_feature (99)..(99): n is a, c, g, or t
  misc_feature (126)..(127): n is a, c, g, or t
  misc_feature (133)..(133): n is a, c, g, or t
  misc_feature (161)..(161): n is a, c, g, or t
  misc_feature (184)..(184): n is a, c, g, or t
  misc_feature (305)..(305): n is a, c, g, or t
agattaggnaacgaggtaaagcatctactagtgtcagtagctgtacacttgtacacataaagctgaacaagatgaaaatggcatctcctggctgtgcancacaatggtccgagtgtcaggagccgnnggcggncttggcagtcacctattcttgctatatnaacagaggtactgatgcagaagntaggtaagtagtatttaagagttcacagtaaggtcattgcttttccccattttatgatttgtagtgctttctctgattccatttcctaaatctttcatccatttaactatactatactatnattactataggcagtagtttac

SEQ ID NO: 618556 - DNA, 145 bp, Homo sapiens
ccgcggcgtgttcatgcagagctagaatgcgcccatttcactttgtgttagccaccacagttagccagtgctcataacagcacattgctattcctcctccaactgcctgcccacaagcatcttgcttccacatatgagactgtgg

SEQ ID NO: 618557 - DNA, 771 bp, Homo sapiens
accttttcctcccttaaggagtataattccctccgcgtggaacaattttttcccccctccacctttttgataactgtttccccaaggaccccaatatcaattttgccgccggttcacctttcttgcaggaaccaactccataacccacactttttatccgctgccaagaaaaatgccacaagccaatcacctatttgtgcttcataaaactatacaagattggtcctccttccgccctctacaagaacttgcttgttttctccccacgcgttctacacaatctaaaccacactcgttttgtcgcccaggatccagcacaccatctcaatgctggggcttgtataccccgcggaaacccatgccgtggcaaccctcctttccgggacaggcttttcccggccattctcactgccgttgtgtggcatgcccaccgcggaccgttttgctttctccccgtctttcttcatgcggcaaccccccccgcgtatcctggtgtgcgtgcaccagtagcatgactccttccggcattctttctccccctggcaagcattttaccaatgattcacatcttcttgcaccaaaaatctcttccataattaacaatctatccccaaggctgcccccagctttcctcctccaggatagcaccctctcttgccactctgtctcacactccatgagatatgagccgcctgcagttctcttcacacatgcggcggctcccttcccatagttaataaaagacgaccctttgtcccatcaatagtcaag

SEQ ID NO: 618558 - DNA, 488 bp, Homo sapiens
ttcagatgtttcatttgtagtataatgaaatgtttacagaaagataactttttcattaaaatatttttagaaaaaaaaaaaaaaaaaaaaaaaaaaaaaaaaaaaaaaaaaaaaaaaaaaaaaaaaaaaaaaaaaaaaaaaaaaaaaaaaaaaaaaaaaaaaaaaaaaaaaaaaaaaacccctggggggggcccccgcccccaaatccccctaaaggggaggaaataaaaaatccttggccccttttttaaaacgcaagaaatggaaaaacccgggggttacccaaataaaagaggtttgaaaaaaaaacccttttttcacaatgggaaaaaaccaaaaaggccccaccccaaacccttttcaaaaaatttgcgcccctaaaagggaaaaagcaaaattgaacccgttaatttttggtaaaaaatccggaaaatttttggaaaaattccccatattttaaaaaaaaggccatttgcatcttttaatat

SEQ ID NO: 618559 - DNA, 360 bp, Homo sapiens
  misc_feature (231)..(231): n is a, c, g, or t
gcttcatcccaggacatcccgtggagtggagacaatgggcagcgggagacaatacaagaccacgcttcccgtggtggactcggcggctcctttttcctttacagcaagctcaccgtggacaaaaacaggtggcagcaggggaacgtctttttatggtccgttatggattagggtttgcccaacccctacacgcaaaaaaaccttttcctgttttcgggtaaattagttggncggccggcaaaccccccctccccggggtttttgggttgcccgaggaattttgggacgtaccccctgttaaaattttccggggggccagcatggaaataaagcccccaaggctgccctggggcccttcca

SEQ ID NO: 618560 - DNA, 453 bp, Homo sapiens
ccctccaggatgggggtgaaagtctgggtccatgtcccagaacacatctatgctgctccaggacagaaggacttcacgtctcctgggggtggatataggagacaatgctgcctggcagcacacgtggatccaacagtgccaagtgatcacgtcttaggcccagtggaacacaatgactatcatactgatgcagacctggcaggtggagagcagctaagtgtgtggcccagagagcctgtctgtgtggagcacgtagtgcacagaatacgtgagagttgctctggcaggggcaggatccatcacaggatcgctgggaggtgaggtgtgtgtgacccactggatgggagggcaatgagtgtgcacatacaaatggggcagtgtgcatgcaacacacataggggaggagtggcccagaatacagagcacacaacacacaagggagagaaccccaga

SEQ ID NO: 618561 - DNA, 930 bp, Homo sapiens
tcccactttccatattaaaggatgggtccagccttaaaaacttcatggacgggagcaaatccagtatccacggatttcttctcaagggcactctaacccatcagaatagccgcggaagttccattctcatgaatactctagccatgaaaaaaactcaatgaggacacagacgaatccaagtgaacagaagagaggaatctatggagttcggggatattggggtgcatctcgatcggctccaggattatgaaacctaaacctcccatggtaaataggaagcgtggatgcaagttccttccataatactatgtggcccattaactcgtgtaggccaagaaagctacgggcctcgtgatgccctatgttcataaaagctcataaaaaccgagaccattgggagaggtctaaagatatacacttcataaatatataatcccctccgggaggataggaggaagtagaaacaaccaccaaaccagagacgttataaccacgagatccagtgggccgaaaggggcttgtgtgcaaaacccgaggggcgagatatcataacagattatagaggaatggggaaacatttcagagcccctaagacaaagggggaaacaggggtcaccaagagtctaccacagtgttgggagtggaacaaccacaagggggcccgaacatagaggcacctacaaagacaaaagatggccagaacggggacaaaagacagggccaaaggggaaaacgaaagggggcggaccccgcggggaccccacaagcgtggcgccgtcgacaagacaaacacaaaggaagggcttacgcaaaacatggttggtagaaaactcccccccgtggtctggcaaaacaagggggcccacagaaacttcgggggcaatagggcacagaaacagttaccgggccaaaaacagaaaacccctaaac

SEQ ID NO: 618562 - DNA, 633 bp, Homo sapiens
  misc_feature (198)..(198): n is a, c, g, or t
acatcgggaggaacgcagggatgcctttcgggtcaagttatccatgcccggcaggaggtgcgcagccgcgtcaccaacatggtctcgcaccagctgtcgttccagcgttagagacggtaccaactatttgggcgtggcgagcaggtcacccaagtgcagagaatagtcaagcgactgtgccgggatgggtccattcgnacagtgtccgtccatatgaaggaatcgtgcttgaaccgttgagtgggctgtgcctttaactttgatggcgaagtatcgagcgaggaaagacatcaagaacaatttggtgctcatagtatgagcggctgggatgagattctagactctggcgtaccgcacagaattccgagacaggcgcgctgaaacagcttcatcacgcagcagggcatcgagaggtcggcatcagacaaaagaagagcagtctacagatcaccagccgaggtaactgggcagattggctgtgcggtgagagggtatcaagtatcgtcggaatgagctcttcctggatgtgcgtggacgagtgtgaacctggtcatgtccccacaagggcaggtgctgagtgcccatgtgtcgggccgggtggtgatgaagagctacctgagtggatgcctgaat

SEQ ID NO: 618563 - DNA, 431 bp, Homo sapiens
cccgctccggagtaggagcgcaccaccagctccagctcgccccgcccgccactccaccaacctcggggccccgccagggctcggccaggcccgactccgaccccgccgcctgcagtcaccctcgcgtcccgggcgccgccacccccaccgccaagcagcggggtccctaccacacctccctccagccgaggcccgccgcctccgcccgcggcagctccgcggcccgggtccagggcctaagcagggcccaggtccgggtggtcccaaaggcgcaaaatgctggcggccgaagccaggtggcggcccgggcctaagctacgtgcggccaccccactagccgcatcgaggcggcggggacgcgcgggggccgccagcaccacccgccctaccaccagcagcatcaccagggaccccgccggcggccgcggcgc

SEQ ID NO: 618564 - DNA, 103 bp, Homo sapiens
ttcggtccgtggccagtgacggccgagtgtggcagatggtgtggagaagtcactgccgaggattgctaggtgcagagtgcctcagtcctgcgacctgaacgaa

SEQ ID NO: 618565 - DNA, 253 bp, Homo sapiens
tttacccgactagcccgacaggcagatctcacttacagaagagcacattccagaaaagcagccagcaggggtagaggcccagtgacagcagtgggaagagcaggcgccgtaggtgtggtgctccagcaaaccctgggctagcgctgccagggagaagcttgcaagcctcggccagtgacagtggcgctccttcaggctccgccacagtaacaggcttgccaaggagcgtgcctgtcgggctagtcgggggggt

SEQ ID NO: 618566 - DNA, 2067 bp, Homo sapiens
aaaggccggtttctacccgatgatctcttgggccccgtcccgagagtgaggcacggcgccaccaggcacccccgatacgcagcgtgttgtgaagtgcccttgtgagcagcgggggatagggaacagaaaaccagctgtcagcgacagcgaggtggtgccccagagagggctgcctcattcgcctggctgcagggtccgaggtcgtcttggtagcatttggcaggaatttatttaggaagcattcagcaaaccgagtgtgtgtggtgctgggagatgacgacgaaatggccctgcccccaaggaagcccctcccctgggggcacaggtggggagggaggtcatgagctttgtgtgtgtgacaactgctgatgggaatgctattggcacgtacgaggggtgcctgtccgtgtcttgggagagcaaggaaggcttcccggaggagttgctgccaagttggcccagaaggatgaggaggagttcttctggtgaagtggggagggcagaggcaggatggtccctacggagcatgtggggacgctcgtgttcttccagaggatggaatgctgggcccgaagcctgaagtattgttagggtagagacaggcgggaggtgcgtggagaaggggtcatggaggtcttgttgggcagatggcggtgggacgtcccaggcagggggagcatcttgggcaagagcccagggtgcgaggtcatgcttatggcacattggaccagctggaggacagccagctcaggagagcagccggctggggtgtctgcccacgtgtggggcagggatgggctgcagcggggagggatttgggagcttctgtcgtagtcctgcagggagtgggagctgtgcaagaaggaagggcggagcggctgtgatccaatgactttgggaaggccactcctgtgatggagtgggggaagacagaccccaggccaggggtcctgagtcaaggcagtggctgaggaggcacctggggaaggtgatttggagaggctttgggggtaggtcctgggggtctggaagggctctaggccaggaattttcagactcctgggggcatcagaatcacctggagggcttgttaaagcaaagcttgcccccagcctcaggcagctgggcggcaggaatctgcatgtctaacaggctcccaggggatgctgacttgctggccagggtcccacactttgagaagccccgcctgaagcttacaggacagggcaggttcttgagccattgagttgggcaatgccatgggaagttgcaggtgcacagacgttgccttcctggctgcggttgaacctgggctccatttgtccccttggagctccaggcggccgggccgacttcgaccctgagctctcctgtctgatttcctttccaggtggcacgtctctgagcttcctggtgttggtgacaggctgcacatctgtgggcagaattccagatgctgaaatctacaaaatcactgccactgacttttaccctcttcaggaagaggccaaggaggaggaacgcctcatagctttgaagaaaatcctcagctcgggggtgttctatttctcatggccaaacgatgggtctcgctttgacctgactgtccgcacgcagaagcagggggatgacagctctgaatgggggaactccttcttctggtgaggccctgggtcccctgcagagggtgggccctgggtctcctgcagagggtgggccctgggtctcctgcagagggtgggccctggttggcatctgaggccttgacctccacttgcaccacccccgggttatggggcacctctggagagttaggacccaggcctgctctcagcacaatgagaggaaaactaaccctgaactccctgccaccccccacccctggcccctggaatgtgttagagtgtagatttggaaaagaaacctgcgccaggcatggtgcctcatgcctgtaatcccagcactttgggaggctgaggcaggtggatcacttgagttaaggagtttgagacaagcctggccaacatggtgaaagcccatctctactaaaaatacaaaaaaaaaaaa

SEQ ID NO: 618567 - DNA, 692 bp, Homo sapiens
tgtccccggctcggaggctcccggcggagcagtgaggcggccctgccctgggcccgggaccccggcgtcgatgtcggcgcccggctcgtaggggctgcgttaggccccgcccggtccaggcccagccgtggtccctggactgtagactgggtcagggcattgttcatgcatctgaccgacctcagtcagccccggcaatgactctcaggtgaacgagaatactcttgcctccagcctatcgccgtgcacgtgccccccatatatggtgagaataacatcaccacaggccagttgtgaaaccccaaatcctgacgcatgttatcgaagggttagtgatccaggagggggctggagcctttcccggtgggacgctcgtccctgctggtggagaatctcaatgaacgaagtatgcatcacggggttcctgccttgagaaacttcctagcatcagtgatcacgaccgaccgaccgacatgacgtcggagatggaggagccctatctgcaagaatccaaagagcgagggtgctcccctcaaactcaagtgtgagctctgtggaccggtgtggacttttgcctataatgttcaagcgttccaagtcgcttctgttccatggcttgtgcaaagaggtacaaacgtgggatgcaccaaacgggtgggacttttccactcagaacggagcaagctgcaaag

SEQ ID NO: 618568 - DNA, 939 bp, Homo sapiens
ggagggacccggagttcagctacagcatagatctagcacctagtgaagcttctcgacggtgtctggttttctgctccttgtgtcctgagtgtcagcacgccgaacgcttctgttgtcgtctccttgagcgaggcttgttcgatggggctcgggacatgtggagagcctactctgacatgagagaagccaattacagtcggtctcagacaagatacttccatgtctcgtgcgggaacctatgatgctgccaaaacggggacctgggggtgcctgggccgcagaagtgatcagtaattgccagagagaattatccagagactcacaggccattggtgcggaggactcgctggccgatcgaggctgccaataaatggggccaggcagtggcagagaccccaatcacttccgatctgctggactgctgagaatatactgagcttcctcttcactctgctctcaggagactggctatgaggccctcggggcagggatagaaagttagtgaggtctatgtccagagaagctgagattatggcactatcataggcatctaattaaatgcttaagaggtggaatttgcgatgtcacgagtacacacgcattggaacacagcgatattgggcgagctcgtggccacatgcagcaacgacgcagggacccgtaatctgtgacgcactgcgggactccataggatgaacggacaccgtggcattccggggcggcacacctggagacaatcagggcctgcaccgaccctgtcgtgcccggcaccttccgtccccttaaatagatatgctcccgtcatggtagcacctcagagtctcttgctcactgacgtcccggaacgcggttacgtgccgcgcacaccacggagccctactctaccacgcagcagcctccacggagcgaccttccatttaacatctccccccgcctcgg

SEQ ID NO: 618569 - DNA, 1122 bp, Homo sapiens
gccagctcccaggaaagctggtctgctgagctggcccctgccctggctcccagtgtccctgcgcgacccctgcccttccctgagaccccatgccttggctgcctgccctgctgtcccgtgaatgctccatgcctgaaccatgtttttcacttgtgtgcccaaatgagtgccatggtggtctccgtgtaaaaatccatggtggcagaacaatggacgatgtttggctggcctgcctgtcagatgttcctgggtgaagacggagtgctgagatttgcccacatttgccctggagacgttagatgggccaccagagggccatcatggcccacatgactgtggaggagatctataaggacaggcagaaattctcagaacaggttttcaaacgtggcctcctcagacctggtcaacatgggcatcagttgtggttagctacactctgacaggacattcacgatgaccaggactatttgcactctattggggaaggctcgaacagctcaagtccaaaaagatgcacggactcggacgaagcagaggccaaggagacgatgctagggatccagggaagctaaagccaaggcaggacacggtgtctgcatcagaacctgagctgacatcgacgatggccaaggcacagcagacgataacgaacctcgacggcacggctgcctatgacatacgcaggtcaaacaccccgacgaagcacccggccttggcccttggcctatccagcttccacggtggacaagactaacgcagcagaattgacggaccacccggctcaagtgtgccgtgcttgtgtgcaccgtgaccccaaacgcgatgctgcacaagcaagcgacgaaggagcaatgcgccgcgtgggtacagaccgcgtccctgggacctgccccgccgtgtccacgcagacactatagctgagaacatccggcgcgccgctccaaagcgcttgacgagacaataaccataagtcagtcagcagtacgagcccagctcacaactatctacgcccgtaggcccaagaacagagtttcttagcacgatctcgcgtgcggaacgcaagcccactgagcacagcgtgcgcagtccatatccatgtgaatacgcacatactcacaa

SEQ ID NO: 618570 - DNA, 714 bp, Homo sapiens
  misc_feature (24)..(24): n is a, c, g, or t
  misc_feature (128)..(128): n is a, c, g, or t
  misc_feature (131)..(132): n is a, c, g, or t
  misc_feature (160)..(160): n is a, c, g, or t
  misc_feature (164)..(164): n is a, c, g, or t
  misc_feature (176)..(177): n is a, c, g, or t
  misc_feature (217)..(217): n is a, c, g, or t
  misc_feature (381)..(381): n is a, c, g, or t
  misc_feature (423)..(423): n is a, c, g, or t
  misc_feature (589)..(589): n is a, c, g, or t
  misc_feature (656)..(656): n is a, c, g, or t
  misc_feature (669)..(669): n is a, c, g, or t
  misc_feature (712)..(712): n is a, c, g, or t
cctgcacgcggtgaccacagcgtnaaacggctgtatggcttcaatggcttgatgaagcatccgttgcaccagatgctggaaccacggccgggttgacgccgttgatcctgctgggcattcccacggangtnncgctgctgctggccctggcgattgcgtncagntgctgttgcagnnttccaatgtcgacatgcgcctggggccgctgcgctgggtnttcgcctggggccggtgcatcgttttcatcacatgaaatatggccgggcgggggatgtgaatttcggcttgtttttcaatctatggggattggctcttgggcaacggcgttttacagccaatgactatcgaaatgggggcagggcgacttggggattggcaagncggccggattttccgccgggagtatgtgggcgcagttgcganttcccgtttcaaggaacggttgcaattgagcaaggaagccgcccggtttccagtcccgtctaagttcgaaggattcgtacgtgcaaggtttgcgcaaacgacgcccccggccgtgacgcccaataagttgtttcaatggtccgggaaaaatgcgcccaaatccganaaccccggcgccatgggagccttccggtcagggtgctgccgcccgaaggccaattccaagcgccaantcgcaaacgccgncaacaaaaaccagggcgaagttatccggcaaaacccagttggntt

SEQ ID NO: 618571 - DNA, 87 bp, Homo sapiens
ccccatattagcataccaaaggctctgagttctacagtgaagtgaaatcaactctttctcaaactcatcgcacaagcgactttttaa

SEQ ID NO: 618572 - DNA, 243 bp, Homo sapiens
tcagctcggtaccagctctgcgacacgtcccccgccgctaggatcagccagtgtgtcagatccgaaagctatccgccagcggccacacactcaccgccgcaaaccccggcatgctttccagcatgctgcacacctggctgatctggcggcgggggacggtgtcgcagagcttgaacagcttcgtaaaactgctggaagaacgcaatttggcagcgccctagatcaagtgtgggagcgggcttg

SEQ ID NO: 618573 - DNA, 777 bp, Homo sapiens
  misc_feature (579)..(579): n is a, c, g, or t
  misc_feature (765)..(765): n is a, c, g, or t
  misc_feature (770)..(770): n is a, c, g, or t
cgaagcacacaacaagaccaccgcccaccccacaaagttctgtattacgcagccaccaccaaccccagcgtttcttttaaagacccaccacgctgaaacacctctctaagagaaccccctcatttatatgtcttatattatataccaaaagacatctagtaaccaacatagtcacccacggtgcagcaaatcacacccggagctagacagccaaaataaagaaccccaccaggccagtaatatagaagcacccccgacacctgttgtttaccattggcaacaaggatactgtccatcccacgaagcctacaaaacgaccatagaaacaccaacatcgttcccccccattatttgggaaaaacagagttataacccatttgttatcccccccccccattagggttatccccccccaatatagggaggccccaacccccccagatatgaaggataaaggcccctttatttaaaagcccacccttttttatttttaaaaacaaaaaaagtttatcttttaaccccccccaccccgggcccccagaggggaaactccaaaaaaaaattgtttgtacaaaggangaagagagctccaccctttttttccccccccgccccctcctgtgtggccaaaattggaaggtgaaaccactaaaatccaagaccccccccccgagaaaacaaaaaaaaacgggggggtttgggccttaattttccccaaaaaggtcccaaaaccgcaaaaaacaccgaaaataaaaaaacttgatnagtgntcccttc

SEQ ID NO: 618574 - DNA, 352 bp, Homo sapiens
tgccagaagttggggtctcagccagtaagggagtttccggtcacgtcttggaactctcctatcttgtagacagaaagtggttatcctctgtaaagctgcctgaacggggcagttcagtagtcctgccggatgatgcccttctgactatttaacccctgtacactttgtaccgctatgtgcacatcttgttaacagttcggtctgaagccgaggctccagctcctaacactgggtattcgcctcacgtcttggagtacaggcatgattcacgtggtgcgcacagggatgtatctagttatatgtacggcatacatggcagtcatatagtgctctagaacacagaacttctcct

SEQ ID NO: 618575 - DNA, 597 bp, Homo sapiens
cgctgttggctggcgggctctccagagtggctgatgctcccacccggccgccgcaggcctgtgactgctggtcgtcttcgtgtggcttctgcttagcacctggtgcacaagctcctgccagtggccatccagtgtgacctgtgtccaacccctaccacgtggtgatcctcttccagcctgtgaccctgccctgtacctaccagataaactcgaacccccacgcaacccatctgtcatcttggaagtacaagtctttcttgccagggaccggaatcgccagatgccttctcccctggacagcgtcagacaaccagctcaatgcccagatggcagcgggaacccaggctacaaccccataagtcgagtgccaggacagagtgcgcaccgtcagggtcgtggccaccaagcatgggcaacgctgtgaccctgggatattactaccagggccggaggattaccatcaccggaaatgctgacctgacctttgaacagacgtcgtggggggacagtgggtgtgtataactgctccgtggtctcaaaacaggaactccagggaacaattgaggcctaagcagaactcatcgtccttgtgtatgc

SEQ ID NO: 618576 - DNA, 110 bp, Homo sapiens
acggacccattcagaactctacccatgcggcgcaatgcctggctgcattctgttcctgctgttcctcgctcacctgttcaacttttttgacctgcacctattccctgcga

SEQ ID NO: 618577 - DNA, 274 bp, Homo sapiens
  misc_feature (1)..(1): n is a, c, g, or t
ntcggactgcgttacttctgctctgactgatcctcacccttcttctcatatttacatatacctacatttcccttattggttttttacactgtcatgcccacctttgattggtgtctttcttttagcttttttgcacactcataaacccaatcagcaggcactcccccattctgagcctataaaagcccagacccagacacactaaggggagaaaaacacccgaattcgggaacaaccttggattcccctctacactgaaagcagaaggtcgacg

SEQ ID NO: 618578 - DNA, 397 bp, Homo sapiens
  misc_feature (165)..(165): n is a, c, g, or t
acttaaggatccggaggttgagtcgcattgcgaggctgaggagcgtgggagctgcgctcaggatctcgtcgcagcaggaggagctgaagccgcctgagcgggccaagcaggatattgcacggcagctgcgttagtacccaggaacttcatgagcgttaagcttgnccttgacatcgagatcggcacctaccggaagcttgctgagggcgaggagagccggttggcttgagattgagttggaaccgtgaatatctctgtgatgattccactggtggcagtagcagtggcggtggcattgggctgaccctcgggggaaccatgggcagcaatgccctgagcttctccagcagtgcgggtcctgggctcctgaaggcttattccatccggactccaagct

SEQ ID NO: 618579 - DNA, 769 bp, Homo sapiens
aaactcccctcggtttttttcaaaaaggggccaaacccatccttttacaaccccccccttccgctaattgaaccccccgagcacctaccgttctattccaaagagaattttgcaggaaaatacttaaacctttgctccccttatgtctgttaaataggagcccttattcctgattgccccaaccccccacacatcgcagtcatgtccccccgcgaccaagtttccttataatagttttcctctcctcccccccctccgtgcagacacaatatacctccgtcaggacaccccatcttcattaaaacacccttcgctccccccactctgttctccgccgcccaaatatatctattataatatcacatctgttttttactgtttcccccgcaatatacttctaggcgaacatttcttttacggattctatatatggggaattttgcccacaatccacattgtcccacccccactctaagatactacggatagattcacatactaagtcggatagagacacctccaccgcgctctctgtgcgcgcacttgctaatgaagcagtgtcgctgagccagcagtgagcgccgcacactggagtattgaagcgcatcagaaacgggtatggaagaaccgcgcataagataaccatacatagaggggggttgaaaacgcttcaattccgggtggagcaaaaatctttttcagggtggttggacaccgcctacgagttattcctgttttctattaaaaaaatggtgcgcccacaaaacac

SEQ ID NO: 618580 - DNA, 212 bp, Homo sapiens
agggggatgggggggggggggccccttttgggaggggggttccccccccccccccccctccccccccccccccccggggggggggggggggggggccccccccttttttttcccccccccccctctttcccccaaccctaatccctcctacctcacccgcagggggaaggaggggggataacaaaccttgaataaaacacaagcctccgtta

SEQ ID NO: 618581 - DNA, 105 bp, Homo sapiens
caccttctgtaccgatgtccgcggacgctacgccgtgcacgagtaaggagggtcgttgcgtgtgagtcactatgacagcgctatgcggcgctgggcccgggtgga

SEQ ID NO: 618582 - DNA, 424 bp, Homo sapiens
  misc_feature (23)..(23): n is a, c, g, or t
  misc_feature (31)..(31): n is a, c, g, or t
  misc_feature (42)..(42): n is a, c, g, or t
  misc_feature (57)..(57): n is a, c, g, or t
  misc_feature (124)..(124): n is a, c, g, or t
  misc_feature (176)..(176): n is a, c, g, or t
  misc_feature (205)..(205): n is a, c, g, or t
  misc_feature (344)..(344): n is a, c, g, or t
  misc_feature (399)..(399): n is a, c, g, or t
  misc_feature (408)..(408): n is a, c, g, or t
cacaggctgggttccagttctgnacctgagncacggtttttncctcatgtgcacttnctgggcaaggcgcttcccttcatctggggccaaaggcaaggcaggcacgtaagacccttccttcagnctggacctgtgtttggggacatgaattctcttccttctcctccttgtctggnctctgttgacaaaccgggacatgtttggncagtaaattgggcaccgtgttcacactgtttcctgggattcaagtatgcaaccagaccacaggagaagaaaagttccagggatccctttccccatctgtcctcttgatgtgagagagactctgagacttcttccatcgnaatgacctgtattaaacacaagccccccaagcaaaagaagaggttgagttttctnccagggttnagattagccctttcca

SEQ ID NO: 618583 - DNA, 560 bp, Homo sapiens
tacgaatcgagctcggaccccggagtgtagaaagtctcaatagcaaagacagtgcttcatatcgaggctctctactgcagtggagactacgggtgaccatgatgcccgatcaacgaagtgaagaaaaagcttgaggatgcatttccataagcttccaagcctcctctcgtatgatgatgtaaacatgagaatagctgctggtgaatcttgggcacttctctttgaatgggccagaggaatagagagtgactttttttatgaagacatggagtccttgacgcagatgcttagggcctgggcaacagatggaaataaacaccgggccaaagtggacaagagaaagcagcggtcagttttcagagatgtcctgagggcagtggaggaacgagattttccaacagaaaccattaaattgggtcctgaacgcatgtatatggatggctgggtaaaaaaacacacctatgacacctttaaggaggccaccgacattggccgccgatcgatcaggtgaatgcgtttgagctggtagatcggcgttccggccgccagctggagctttt

SEQ ID NO: 618584 - DNA, 158 bp, Homo sapiens
agaggagtacgcagcaggacatctatgcagggtcagtgcagcccatcctaaggcacttgctggaagggcagaatccgttgtgcttgcctatggacccacaggagttgggaagacggacacattgcttggcagcacagagcaacctaggtgatcccgcg

SEQ ID NO: 618585 - DNA, 394 bp, Homo sapiens
atccctgatgtatatagaatcggcttcctagctagtacactagtgagcttcctactcaggccaatatacacctatcgaccgcccttactaaccgacacatagtcacatagtcgaatagcgtatacacctgtcacatatatataagcgctcagcgagatttagtcgtataaaccactactacagctagggaagaagccaagcagaaaacggtggagtagaataggaaccctatgatgaaccggcacaaggagaacctgaagtccaagactcaatgataaaaggatgacagaaatatgcatgtggatatagataggagatgtcatcaaactccaccctcctatggagcctctggaccagaaaaccaaagcaggcaacagctactggctgtcgaaca

SEQ ID NO: 618586 - DNA, 244 bp, Homo sapiens
aatctgggggaaggggggggggggggggggggggtttttttgggtcccaaaaaattttccccttttaaagggggcccccgggccccgaggggggtttttttattaattggaccttttttcccttcccctttccccctggggtgggttgggggccccattttttttttaacccccccccgggggttttaaaaaattttttttccccgggaaaattttttaaaaaaaagggtttttttttttttca

SEQ ID NO: 618587 - DNA, 484 bp, Homo sapiens
  misc_feature (115)..(115): n is a, c, g, or t
  misc_feature (125)..(125): n is a, c, g, or t
  misc_feature (194)..(194): n is a, c, g, or t
tcaacccagccaaaaaaatgaggtgccctcggggggggcccctgggactcctttttgatgattttgcctctaaaaagcaagtgaggcggtgctcattgcccccctgaagctgcgnagatcccaanttgttcggggcaggatggacagagattggagcccagagcggattgggctgtaacagctttccggtctgnaagataacagcccaggaggacaagcagggtgggcctagggacaaactgcaaaggctcctgtcccctggggtttttgcggcatttgtgtcatcttgttgccatggagttgtgatcatcccatttaagctgcagcttcctgtcaacacttttcacattttatgttaactgtagataaagtggtttgatggtgacttcctcgcctttccccccccatgcattaaattttaaggtagaacctcccctgttactgaaagtggtttgaaagtgaataaacttcagccccatggcca

SEQ ID NO: 618588 - DNA, 106 bp, Homo sapiens
  misc_feature (23)..(23): n is a, c, g, or t
  misc_feature (33)..(33): n is a, c, g, or t
  misc_feature (60)..(60): n is a, c, g, or t
gtgattatacgttttattagacncgggaggggnatggcagggcttcataagtgttccttnaaattaaaaaaaaaaaatacaaaagctacgtagaaaacgtcagatc

SEQ ID NO: 618589 - DNA, 451 bp, Homo sapiens
  misc_feature (115)..(115): n is a, c, g, or t
caagcagtaaatacatgactcaggttgtgattgatgcaggagcactcgctgttctttcccgagccgtgctcaccgaagctccaaaactaacattcagaaggaagctacgtggacnatgtcaaagatcacaggcgggcgccagtaccaagataccgcaagttgtgaatcatggattagtcccattccttgtcagtgtactactctaaggcagattttaagacacaaaaggaagctgtgtgggccgtgcaacaagctataccagttgtggaacagttgaacagattgtgtaccttgtacaacagtggcataatagaaccgttgatgaacctcgttaactgccacagataccaagattatactggttatcctggatgccatttcacatatcttacaggctgctgagaaactaggtgaaactgcgaaacttagtataatgattgccgaatgtgga

SEQ ID NO: 618590 - DNA, 230 bp, Homo sapiens
aaggctttttttttttatttcccgggaaaaaaaaaaaagggatggggttttttgggattccttgggccggtaggcccttttggaaaaaggccaaagccccaccccaggtttgggtttatcccccccctttctggggaagccccctttggatggggggattccaacccggggttgggaaattttttccaaaggccttttttttgaaaaattaattttaaaaacccttccca

SEQ ID NO: 618591 - DNA, 140 bp, Homo sapiens
ccaccgcgtctgccgatatccgcgcagtggtgtacgacttcagccccagccgctcgggcgaacatgcacgcaacttcctgcaagactggaagggcaagctggtctgcgatgattttggtggttacaaagccagttttgca

SEQ ID NO: 618592 - DNA, 218 bp, Homo sapiens
tctgtgggccagtacacatgtgcatggtgagagcaccgtgtgagtgtagcagggttggagtgatggctctgcaagcctaggaacagcaaggagtctgacatcaccagagagggtcgtagaacagagttctgtctcccagcttctagaagggaccatgccctgctgacacctggattttaggcttcaatgccatcccgaaaaccaggtgatggacaata

SEQ ID NO: 618593 - DNA, 274 bp, Homo sapiens
aacagtatagtgaacaattgttgtactgtaccacttagttacgatactcgttgatcatcaaacgacctgtgtgtaatatttttcactcaaaacgtagcacccttcagcaggaccctataaaactttcctccagcccttgcctctttgcaggtagccccttctctgctgagctgcccactgcaacatattttcacaatttctctaataaatctgcccttctttacctacaactaccttggtaaatggctttaccacctgcaaaactgaccctagg

SEQ ID NO: 618594 - DNA, 136 bp, Homo sapiens
tgggcgtatggaggtggcgagcaagtggatagatgcaggagagtcaggtgacaagaagagagtgcctaagagggttcagcataattacttgcttggttggcaagtttagctctatccttgagtgtttttatgttgt

SEQ ID NO: 618595 - DNA, 144 bp, Homo sapiens
attccataaataaatcttatgttaaatctgaaactaaatggaatacacacagcctagaaacgaggtaaaccacgagcaagatacatatcaaaacactggacatcaagaaattaccaaataacaaagtacattagatagaattac

SEQ ID NO: 618596 - DNA, 241 bp, Homo sapiens
tccctctgcgtgtctacgtctcgcggtcctccctccctggggggtctccgctcctggcgtcgccggcccttggtgcccctctgtgcgctctcaatgctgtcgggctcgtcggggcctgtcgggctcgtcggggcctgtcgggctcgtcgggacctgtcgggcacgtcggggactgtcgggctcgtcgtgacctgtctggctacgtcgggaccttggcggcctacgtcgggcccggactcct

SEQ ID NO: 618597 - DNA, 413 bp, Homo sapiens
  misc_feature (10)..(10): n is a, c, g, or t
  misc_feature (16)..(16): n is a, c, g, or t
  misc_feature (60)..(60): n is a, c, g, or t
  misc_feature (227)..(227): n is a, c, g, or t
  misc_feature (344)..(344): n is a, c, g, or t
cctctccggnaggcancccgtctgccctcctcccgggtgcgtcccacgtgccctggggancttgctcactcactgttgctcccatgaggatgtaactccgctggggcaggtctttgtcttatttgatattttatgcgccaggcctcctaggcactcagcaaattgacggatgaacagagttgaaggcataaatgagcctccttttcttcctctgtgattggggaganaagggatggccactgcaaaggctgcagggagagaatcgaggccaccccaggccggcactcagcaccacatctgcccagaaactcccacatggctgccagcatgcccggacctgcttnccagcttctgcgttatccaagcgggaccaacaagcggacgctgcccccacgccgagccctatgcagttc

SEQ ID NO: 618598 - DNA, 710 bp, Homo sapiens
ccgatgacgcagacctgatttcggcgagatctgcgataattagcgtatcaccgccagcgatatggagcgcttgctcaatgacatgaagatcacagtactcatggacatttatatctagtccctgtctatgaaggaattagcgtgcattggtatcattgtattagactccatagatcttagcctgctggtgattatgccagagcagaatctgacacgaatgtatgagcggaccaagatcatggcatcagatgatatcagtgtcaacgaatttcacgtgattgtaggtaacaatggctacttggatgtaggacgtcaacatgctgtaggacagtgatcttgggcaagcgctgctatcatccatgtgcgcatagatatactataggtctaccagagctgcgatcactacgcgaggccctttaaggcgagcgtgacacttccgttttggggtgctaggattaagcattcataaattgaactgcagttgttcagcaaatttgcctactattcgtatcatactgttaggctactgacgttgtgatcgacctgagcattggacggaagttacattatagcaaagtttgcatggtcacgcttgaagactaggcaagaccacttttaacacacccttaaggtcttaaagttcattggatctgaccacttataagggtcctaattcactgagacattcccttggatggttcgtggcgccg

SEQ ID NO: 618599 - DNA, 226 bp, Homo sapiens
  misc_feature (83)..(83): n is a, c, g, or t
  misc_feature (104)..(104): n is a, c, g, or t
  misc_feature (169)..(169): n is a, c, g, or t
  misc_feature (184)..(184): n is a, c, g, or t
  misc_feature (192)..(193): n is a, c, g, or t
  misc_feature (204)..(204): n is a, c, g, or t
  misc_feature (210)..(211): n is a, c, g, or t
  misc_feature (214)..(214): n is a, c, g, or t
gtggacgccatcctgagtgccttccgcatgtttgaccccagcggcaaaggggtggtgaacaaggatgagttcaagcagctttncctgacccaggcagacaagtnctctccagctgaggtggagcagatgtcgcctgacacccatggacctggcgggacatcgactacangtcacttgctacatnatcaccanngagacgagaanaggatnnggncaggccagccac

SEQ ID NO: 618600 - DNA, 356 bp, Homo sapiens
  misc_feature (31)..(31): n is a, c, g, or t
  misc_feature (141)..(141): n is a, c, g, or t
  misc_feature (319)..(319): n is a, c, g, or t
gattcaggatgtaaccctattgtaagtcaangaccatctgtcttcacttcttgaccaccccacctctaacaccgtacgctgggaagattgtgaatcagaggccagactctaggctttcatggagaaaatttacaaaaaaanaaaaaaagaggccagactcacacttaggcctacccaggctttctagatgatagggaactcccatctcactgccaggtgcttttagacacccccgtgtccgcccttttgactacctgttccgcctccacagatcctgcaccctgaggaatgcatgtatgctgtgggcaggtacactttnccaggggaggcacatgggggcattaggcttccctttg

SEQ ID NO: 618601 - DNA, 189 bp, Homo sapiens
cgtctcccagtcctctgtggggacgggctcctgagtgggacagaacgacagaaggaaaattccagtcccagctaacagatacacaccattgaaagaaaacgggatgaagatattaactcctatggtggaacattggggactctcagactacgctttaactgtgaaatcacaggaatgtacgaaatcagg

SEQ ID NO: 618602 - DNA, 151 bp, Homo sapiens
  misc_feature (3)..(3): n is a, c, g, or t
tanaacggggttttgtcatgttggccaggctgatctcgaactcctggccttcagtgatctacccacctcagcctctcgaagtgctgggattacagatgtgagccatcgtacccagccttctgtgtttaatttcttaggatcctacatgcat

SEQ ID NO: 618603 - DNA, 189 bp, Homo sapiens
ttagtctcttcagttctctcacttattctataacccaaccccctcccacttgttagtgtgatctcagaactagtgccaagcagaacactgggacaaagggagaatatctagctcccctcctgagtcagcctggtgttgccctttattccccttatgtgcttatagtcccagcatacttggacaggccaa

SEQ ID NO: 618604 - DNA, 876 bp, Homo sapiens
gaagggtaaaaccaagtaactattaaaccatatggtataatgtaaacaaattgttccatttcgtaggctggtatcatcagcttcctgagaaacctttactataatggattgtaaaaataactactttaaggacaaatttcttaattgtaaatgctgcaaaatgaaggagcttgtttgggttgatgcaggacccacagcaattaaacaattgctgacgagtatatgtgatccagatgcacaggaggttattcttgcaaccagcctattggaccagatgatcttggtaccacccagatcaataaactggctcatctgatcttgtggcaccccctacccaggaactgactgagcgcaagaagacagctttgactccctatgatttaatctctaaccaatcagcactcctggctcactggcttcctcccacccaccaaattattcatagaaactctgatccctgaatgctcagggagactgatttgagtaataataaaactctggtctcccacacagctggctccatgtgaattactctttctcttgcagttcccctgtcttgatgaattggctctgtctaggcagtgggcagggtgaaccccttgggcggttacagtgctatgggacaaaattaaagatttggtggcccatttgatgtttgcctctggcccacatctcctctgggggagaatgttccattccaacatataattgggggaaccttcccgacccaacatcttaatgggatcccttttttggcccgggctctaattttaaccgtaagaatgttaggtggcggggcgggggccacgctgttatcccgcttttggggcccgaggggttgcctaggcggttttgccactctggcctttggtaaat

SEQ ID NO: 618605 - DNA, 398 bp, Homo sapiens
tggtgggcagaaattgctctaccgttggccatcagagcatggtgtctgtggctcctcgccacggccctgaagcctgacacctgggtacatggcttggggactctccaggggccaagacacacagtatcctccatggttgcagcccgggtctgtgctgggcctgggatcctcaaaagtgaggagaggccagggggccagggcagctaccagccgggcagctgtgcatggtgcaggggggtcgctatggccatgctggatgagggaggcctagactttccacagctgcccaagacttccggctccagaggagggacggagccatccccacgtccctgtggctctcaggacgccctcctctgaggggcgcgtgattccaggttgtgtacactttgctctgc

SEQ ID NO: 618606 - DNA, 381 bp, Homo sapiens
  misc_feature (219)..(219): n is a, c, g, or t
  misc_feature (281)..(281): n is a, c, g, or t
ccagatatgaagtgtcccagttgtcctcctattaagcctagatgcctaaagagatttgtaaaaatgtaagataatgcccattccttccttccccaattaaaaaaagttaacaggcatgagcccacccattccctggctattatatatcttatatactgtattcttacagtaaagtaagcctagagaaaagaaaatattaggaaaatcataagggagagnaaatatatttactattcattaagtggaggtagatctcataaaggtcttcatcctcgttatcntcatgttgagtagctgaggaggaggagagattggtctttgtatcaggggtggcagagagggaagaggtaaaagagatggaaggggaggcaagagaggcat

SEQ ID NO: 618607 - DNA, 928 bp, Homo sapiens
ctccggcggactagtatttattaccaagaatgcattcacaaatacaataaaaatatttggtgttgtatgtcaaagcggtgtgggcataattatatgtaaatttttatgttactttgtgccccatgttatctttccaaaaaatgacgactctttaggagacacacattatatttctttaactttgttcagcatgagaaaactgcgtgagtattacaattagttagaggtggggcatcttattttgtgaaacgtgattctccagtatacgtgtgggctgatagctaacactgggtagataggatcaggatttgggacaggattaggggcgggtatctataccccaaaaaagagaacagaagtataggggtgtaaataactgtgtttttctcttgggaaagaaggccagaaagagttggtcagtccagggctggatagggagcttgaggatggttataggagcccgcggtccttgctttcagtgcatcattgctcaagcgtgagcttctacctcttggtcaggggggtggtgaggaacagtcggacatcagcttttggggcgggtggcgttgggcacacatagtcgcgtgctcactcgtgggagcggggagggggtcgaatgcgggctgtaggttgggtgctggtataaaaggcaggggggtatactgggggggggaggaggcttgcgtggtaatgggtgataatgagggggggggggacctagagggcggggcttggcctgttgggggtacggggggttgggaagctggggggggtgtggcctggccgcgtggggggcgttggggggaaggcggggggggcggcggggggctctgcgaggggatgagggtaagggggggggaaggggccgaggtgcgggggggcggaggggcgcggggaggggggggatggggggggggcggtgaggggg

SEQ ID NO: 618608 - DNA, 204 bp, Homo sapiens
tgcaatctggtctcgttccgtatggtcccgctggggcctgctcccactcctctctagcatggtctagcccctattccttcttcttccttcttcatcttgaattaactttacatagttttgcccggattcggcccgaagtccggtagcgtcgtacctgcgctcgtcactgcgtcaattcactggttcactatgctgtttcctgac

SEQ ID NO: 618609 - DNA, 340 bp, Homo sapiens
  misc_feature (35)..(35): n is a, c, g, or t
  misc_feature (37)..(37): n is a, c, g, or t
cctcccccctctggtgacccaggggagggcatggncnaaatggagttcccccagggttaaagcaacatgaacgcccttgtttttgagtatcaccaggacccggatgcccccccaaaaaaggaggaggattttggttaggaggcccaaaaggaggcctaaggcaaagcccccctcccctcagggttttcagttcccttaaccgttttaatcaaatgcccctttcctttcccccaaaatttgggtttgccgcccccatcttgttttttgtttttttttttgggggggggtttaaaacagggcctggcccaaagtaggcgccccataaaaacttgtttgttta

SEQ ID NO: 618610 - DNA, 1192 bp, Homo sapiens
gctgcgcccgccgtcggccccacgcgcggcccatgatcctccggcgccgcgctcgccacaccccgaggacccgcaaggatgaagaaggacgatgtcgttcctgggcaagctgggcggcaccctggccaggaagcggatgggcgcgcgaggtgagtgacctgcaggaagaaggcaagatatgccatcacattcaccgatgtcccccgacccgtggcggatgttcaccctgaagacacccagctcgaggagaacgaggagcgcacgatgattgcacccacattccacaggaagaccccaagttcaaggaactggtcaaggtcctcctcgactggaattaatgacgtgctggtggcaggcagaggatcattgtgaagcagctggaggcaagacctgtatgcacggccaaggtgcatgcagcaagctcttggaaaaactggcagtggtgcaagctgaatgtggcctgaggtgacacagatccgaaatagggcaggaaacacgaagctgcagaccggtgctggaagcagtacatgacctgctgcggcccgaggctgggcgctccggtggagcggtggactcaaattcacgggaagacacatgctgcacatcctccacatgcatggacatctctggacatgcacctacagggcccccaaccgactatcctgagcatgtaacggtgcacaggtggagagccagtgcgcgccaccgggcacggcccgctgccattccagccacacatctcgcgaagagtggaaccaacacatacagcaagactgacggactgggccggaacagaccaaacgcttacagcaggacagcctacctcaggcaagcacccaaaaagcacaaccacggaaacaaactgcaaccttgacgtccagaaagggcgacacagaaaaaccagcaacgcctgttgcaacggagacacaggccaacaacacgccgacggccaccacactgcacacccacaccccacgagtccccccagcgacaccacatcacagcacgaccggggcggccaaacccagcgaccaccagcgccggtgaagcagaggcagaagcgggcaacagccacgacgagacacagacaacacagccggccacagccccaagaacaagacgcggccccacccgtgcagccacacatagagcacagacagcacgcgacacgaagaaagacgacgcgaccacc

SEQ ID NO: 618611 - DNA, 482 bp, Homo sapiens
cgcacagagcgctagtccttcggcgagcgagcacttcgacgcggtcgggacccctcgtcgctgtcctcccgacgcgacccggtgcccaggctcggctgcctggcggtcctcgtgtcccatcccgggcacgcctcccggagtcccgggtccctccccgtgccctcttctcgtgcgcgcgcacaggattggggcccccgcaaggtcttcggggtccgggcttctgattgccggcggcagaagggcaaatttttgggccgcagtcttcaggacgaattgttgtctgttgaccaactaacaaggctgggcggaaaaactgcttgggtgaattaataattccgtcagtgccagggtacctacaagttgggggcaccaaagaatacctggtcctttgtcggctacaaagaggcttggggttgccaaacatagttgtggtgattgcagggcaggccaaatgaattggctccaaaacttgtgcggaggaa

SEQ ID NO: 618612 - DNA, 154 bp, Homo sapiens
ccccaaactatacttccccccacacttctggttatcttgtgtggagggggagcagtgatatctaatgctgtggtgtgaaatgggtacggagatgatgcttggagtggttaatgtggctccctggaaggggttaatgggctccctggagtggtta

SEQ ID NO: 618613 - DNA, 242 bp, Homo sapiens
gcacgagaacggagtgagattccatgtcaaaaaaaaaaaaaaaatgtacatttttaaaaggggatttatttgagaagcaaaaacaacagaacacttcacaggctactttacacaataaaatagaaaataattacaaatttctgcaagcataaacactcaggtatgctaacaatagtcacaggattataacaattataaacagacaaactgtattcataaataggttaaaagcaaactgtttt

SEQ ID NO: 618614 - DNA, 199 bp, Homo sapiens
  misc_feature (71)..(71): n is a, c, g, or t
  misc_feature (99)..(99): n is a, c, g, or t
agaaggaagattgggagcgccatggtttagggtggggtggagtggaagggcaaatggggaccatactaganctgcagaactaactaaaagggcacgganctacagcgactccgcgacggagcctgccctgggtgaagggagtctctgggaccgcagggggctcctgtagcctggcaggttgctgggcaggagggggtca

SEQ ID NO: 618615 - DNA, 164 bp, Homo sapiens
agaatgcctggtcggtctctcaccttggctaggtgagagtaccgacagcctactgtggttctgacagcacttctgggttctttctcttctgctaccccaggcatggtcctttgaggaaggtgagcttctctctgtttgtcttgcttggcactgcctggacgctg

SEQ ID NO: 618616 - DNA, 243 bp, Homo sapiens
ttcatgtactggaccatggtatctgctgggccgtagaccagatcatgtgtgttcccaaacactggtggtgtagcccctgcgtgtgtggctgcctagaaatattctgtaagaactcgagcagcagactccaggagtcgctagctatcacacaggggccatactccatcagggtgtctccatcgacggaggaacagggtgctgagtttcaggtccgtggaggtgcagataatcagagttacacgt

SEQ ID NO: 618617 - DNA, 852 bp, Homo sapiens
gctgacgtccctgtcctgcagccctgttgtacagagtcctcccgggaccgaggccaacttctctgcttcccgtgcggcctgcgacccatggaaggagagtggtgacatctcggacagcggcagcagcactaccagcggtcactggagtgggagcagtggtgtctccaccgcgtcgcccccccacccccgaggccagccgccaaggtagtgagcggggatgctttggtatctccgccaacagctgagtcactggcgttttgagcaccgagtcctgacacctttcctgctggacgaaccagcgtccacgaacaaccgacagaggaactctgtgaacggtgactgtacaacgtgcctgtggccgaaactgtggccaaagttctgcgctccatctgtggcgcactcacaccgacacgtcaaagccctccatctgggcggcacaccagtggactctgatcagtctcaacgcgccgagcgagcattctctactcacaccagacgtgcagctgaacgacgcaggcaatcatagaatgccagacgtggctgaatgcctgactggaccgcaggagcagcccccaagcaccctggagaactccacagcctccacaagccacgcacccaagcggcccaaagcgagggcactcggccagacaccagggtagcggccacccaacaaaactctatccgcacgaaagggcccagagcgctccgcacggccgcccgcacacaacacccggggaccaccgcaagccacacctcaaatagacataaggggatcttactcaagataacgttacggctcccgttgggacccatgctccggacagcatacacgggacccgaactgtttgatta

SEQ ID NO: 618618 - DNA, 1063 bp, Homo sapiens
gcaacaggggcagaagagggggagatgaagccggtgggagcgggagcagacgctcctcctggagaggggatctcatgctgctccgaccagttgagcccagttccggggaggcttgaaggcggggcaggcaaacgttggtcagatgtaagcggtggcttggagacagaatcatctaatggcaaacagatacactagaaggtgggctccgttggatgaagagaatggccgacagttgggtgaggtagagctgcaagtgtgggatttgtacaaaatggttcacgggtgacacatttggcatagatacctcatccgtgtctacctttcatgaccaacgtacagttttcattgcaacgtctgcgcatcacaggtgggaatacctatttcctccggaagcaagcaaacttgcaaggaacatgtgccttagtgctttggccaagctgagatggcagtcccgaacacaggatgaacatccgaagacaaggttctccaaagataaggatattatagcatttattgataaatactgggagtgcatgacatacagacagagacctgggacaatgacttggccaaataacattgttaaaaccaatgagtcaagaaagagatgtattcttggtaaaggacaaccagatccaggcagtaagatccggaagaagattgaccgaaattgtgagtgtggggatcaggaccttagataacattgggccctggttatgagaagcaacaagagaaagagaggtgtctactagagggaattaaaggggggattggagaggaggacggaaggggcacaggaacacggggaaaactgcgaagtagggccaaagagcacccacacaggcgagggacctaggaatggaaagagatcacccatggaaccatggggaacacgagaaccaggggatgcgaggaaaacaaacggacgcaaagagggaaaagacaagaagatcagaagcaaaaaagggaagagaagatagaaagagcaactaagccaaagaaaacaacaagacacgaacagaagaaacgaagacaacaaaacggaagacgacctcacagtcgg

SEQ ID NO: 618619 - DNA, 824 bp, Homo sapiens
  misc_feature (145)..(145): n is a, c, g, or t
  misc_feature (172)..(172): n is a, c, g, or t
  misc_feature (183)..(183): n is a, c, g, or t
  misc_feature (198)..(198): n is a, c, g, or t
  misc_feature (489)..(489): n is a, c, g, or t
  misc_feature (517)..(517): n is a, c, g, or t
  misc_feature (526)..(526): n is a, c, g, or t
  misc_feature (538)..(538): n is a, c, g, or t
  misc_feature (548)..(548): n is a, c, g, or t
  misc_feature (559)..(559): n is a, c, g, or t
  misc_feature (563)..(563): n is a, c, g, or t
  misc_feature (599)..(599): n is a, c, g, or t
  misc_feature (614)..(614): n is a, c, g, or t
cagagatagcagcactgggctatgcacctggcctaatgccgccccgctcctcccaatccctgtgttatgctggagagggtccagcctctggtgagtttcaccaaacccccacatctctttcttctgagaccttctctaaaatccnctcttttatacttagtgaaatgggatnctctttttccnatccagcttaagcanaaacttttgactatgagaagaatgaggatgcatttagtatctgttctgcatggctaattccatcaaagatttctcattattcatgcctggcagtctcattttcttcttttgcctctaagagcacagtcgtagccttaattactgaccttttcactcttctaataccagcgatttcccccatctcagttctcaggaagttctgttcgcagaattatctcctgaatcctcacctggagatagaaattgttctctgtggccatttcttccccctctaattcttatcaaaaaacncagtgatctctgtgcatcaaatattaanctcaagctnaacagatcatgnttctggcttntctctctctcnggcntgtgggttaacaggtttgcaacctttgcagagaagncaccaaattctcagnaggccagagtttccaaaggtactggtcactcttgctctctttctcctgctcaaaattcagcactagagagtgttacaccattgcacctgcagaggagttcatctgactctagggactacagaggagagagatggacaaactaacaggcattcagaaaatgactaccacaatggggaagaaaatgaaagtcaaaccaaataagcaatggtc

SEQ ID NO: 618620 - DNA, 205 bp, Homo sapiens
actgatacgaatcgagctcgtacctatgtggtctggttgtgacaaacaggtggtcaagatttgaaaatgtgactgaggcctatagtataaatacataagttatcttcttgaagctctggtaccagatgttcatatcgcgtaggcgagatggaacctattccatggatattctacgatatctttccttctttcactttataataag

SEQ ID NO: 618621 - DNA, 632 bp, Homo sapiens
agcggggtaaaacctatagctggagcagtcaacagaggctaggtcaccttgttggcagctgccgtctgctagagacatggtgataggaagcatgggggcaggggagggcaggagatcatatttccggaagagggtgctgtggcacgaccatcctaataagggctacatggcagcccttctctaagaagtgagacatgtcttttctgaccagcagttgacagttaagggtcatccacacatgagctacatgcttatcctaaagaggacttggctagcagacatagagagcagccgaagtgtggttacacacttattccaaaagggtattggttagagacaataagaggacgaagcataatacagagggactggctcatttcttcctgaacttcctagtctgtaacttgtgtcaggcagagcctgaagtgctctgtcggttcctgtggctattgcccggccacttagcgaggacctcggagtctcgggctcgcacgcagggagtgcgagtagtcacaataagcatactcgtggaaggctcgattgacatacgccattaaacttgttggaacgagccatggaaatggacgaccattaaccatgtcttaggagctgtagcctgagaatgagtacca

SEQ ID NO: 618622 - DNA, 129 bp, Homo sapiens
ccctccacctccaccaccaccagtcattcctccaacagaaaacgaacatgatgaacacgatgagaaacatcagaagcagttggaaagggcacaattagagaatgaaaagaagaaaagagaaatagcaaa

SEQ ID NO: 618623 - DNA, 243 bp, Homo sapiens
tagatcagagttgagctgattgaggaccaaattaaaagactggctgggcatgatggctcacacctggaaaaccagcaattttgggaggccaaggcaggcagattgtttgagcccaggaattcaagaccagcctagataacctgggtatcccagctacttgggaggctgagctgccgaggctacagtgagccatgatcgtgccattgctttctagcctgggtgacagattgagaccctgtctca

SEQ ID NO: 618624 - DNA, 140 bp, Homo sapiens
tacagtacgagtgtctcaagagcgggaaataagatgctgttggtagttttgttgtttaagctgctcaatttgggacttaaacaatttgctttcatcttgtacatcctgtaacagctgtgtttaatttcttgaagaacact

SEQ ID NO: 618625 - DNA, 381 bp, Homo sapiens
tagtttcataactaaccagttagactctctatagatgtgataggatagatccatatgtgtatgaggagtacagtcatatctctgtgatttttgatgtacgctagggatgtgatcttgaacgctttcttatttggtggctgaatttacgcctatcatgggtgttaatttgtactctctctacaaggtttttctcctagatgtccaaagagctgttcctctttggactaacagtttaatttaccatgggattcagagggttctgtgggctaatttaaagttgaactaagattctatcttggacaaccagttatcaccatgtctcggtaggtttgtacgcctctaacctataaatctttccaccatatagtatcagcgtcttga

SEQ ID NO: 618626 - DNA, 671 bp, Homo sapiens
cggcacgaggagaccacgcagtgtcgaggagcggtcaatgacgcgaggagcgggcgaagggatcgcttacacctgagacgaactgacgagaacagcacgtaccagaggggaagtccagagtcaaacgcagaaggacggcctcacggagcaaccaagagtgtcagtggtacccgaggcgtctcagcagcagcgaagtaccgtgtggtggatttccaggctgaacgtgaggtcaggcacttctgtattttgagacaccaagagggtggttaaagccatagtggagtagcgaggaatctgagttccaagcaaaaaccaggctccagtctactcgttgaagcttctgcccagcttggatggtttctaggagaacctgcgtcatacctttatctataggccttcccctaggtgcttcagaagcatcaagttttaactgtggacattggattgggtggaacgaggaatcagtgacgtgttggcaagagtagcaagatgctgcagcacgattgactatagaatgagatgtatcctgcaagatggccgaatcttcatgggcacctttaaggctttgacaagcatatgaatttgatcctctgtgattgtgatgagttcagaaagatcaagccaaagaatgcgaagcaaccagagcgtgaagaacagcgggttagggtctg

SEQ ID NO: 618627 - DNA, 976 bp, Homo sapiens
ggggtgagggaggagttgctatatcaaataccattttcatagtttttgaagatgggttttttccccctcccaaattcactgcattacagtttttgcaaaccagaacgggagcaaacgaaacataaccaaacagtgctggcatccaatagcatggtacaattcacttttcatttcttcatcaaagagtggacgacgaggaactagacaattctcctaggctgtggagaatttacaactgtttagtaaccttgtgcgtccatatacttcaaaaatctacaactttctaccttcactaacctcctacttatgaatcaagaactacacttctggagaccagatgaaggtactacttaactaccatgacccctgctgactctgcttctgtggaaaccaataacttctcttctcttcataaccccagtggctcactattcgcatgaagtgggatccaaacatcttgggcatacagtcttctgtccgcagcccaggtaggtcaggccatcatctgaaccacaggcgatataaaaagaatgctctcagtcacactccataactacgccgcacacgtactgcaagctggtccactcagccttctccttcacaagtacgggtcatcaagcctcctcagactcttagggctcacacacaatttaccacggcttcactcactcactggaagtctcatggtaaattaaaggattctaagtgaaaactgtgccatctgacctgggaaaatataccgaagattcaggcaacaacatccacgcagggaccaaggagagggaagacaccaacacatcgcaattcgggcacatggaaccaaacacgcactagcgtggaagaccaccacggctcacctctggcagcaacccaccaacccgcgagacaccacctaaagggcaaccccatgaggccacacccgctgcatacccgcaagcagcacgaatatacgcgcgcgacacaatagccagcacaa

SEQ ID NO: 618628 - DNA, 463 bp, Homo sapiens
  misc_feature (42)..(42): n is a, c, g, or t
cacgtggttgttttcgtttctcattcctagcctgatgcaganggtcacgcctgtaatcccagcactttgggaggctgaggcgggcaaatcaattgaggtcaggagtttgagaccagcctggccaacacggtgaaaccctgtctctactaaaaatacaaaaattagctgggcgttgtggtgcacgcctgtagtcccagctagttgggaggctgaggcaggagaatcacttgaactggggaggcaaaggttgcagtgagccgagatcgcgcaactgcactagagactccatctcaaaaaaaaattaaaaattagctgggcttggtgcatgcgcctcccgtcccagttactcaggaggctaaggtgggaggattgattgcttgcgtccaggaggtagaggctgcagtgagccaagatcgaaccactgcactccagcctgggtgacagagtgagaccctattccaaa

SEQ ID NO: 618629 - DNA, 187 bp, Homo sapiens
tccttcatcatacctaccattttcttatgacagaactactgtcaaacatatctcctgctatggattctataatacagttgttgaacagactatattagaactccctatttctttgttttttattttttttttgaacaaagtatttgcttcgatgcgccaatgtgtgcctaacgggggcccgttgtgg

SEQ ID NO: 618630 - DNA, 915 bp, Homo sapiens
  misc_feature (421)..(421): n is a, c, g, or t
atgcttgggattgcgttctatcagcacgcatagcacagtagtcgattaaagggtttcgttaccatatattaggtccttgataggaattttttcacaccgcactatataagggggcgggccaatatacagcgcgaactactcctccaaagagggtgtgtttgtccacgcaacactgcgtgggaccaaacgtcttgcacaatgtggcgcccacagcagtttctgcacggcccctgctgatgagttttacccgacaatggccacttggtgcgcccttgtgcaccccggggcgttgtttctccccagcccttctttggggcgcgtttcctctctgtgggccccccccagttagagggtaccgctgctcgcccccactgcacagtgttgagaaccaccgactggcccgccctcaccattgggggcnccccaatctgggaaccctggaaggccactataacccgcccacctgctgcaaaaatgggagtcaccccccccaggcgactcataggaagtgctcgtctgtaggcgggaaaccccttcaatcgggcggggtccagacccggtgtgagcccccctcccgctaggggagcaaaacaccccctggtaccgtggggcaaagaataaccagcggacgtttctctgaggagtcacagttgctccacccacggtcagagaccctgggcaggatgtaccccgctttgctttcaccgacgtcatctgcctggactagatgttttcacagcgcggtctttatcttcatagttgaatacaatgtgcacaagaaatttcaagcgctgaaagctcgttcaaagcccttcatgcataattcaggggtccgccgccatgattggggcccccaacgatcatcattgcaaccgttatttgagaaaaacatgtttgggccccccgaaacaacat

SEQ ID NO: 618631 - DNA, 190 bp, Homo sapiens
ctctagctcggtaccccgcctcgtcctgtggcgcggaggattggctcacagtcggagcaatgcggttgaggatcgtggtgaacgacttaccaatgcatccccttccacgagtggcagaattcagcgtgaatcaatcgtcaattgcatcgccgtgacgggataccgtcagtgcggactgcaggctcgggga

SEQ ID NO: 618632 - DNA, 230 bp, Homo sapiens
aacattgacgacgctaaggatgccatgatgccatgaatgggaagtctgcagatggacggcagatccgagtagaccaggcaggcaagtcgtcagacaaccgatcccgtgggtaccgtggcgactctgctgggggtcggggcttcttccgtggggaccgaggccacggccgtggactctctagaggcggcggggatcaaaactatagaaacaacaagttagagtacagacgt

SEQ ID NO: 618633 - DNA, 634 bp, Homo sapiens
tccgtcgtctagaggatcccagagatgcaggctcctagtgctgcgaaacttaccaatacctaaggaataggtggatggatggcattactgatccctacattactgatcgattctgcatccgaaattgtgtagttaaaaacattctacatcatgtgtggggagataaggcggatagaatgaagagaacgaatatcatcgaggggaagtccttctgaatacaaaatgtgttgaattttttaaataagtattacattcacagggctcaaactatttgaagtaaagagatgatatatcacgaatccatccctcaacttacccaggtgatcacgttcacttttcctggtgtatctgcccagtatacattcctgcggttatcagtcaaagaatgaatgatacgtgtcgtcttcacttcagttcattctggtcaggtagcagactgtgtagactagtctgcactggcctttttcataacaatctatctgtggcgaactttccctatgagaacatacagagctgcctgtccacggtcgcgtgtactgcattatgcaactccattatattttatgtaacctgtccactgtagtgaggcacttgcagtggtgtaagtctcgtgctatcaaacagttctgggatg

SEQ ID NO: 618634 - DNA, 913 bp, Homo sapiens
atgagcggggccccgtggatatggatgcagtctgcctgtctgcgtggctgccgtgagcccacccaatgggtgccaaccacctgcaaggagctgaagtgcgtgtgtggatgccctgagtctgccgccggcgtcgtgtgcctgtcaaagaagatggccagtggagacagccagctgtggtcagagtgtgtagcgacgctaggccatcggctgcacgagctagctccatgccctgtgctttgcttgcggtatctagcacgcttgttggaccacttgtgcttgcctcaactagtggtcagcggtgtgtagtgctgtgttgacagcagtgtgccaagcactgaaccacgaagattggcatatttcctaggccttttgcacctgccccacgcttgcttaccattggcccaggaagggaccggcagtgacgatcaaccataagaagcacttgcgcaacaccattggcctctgccctctgcctagccacgctcgtaacgggtatctacacccccactggttacaccacgcacttgcagtggacacacccgatacgggaatgctacccacgctttactctactacacgtacacctaccgcagaccacacggcccaacgcttctcggcacacacctcatgctcctatatgtgacacaaactaaaccatgcacttgggccctcttctctacaagcgggcttctataatataccttaatatacatctgggcgcatctcacacgcggcaactgcacgttggtgggttataaaccacggcaccagctaacgtgaacacccaacacccccgccatggttcccttacgctttaaccatacagcttctccctacaacattacccctatcctatcacatccgcgcacctactacggctctggacgcaacatccttctacttcccaagcgac

SEQ ID NO: 618635 - DNA, 347 bp, Homo sapiens
ctagtaaaaatagaggaatagccaggcgtgggggcagccctgtaatccgagctaggcgggaggctgacacaggaaaatgcatgaacctgggaggcagaggttgcagtgagcagagattgacaccacgtgcagacgagactcggtgccgagacgagatctgccgtgggcgacacaggtgagactctggtctgcaaaataagataaatgaagtaaactggaacctccatgagctaccctaggcttatacaggattcagtattactttagagaaatctaggcatatagcactacggaggcggggaagtataggctggcaacaacttcgtagctacgcaacctgatgtcta

SEQ ID NO: 618636 - DNA, 129 bp, Homo sapiens
ctgccagatcattattccacagaccaagtcatcgaaagtcagatatctacgtctgcattgatctcctatgcgcacatatgatgcatgcacatgggatgacatttgcaaatggtaggacatctgtggaac

SEQ ID NO: 618637 - DNA, 468 bp, Homo sapiens
tgtttaactcggagagtgcttccagctcgcagatgcttggagtctagtccgtacctcgctccattagagttctcgatgccctacatcagctgagggcaggaaatggaactttaatggaagaaccactttgatctattcttttaatccatggtttcagttctgatttcagcaaacatgagcaaaccactttgactgaaagcagaaagagtgaaaattctatttggttccgctactggtgtccaattattagttggtaccatttttaatttatgtcagttgatgcatctaaaaactaagtgcttggaagtgtccgtaccctttattttcttttaagatttcctagaaaggaatcttgggtaaattccagaattgagcagttcaaagtttttggctattttacctttggtgccaggctgggcatatataaattttagggttggatgctttcaagcccttaaattttattat

SEQ ID NO: 618638 - DNA, 110 bp, Homo sapiens
gtacgagcagacggtgaaccaggagattaactttcaaaatagctttaacatccacgtgcgtacgcttgtggtcgcgcgaggaggtggtctataggactgatgcatctgtt

SEQ ID NO: 618639 - DNA, 447 bp, Homo sapiens
atacaccagcgcctgtgggaacttacatttttgcatcagtttcctcattgataaattggaagaaaggtacatggtagagaaggttacattagtcgatatttgtaacaagtcagggcacataacaggccctcactcaagagaagacacttttgttctcacatctcccttcttaaattaaggagcatctgccctgtatacaatcctgcacaaaaataaatccacgtaaacaaaatttcacagtaactacaaaagcctaatgatcattaaaaattcctgggagaaacagatgaccgttcactaattaatcgggtttagataaatcaagcaccacttaaagaatcactgctccttaaagaggtaaatgcaacgattgtcacatggccaatttctaatttttcatttctctggggagacctaaatgatacaatcttagtaataaatttctcc

SEQ ID NO: 618640 - DNA, 206 bp, Homo sapiens
cccggcaagcccttcggtcacctgttggctacaccgacccttcctctcgtgtcagctcaggctgctcgagggccgggatcaacacttgcaggggtccctgctagttagcgccctaccgtcgtggagatcgtaccgctttctttgaacttctacagaagccaagctccctggagcccttgtggcagctctagctatgcagtcgtgta

SEQ ID NO: 618641 - DNA, 356 bp, Homo sapiens
  misc_feature (356)..(356): n is a, c, g, or t
tcaagaacagacactctggggacaggcaggatctaaaacacagaaacgatgctagatgtcactacatgcaaatcacacagattcgctagaaaaaattcattgaagttgaaaatgaaacagcagaattttatatttggtgaaaaaaattcaaatttgagaatttggtgtaaagaatggatcggatgtgtaagagttaatgttttccatttaaatcaaaaactataaactcaagtgctaaacagtgaggctgttccataggcaaacacaaaatctagggacagagggcacacagggcccagaagtgtctggtctatgcgggtcaccgagctttcgaattccgtaaatccataggtcan

SEQ ID NO: 618642 - DNA, 1249 bp, Homo sapiens
gcttagttttaaacagtgaagttgaactgcccgtggaagaggcgggcagtgatacagcgaagatgagaagaccctatggaagctttaattccagtgaatgcaagacgagtacgctaagcaagacccagcgatggtccatagaacataccgaaacctgcgattagaatcatttccgagttgggaggcgacctcgtgagcagatcccgagagtctcctgagtctaatgtacagtgcttaatgtacttcgacctaggtcgatagagcagagactgactaatcactcacattgcatccacatgagacttgtgaccgagacgagtgaaccaagcttacgccgtaagggaataaacaaggcggctgatccattattcgtaggcagttccgagtatcacaaggaattcagggggttttcactggaaccctcgtgagtgctatgggaatctagagacaccaataccagaaatgagtgtgactaagcccgagggtacactttacaccgcgttgtcgctatgtgtatcgacacgtgaatgtaagagggtcggctatcgggtggaagtcatggagtggtgaccagtaacagcgggacgattaaagaccacaagaaggtcaggcattgtccataattcgtagagattgtttcgaggactatccgcgttccccgtggttagacggacaacgacgggggaagcgagaaggcaatggacacaaacattacaaaggggagctcttaaacggataataccagacagatacagaggtgcgagcaccgtttgtcactcacccccgggattataacaactggaacttaagttcaacttccgatccgagacatggaaaggattagtgtgtaacttagcgacctagagatgattcgcgacagagccaccacaagggaaaataccgaaggtggtgatcctcttaggccattgcaaacggaaacttgtgggtactaaatgaaaggacgacccacagaggcagtaagatcttcagagccgactctagaagaaagagtcgctgtacaagacaggacgactgattttgaaagtaccaagggctacgcaaagaaaggggcggtattatcgcgacaagttaacaccgatacgagttataacggtatgatacaaacgaacaacgaagattaaatcgacacaaattgtgggcgcaccatgaatgcagatcacccattatggattgtacccgcataccacgattatggattaggagcccgacacgttagccgtgcagcgtc

SEQ ID NO: 618643 - DNA, 115 bp, Homo sapiens
tgacgcacgctactctattgagggcacaggctttagagcatgttcacttatcaatcttctttctcactcactctatgtcccctttatgagatgagaccagactaaaactcttcgt

SEQ ID NO: 618644 - DNA, 822 bp, Homo sapiens
  misc_feature (1)..(1): n is a, c, g, or t
nggcacacaacattgtcgtcggaaacagactgctgtgacgcgcaaagccgaaggttctgcggactagaccctctccactctgcggcaaatattggttgttcacccgcgaaccaagtgggataccagcgcccctcttgaaactacttgattataggtgtgccccaccttatataggtcctcggaaacacccccacatgggtgctatatattcacctgctgatctgccacacgtgccacctatatcaaaaacgttgtcgcgatctcgctcccaagtacaggcacccttcggcgggggctcccgtccactcagaggtgcattggtctgttccggacacacaagtttcatggttcacgatgcgtgcgacctgaacccggctgtcgtcacccacagcgcccactgttgtgaataaattccgcccctttgatactaaacctgtggcccctcatcttctccaaattagttttccccaccgaggtccgcggtctcaaaaatagatgtgttcgtttggcccgcgtcaccttttttccaaataatagcccacctgcgagaaagtgggagaagatgttttctgtgactgaaaggacattgcatgttaataaggtcccccgccgtgctaaaggagccacaagcgctgtaaataaagtttagagtgcagcactccctcgggcgcccttggctggagaaactaacctttcttttgcttgctcccccaggaaaatttgcatgggttcacgcccctcgcagacatccctggatctttgaaaaaaaatatatatcacttttcacccccaccccaaattaaaaaatgaccaccacataac

SEQ ID NO: 618645 - DNA, 114 bp, Homo sapiens
accgggatggagacggggaagttgaacacggtggtggtggaggtagctcggtcgagcacagccatggcgcggctcccagcctctgccgcaccgcgcggagcccgcagctggaac

SEQ ID NO: 618646 - DNA, 145 bp, Homo sapiens
tcatgtgtagaattccaagctgttgccatgtagctggaaaggcaaagtgcaagacaggaaattgttagagattagactaatgaaagagggaggaaggcagcacgatttaacggctatagaatttttagcttggggaaattatttc

SEQ ID NO: 618647 - DNA, 461 bp, Homo sapiens
tatacagaaggtggcctttgggagttaataaggtaagagagggtagagccctcgtgaatggaatatcgtgcccttactagatatacttgagagtaagcatccacttctatctgccatgtgagaacctcaaaggactgacatctggtaaaatactggaagcgtgccttagccgagacaccagatatgctaccactatagatagttggatttcccagcctccgtgaactgtgagaaataactgcttgtcaaggtcacctggtctatggtaattgggtataagttgcccaaaatggactgagatggtaaatactgagtatcaacttggatttgaataggaaaggatgcaaagtgtaccccggggtacatctgtgagggtgctgccaaaggagatttaccatttgagtcagtggactgggaaaggcagaccattcctacaatctgggtgggcccaatctaatcag

SEQ ID NO: 618648 - DNA, 233 bp, Homo sapiens
  misc_feature (232)..(232): n is a, c, g, or t
ccaacctttacatttgttacgttttccacacgggggaaaaacgcagtccgcccaggtccccgctttttttggaggcaacagcttccccaggggttaaatttggggtaaaattatggattttatttgccctcctccccgttataaaactgcagggtggattgttacaacttcgctggaaacctttggaggttatttcggctgttcctgaaaaataaaaagcctgtcctttccna

SEQ ID NO: 618649 - DNA, 215 bp, Homo sapiens
ggaggaggaagatgggagctgatgagaatcaaagtggaatggagctctggcttttggaaggagagccacactgtggctgggctgagtgagggacgagaccggaacggagcagcgactcaactaacgatactatacattaccccgatttgatagtggaaagtgacttgacaggtcttgccttgcgagcgcagcctatacagtagagccgacctgct

SEQ ID NO: 618650 - DNA, 212 bp, Homo sapiens
  misc_feature (28)..(28): n is a, c, g, or t
  misc_feature (76)..(76): n is a, c, g, or t
  misc_feature (120)..(120): n is a, c, g, or t
  misc_feature (122)..(122): n is a, c, g, or t
  misc_feature (131)..(131): n is a, c, g, or t
agagcagcacactgtctgccccagcagnacctcctggcgtcccagagaaatgaaagcgcaggttcacacccaatcntgctcactaacggtccattagcagctttatttataatagccccnancaggatacncacaccccaaatgtcctttagcgggtgaatgccaaaacttgtggtgcatccacacttgtggaacggtggaacaccatcagc

SEQ ID NO: 618651 - DNA, 943 bp, Homo sapiens
aaccttgcgtcagatgaaagcactgaactgacaattacatcgagcccaagtatctacaatcaaccaagcaaggtctatccattaccctcactgtcaacccaacacaggactatgctcataaaggaagaggtcaaaaaaaagtaaaaggacactcggtccaatctgatccccggctgtattagcatacaaacagtcaccgctagcagtcaccaagtactatacgaaggcaagcgcctgacctcaggttgacacatgtttaaacggccgctggtacctcctaatccgtgacaaaggtggcataactcacttgtgccttatggttagggagctggtatgaatgggctccaccgagggttcatgactagtctccttacctttgtaatccaagtgacatagtatgagactcgaccggtgataggagagctgcggcatggatcgtcacgcaaggagcagaggaagggactccttagttggacgcttgtaacttgggattataccggcaaagaccagttaaccctatacaaaaacccgactacggtcctaaatagttagccaaatcctgctttagaaaaagtttcggtgggggcgacctcggatgcagaaagccaacctccggagcaggtacatcgcaaaagacttcgcccgagtcaaatgcgaatgatgtatactgcaatgtgatccgatataggttgaggcagaggaacctggttaccctagggataacagcgcaaatcctatctctagagtccatatcaacaataggggtttacgagctcgattgttggatcaggaccatcccgcaatggtgccgccgctattcaaggttcgtgcccgacgaaaaagcccacgtgagctgagtcacgaccggagaaccgggcgggctatctactaaagtcctccggttgaaaagacaataaaaaatcttccgggcgccccaaaattt

SEQ ID NO: 618652 - DNA, 300 bp, Homo sapiens
ctgtacaggaagcatggctggggaggctcaggaaactgacaatcacggcagaaggcgaaggggaagccggcgcgtttcttcttaaaatatccctttgaaattctttatggtgcacagatagcgtagaaaataactgttcacactgactgtcatccctctagggtgggggtagggggtatacttggatgattttcccataagtgatcaaacaccagtcgagtcccaaacttcggcgatacatggcaggtagaattggtgacatcactcagtgcacaaagtgagctcagagcttctccccga

SEQ ID NO: 618653 - DNA, 982 bp, Homo sapiens
  misc_feature (9)..(9): n is a, c, g, or t
  misc_feature (69)..(69): n is a, c, g, or t
  misc_feature (248)..(248): n is a, c, g, or t
  misc_feature (761)..(761): n is a, c, g, or t
  misc_feature (823)..(823): n is a, c, g, or t
gacaccagngtttaaaggtgactaaaaaaagggtgtataagatgaattattgtattataataattttangtttattcttttgtgtatcaataaagtttgtttgtttctattagtgtttaagatatgagtataattgataaaattaaagaaatatattattataagtgcatatggtggatggaaacacatgttagatgttgatgagcaactaaaataaatataaccctcccgtaccccatgttctgcanttcttaccacccccacttatcacccgggttagcaacatccgtatctcaatatctgtattaggtatactagaacgtattggtagacaccacgacttctctccgtcgtaacggtcgcctccctacgcttcactgatctccccatcctcctcctccgctccagaggcgccgccctcgcgcgtcgtttcgtcgttcgcgtccagacacgggtacaccaccctcccgccgcctgcgccacccctcctcactccccccccccttaccaccctctactctcgctgctaccactaccaagagcagctcgttatcccgcgctcttaccctcctcaccctacgcactcaacccgtcaccccacgactcactcctccgcgtactccctcaccgcacgcatcgcgctcaccgcaccgtcacgctgcccatttcctctcgtccagtgcgatattcacgtctcgcgttgtgctcatgctacagacgtactcgtacgtgtccacctgagtcatatctaccacttctcnacaccctacgacagcccacctacccctccacaacatctcctctcaccacccgcctgttgctntcatcatctcttaagtcgttgtgatagcgtctctgatctgtctactctccttctcctctaccccctccactaccccaccctcctcccctctctatctactccaccccattcttgcgccctcttccactcttttcactctctaccgctatacacgacgcg

SEQ ID NO: 618654 - DNA, 401 bp, Homo sapiens
aggcggcacgaggcggcacgaggctttttctatttctgaattaatgatttcaaaatctaagccattcgcaagatgtgaataattttaaatgaaatttttacataaaatttttcaatgaccccatgggattacttcaacaaaaacagagcattagtaacttgttttttgcagtgtaattgggtgcaaatgtatgatagagttcttggtaaacagaaccagactctgactctttttcagttttgctatttttttaactatttttaccataaatttatttggaaaagctttggaatgctttttaggtattttaattattggtcagatgcacaaactcagtccaccaaattattcacagagaaaactttaaagataagaaaacaatgaactcagatgtacaatag

SEQ ID NO: 618655 - DNA, 1232 bp, Homo sapiens
  misc_feature (33)..(33): n is a, c, g, or t
  misc_feature (483)..(483): n is a, c, g, or t
  misc_feature (548)..(549): n is a, c, g, or t
  misc_feature (564)..(565): n is a, c, g, or t
  misc_feature (575)..(575): n is a, c, g, or t
  misc_feature (648)..(648): n is a, c, g, or t
  misc_feature (655)..(655): n is a, c, g, or t
  misc_feature (816)..(816): n is a, c, g, or t
tcttgttataggagagtcgcttgagcccgggangcggaggttgcagtgggccgggatcgccccattgcactccagcctgggcaacaagagcaaaactccatctcaagaaaaaaaaaaaagaaaaatttagaatgtgttagagaaatttaacaagtagaacaggtgatttctggttgatagactctatctggcagtatatttatttcatgtatcagaccccaaagttgttgcctgtgttattttttataatttctcacatttttggaaaaatagatgctatcctctatagtaaaatatggaatcactttatagtagacaatacatatgacatttaacaaatactgggtttggacaaaagttgggctttattccaacaattttagtttggcccactgattttcaaatgtctggggggatggcttataactaagtagaaagtgaagattggatttttacttaagaatggggatagagatgagtttnatggtttttaaaagtatttccagttccattatttaaatgtggggtggtggatatgggtcctggtnnctggataaggaaatnnggagcaactngttttaaaataactacactaaaagactttcttcatctccgtatagagaaatccagatttcaattaatccattnatggggngctaacaaaattcagggttagagtaaattaggtctgtggtccatgtggcctggtttcctagcacccattaaacataatgctatctttaagcctgaacatgggggtttcttaaactcaacctgtgcccaacaattagaccacctgatgtcaagcggagcctngaggaatccccatcttaaacaaagtatgcggggaacatatcgactttattttcgcgggcgtggaaaccctatatcgcggggcaagttttacggggcgcacttctccattcactcacgagaattaacctggcaagggcgctcaaagggtgccgcatattccacggcggagcgtagttccgcaccacacagggcctgtcagaacgttgtcctcccaaccagagacgacgggtgtacagcaaagagcacctccctcattaataaagcccagcaaacgtcaccacaactgctgggcccactgctgcgacagcactcacgaggaggaagaactgaggcggtaaacccaaggctgatctcagaccagagtaacgctatgccagcagctcgtctcttatcatgtctgttcgactctcaatcag

SEQ ID NO: 618656 - DNA, 100 bp, Homo sapiens
gaggtgattctagaggatcccggtcaagtaaccgtcaaagtaacttaagaaaaagggtatttattggttcacataactgaaaagtccagggatattctag

SEQ ID NO: 618657 - DNA, 1114 bp, Homo sapiens
atgcactcacctcgcagggacataatagggtttctccgctggcccttgttctgggagcgcgggactccttacttgctccggtggtgcccacgattgggttcattactggtgaccacttcgtggcattgcacccgcgtctgctctttcctgccttccctgggctttagtcttacccttgggaggtctagaaaacgaacgtctaaccgctccgaaccctctcaatgactcttttgacatcccaaggtatgtcagcatcgcctcgagcggccagaggcacacggaggttcatgaccaaggatcgaagggcacatcaaccactggttccccaatccgcagatctatagagcactactccaggtcaagtgtccacgacggctgagctctggtatctctgatcgctagaatccagagacgtcatcatgactcctccttggagacatcacctgcgctgcctcgctaggaccactggtctccatcttccaggtcccacctgcgaactacctctgtttacctgggcactagtacttggacccccaccgacgaagagaattcgttcactcacgcactcacggcgaactcgcgccctccagccgtgatcaccacgctccctcgatcccatgccttctcatgcgtggtacccagatcctatagaatgattgcatgcttcctcgttccttatgaagcatcatcagtagtcacaccctcacagctggcatgccctctttgccagggatattctatcttggtggcatattcactacccttcccatatctggatcgtaacgttctgcccggtcagcttccctgccgttttcttggcgacggtgagaagttgtgccccacagtcctccaaaaagtgattccatacgtactatattctgagtcagcctgtcccccgtatgttggctagccctcatctggggatggactgggtaaatgtttagacatgaggccctgccaccgattcacagatcctaggccctagagccagccctcgtgcttcctccctcccccaacactccctaccaacccacctaatccccgtactccctccaccccccctccactgtaggccactggatggtaactgccatcgccgtaaatgacgagcgtg

SEQ ID NO: 618658 - DNA, 272 bp, Homo sapiens
  misc_feature (23)..(24): n is a, c, g, or t
actagtccacggttggctaaccnngaaaccccgtctccagtgaaaatacaaaaaaattagccgggcgtggtggcaggtgcctgtagtcccagctactcgggaggctgaggcagtagaatggcttgagccctggaggtagaggttgcagtgagccgagatcgtgccgctgcactccagcctggcgacagaggggaactccatctcaaaataaaaataaaatccagaaagccaaatatattcatttaaccaaagccaaccgtggactagtgggt

SEQ ID NO: 618659 - DNA, 125 bp, Homo sapiens
gcacgaggtatatggaatattagataattcctatactatgcttctgtttgttttaaatgatgcagatcaatctgaaaattcataagtttagtatatggaatattagataattcctatagatctgt

SEQ ID NO: 618660 - DNA, 143 bp, Homo sapiens
gttttaggaggagctctgttgtggagaagggatgaggttgctgcagcccttgatctcccttcgtgagacgacaccgggtcctcctgccaccccagggagtgccaggatgctgatttgaaggatgtaaatgtgattccagccac

SEQ ID NO: 618661 - DNA, 663 bp, Homo sapiens
cgggggggcgggcggaagccgacaggagggcggcatcttgcgcgcagctggagtcggtgctgaggttgcaccgaagagtgccccgccgcggcccagccgaagctctttcccgccgcctctccgcgcctcgccaggtggggtggctgacctccgttggcacggcccctgaccctcagtccggcctggtccggcctcaaccgcccggggacgatgaacggagataaatggtgcccaaggcagacagcggcgccttcctgctgtcttcctgctcgtgctcactgtcaccgagccgctgcggccagagctgggtgcaaccctgggcagtttgcgtgtcgcagcggcaccatccagtgcatcccctcccctggcagtgtgacggctgggcgacttgcgaggatgaagagcgaggactgccaactgtccagaaagttgacgggggagggtgcgtcctcatcatgggaacggacgctgtggatccgcggcagggcgggcacagaggcgaccattcgcacttcacgcggtgaacgtgcgcacccgtacgttcagaagttcctagggaaagtgccccgaagggtggcaccacactacgaaggcacgcgcaggttgctcacgggtttacctgaccggggagaactactgggatgcggcagactgccacccgaa

SEQ ID NO: 618662 - DNA, 710 bp, Homo sapiens
gtcatagacataattgatcaatttgcaatggtgttcttgacaggtcgttccaggggtagatggaggcatgaaggatgaccgtcgggacagatactctgcgggcaaaaggggtggatttaatacgtttagagacaggggaaattatgacagaggttacgtctagcctgcttaaaagagattttggggctataaactcagaagttggtgtttacagtgctgctaaattacaccaatgggagctttggaagtaattttgtgtctgctggtatacagacccagttttaggactggtaatccaacagggacttacctagaatggttatgatagcgactcagctagatgacggaagtaatgttccaaatatgctacaagggtatgaaccaacaggctagtatgcatatcctgctactgcagctgcgcctatgattggttatccagtgccaagaggatattcccaataagactttagaagtatatgtaactgtctgtttttcataatgtggtgcttgatattgtgtgtatctgacaagatagttactttatagaaacatgggaatgcagaagtgactgtagtgcagcagtgattatggggcactttttcggtattaggtggatatttctctacattcctgaaagcaattttaagtatcgttggtactagaaaatgcaggcagtgttgcacgaaaagtacatgtcagtgatttgaata

SEQ ID NO: 618663 - DNA, 142 bp, Homo sapiens
aagtaggatgatggtcctgggccaccagcctaaaccttgcagccttaggaaagacctgtgtcaacaggcttgctccctctctagacagggctcagcacctccaggcatcctctgcattcctgctgagatgggcagagacatg

SEQ ID NO: 618664 - DNA, 155 bp, Homo sapiens
ctctctgcgtggtgaccaagatgaagatgcagaggaccattgtcatccgcaggtaatcgataaggaaacccggacgctgctgcccccttctttttttcaggcggccgggaagattgcggatattcagactgagcgtgcctaccaaaagcagccga

SEQ ID NO: 618665 - DNA, 155 bp, Homo sapiens
tctgagaggctatgtgaaagtgctgaggcaggttgtggccgactgcagtgaaggcgggcgggttaggtgcccggtgattgatgagctgggctcgagctagcgtcgaagctacgaccctgtgccgatgacagcggtcagcctcagtgccgtgaagg

SEQ ID NO: 618666 - DNA, 172 bp, Homo sapiens
tgtatggaggcatacacagtatctagcaataagtcaaattttcgtcaatatgtggtcgaatgaagcatctggatcaggtagtctagtctttaaatataagatagattatgatagcctcctggaaagctcgcaagttaactgtaaaatgaagatcgtagaaactagtgatgga

SEQ ID NO: 618667 - DNA, 793 bp, Homo sapiens
gctcatcatcctacacgtggcccccaatgacaggcccagcacgaggatggatcggctgggcgtgggcttcaggacccaccagtggagctgctgtgctggtgcgggtggatcagcgcctccggccttggagactacctgcagctgctacatcgaccaggcaccgtgggggtgatctttaacggtgggcacggacgacattaccatcggacgagcccaatgccatagtaagcgacggcaaataccacgtggtgcgcttcactcgaagcggcggcaacgccaccctgcaggtggacagctggccggtcgaacgatgctggtacccggcaggacgccagctgaccatcttcaaccagccaggctgccatcaagatcgggggccgtggatcagggccgccccttccatgggccggtgtgtccggcctctactagaatggggctcaatggtgctggctgctggctcgccgagagcgaccccaaatgtgcggactgagggtccacctgctgcctggtgggggaggggccgtccgtgctgctcagtgcgtgagaccgtggcaccatgctgctggcttgacattggacctaccacacatcgatggagactaccaccaccatggcagtagcacacgcgcctggggccggtcgccacactgagggacaggaccacccaagaagagcagatgacctgctggtggctctgctgaagtgtcaagcgatgatgatgactggaggaatgtgagccccgtcctggaggagagtatattgcctttcacggagatcttagcccagcgggatg

SEQ ID NO: 618668 - DNA, 156 bp, Homo sapiens
gtgggcaaatataagtagaactaagatactatacttggacagacagctatcaccaggctcggtaggttagtcgcctctacctataaatcttacccactattttagctacatagacgggtagtgctcttttagctagttctataaggtagctcgtct

SEQ ID NO: 618669 - DNA, 932 bp, Homo sapiens
tgggtgctcgcggaggggcagtgtacgcgggtccgcttgtaggctgtccatgcgatggatcccaccgcgggaagcaagaaggagcctggaggaggctgcgagtgacatgaggagggccgtgtataggatcgcatgtgcctataacctgcccgtcgcattgagagaattcagcatatgtgaagcccattagaccgggggcgtccttcggagtaggagtgtatctgggtgcagaaaggcggcgaagatctgtgatgtcagtcaagaaggttgttaacagatagagccagacatgtatccacactaagaatattttgactccgatcgagggtccaaggactagcgcagagaatgccacttggtcgacttaaatgcaaagagtccccatctcgattagtccatttagtatttattcactgctagtctgcagaggcaattgtctacttggtcatatgggcatatcttattgggggagatgtcagatgtctctcctacatagtattagttggttactctttggattgaagcagatggctgtagaaaattactacttttctggacttgtacgcactggctctaagaactaaccttcatcaggaccagtggtaatcatccacgagggtaccttgagaaccggacaatatgcttatttactatatgagggtccctagttaaaggtggacggattttgggcccttatcgaaaaagtttggcttatgaaaatagcaggaatattgaatacttgatggatacttccttaacagagatagcgtaacagagtggcaaaacaaccgtatgacaaagcattatttcaaagaatcccctatggacacacaggtggttatcgccgttatccacctcgttggggatttaaacgcccacgccaagtggccgggaaaggaattccaaggacctggcagacattcctttcaggc

SEQ ID NO: 618670 - DNA, 854 bp, Homo sapiens
  misc_feature (28)..(28): n is a, c, g, or t
  misc_feature (127)..(127): n is a, c, g, or t
  misc_feature (298)..(298): n is a, c, g, or t
  misc_feature (306)..(306): n is a, c, g, or t
  misc_feature (312)..(312): n is a, c, g, or t
  misc_feature (324)..(325): n is a, c, g, or t
  misc_feature (368)..(368): n is a, c, g, or t
  misc_feature (406)..(406): n is a, c, g, or t
  misc_feature (411)..(411): n is a, c, g, or t
  misc_feature (413)..(413): n is a, c, g, or t
  misc_feature (486)..(486): n is a, c, g, or t
  misc_feature (679)..(679): n is a, c, g, or t
  misc_feature (708)..(708): n is a, c, g, or t
  misc_feature (718)..(718): n is a, c, g, or t
  misc_feature (806)..(806): n is a, c, g, or t
gcagtgtgctggaaaggttgccgcctgngatgtccgatgagttgatttagtcgcctggtgtaaggagagtttcaggaagttttcctagcctggaagagtcataactgtatgtgcgagtgcgcgagtnatggaaaccacaccagcatgtatcactaaatccagaataaatgtttctttaaatcaacttacattgcacaaatacatgactaagcagacatattgctcagggctttgctatgagcctcacagtggctcacaccaaacagcagcctggaacgaggcactcctaactgggagntaccttcnggccgnacactgggggtnnatttcctgatggctcacttgtcaccctcctctccctgcctttnactgttcctgcggtgtggcaggaagaacacatcctttnttttncngtgccctctttttggccttactttgctgtttggtgtgggggctaataactgcctaagagaggtgtggctagtnattgggttcccaaggagataagagttgaggaatcctggaaatgagctgcacagctttttggattaagcagccgccctggccgccgcatcctcggtggtggtggtggtggcagaagattgtctcccttcctctactacctactactagggtttgtcaacagctttccacacttaggttggagtaaggttctctnagacaagtttggagggagacttgggggtntggagagacnaagagctcagaaaataaacatctgagaaagaaaagcaatccctggttggtaggaggttttgtggggtgtgggatgtgcaggattcaangactgctcagccctgtcctgtagatcttactaaggtacaaggggccaa

SEQ ID NO: 618671 - DNA, 139 bp, Homo sapiens
tggtgactcgggcattactactgcgctggtttccattgaaatgcttcaacattgagtcatcctggatacatgacaagcctgtgtaatgaagcctgggtcctttaacaccttgctattaattaattccaacataagtgag

SEQ ID NO: 618672 - DNA, 153 bp, Homo sapiens
cgtgtcgcagaaagagaaccgactttaacttaactttacccctcacccttggctgccctcatgcaaatgcctgagtgcctcagaaagagaatgtcatacgtggagtcactaccaacgctttggattaagagaaatctaaattgctcaagaatc

SEQ ID NO: 618673 - DNA, 1325 bp, Homo sapiens
  misc_feature (1325)..(1325): n is a, c, g, or t
agtctttttcctggcctggcccaggtagaaatatagacctgtcatgaaaacttgaaagagtggggcttcaccattattcaattaacttactgtgccccttccttcccgccagtggcagcttcgttgttcattcagtccttccttcttaccgtgcttgagattgaagaggagttttctttcagcattttgtgccagtgtgtgttttatcaagaaatgtgggggtgctgtgggaagggcctttgagaggtttaagtgccttgtggacttgttaagaattttgttaacaaattcaggtgacttggcaacattggcaaccacttggtgggtgttttaaggggtttctttccccttattatgtgattatttctatccttcttttccagttctttaagagattatattattaggcttgtgaggcagaaaaaaagttgagagattgttgggcttcaagcctgtgaggattgacgttgggaccttgagtgctatagagtgctctacggcacgttgcgactgtggcgcaacacgggtgtgaagcgtctgtgattttggggcccaaagttttccgggggttccactctctcttttctcgtcttcaaagccaaccgcattgtgtgttcttattgacaggtgtcaattacaagagaacaattatgagggggcacaaggagttttttggcagaggacaggtccagttacgcaggcaacaaacagcgaggggcaaggggacaacagggggcagccagaacgtgtttaaacccaaaccaattaccattagaggggccacctgggttgatgttaccccccagatgttctttgcggagaaaggcccacgcagtctcaagtcgcaggcaaatcttccttacaggaacttaaacccaaggggcactaacattggttctacaattgttgcgcccttaccctgtggaccccttccacacccaacaggtgggggctccccaacactttgtgatttgggccactggcaaccgctctctacaataccaaaaccagagcacacttttggggcccatcacccccatataattagggcgctccgtcgggtgggcagaacccgttagacacctcctgttggggcatctgcgtatatcaagtgagggggaacctaccacagcgatgcgtggctcctcaggagagaacaccaatcatcgcttgcttgccccccgaagtttgtccaagaatattctgtagggcgaagttctcaccgtgctccgacggtgggtcacaaccagatttcatccacaaaatgccgtgtcaatagagaagtccccgctcttgcggggtactgtaaccgcgcccagacacan

SEQ ID NO: 618674 - DNA, 238 bp, Homo sapiens
cgcaactcactgatacagcaaaggctctgaggggacggactcctaagactgaactcacattaagttagacatgagactaaggcacgacgtggggacacagagtagcgtgttccggcacccagcaagcacggtattgctgctggacatgacatacaaggtggaagatgaggcccagttaaactggtatggtagcaagagtgctgaccacggaaagcatatctcccgttgacgacagctt

SEQ ID NO: 618675 - DNA, 798 bp, Homo sapiens
ttgtgaatccaataggaaagtacaaggacatggagattgtcagagctgttgtatgatggtggcagcagagtcaagagtccagcggagaggcagcaagcatcccaaggatcccatgactgagaaccagcttctgtggtttagaagcaaggcgccaactggtatgagaagcacagacagatggtgccctgggaacactggctgtcacgtgctggaggaggttcctcagcaagtcaccttccctccatgggcctctgttggaaagaaggcatcaagatcattccagctatgattcctgagcttttaatatattctttctgatgattaagaaatatatctgtcgagcatggcagcttacgcctgtaatcctagcactttgtgaggccgaggcgggtggatcatgaggtcaggagttcaagaccagcctgaccaacatggtgaaacctcgtgtctactaaaaatacaaaaattagccgggtgtagtggtgtgtgcttgtaatcccagctactcgggaggctgaggcaggagaaaacacttgaacccggggaggcggcagcgttgccagtgagctgacatcacgccactgacctccagccctgagtaacagagtgagactccatctcaaagaacgacaagagattatttctggctgtgacatggaaagaggtccagaatatcgacactttacctacagatcttgaaacaggtctccaaactacttccaatccccctggggttctcaactcccatggttctaaattggaccagactcaagaaaaaagttattccccactatgtgc

SEQ ID NO: 618676 - DNA, 312 bp, Homo sapiens
gggcctccattcacagctcagtgctccctctacctgtccagtgttgcgcacttattgttccagtcaagaacgttacttaggccacggtgcggtggctcatgagaatgagtacagaaagactacgaatgcatcaaataaaaatgtctggtgactcattgcttttcgctggcggaataattccgtttacctggggcaagcagctatctggaagtcttatcaaggaagatgcagaactgagatgacagggctacaaagatgcattgtggctgcagctacctaagaccaccaccatcaccatcaccaccaccatca

SEQ ID NO: 618677 - DNA, 245 bp, Homo sapiens
cgtcgttatcacgtctcgtggcggcgttgccattcgcatcaaagacgtggcgacagtgggcatcggccgcgaaatgagaaccggcagcgccagcgaaaatggggaggaggtggtcgtcggcaccgccctcatgctgattggcggcaacagccgcaccgtcgcggcagcagtagacgccaaaatgcaggatgttcgtcgcagcctgcccccggggatcgaggcgaacaccgtcctcaatcgcacac

SEQ ID NO: 618678 - DNA, 335 bp, Homo sapiens
  misc_feature (221)..(222): n is a, c, g, or t
aagagggacctgacctcggggagaccacctgatcctcacctgagccaagaggtcccaatctcaggagaccccctgatccacacctgagccaagaaggtcccaatctcagggagaccacctgatcctcacctgagccaagagggacctgacctcaaggagaccacctgatccacacctgagccaagagggtcccaacctcagagagtccctgctcatcatcnnggccaggagggccctcgatgcatcaatgtggtcaccaaaacctttcctcatagaaaacctgtaaagtctaatgctagatacactatattcctgagcttcagaagaatatcctt

SEQ ID NO: 618679 - DNA, 389 bp, Homo sapiens
agccgtgtgtagagaagggccgactattgagatgcaaaattgctgagcggttcattttcttctaatgtcatcactaactgttactgggacttggcagctcctccttaagatcaaatgggttggaattcacttggaatctattctaatgagaaagaagacagtctttaactctgataaaatagtgcttgggatccactgactcttggttggagagaagaaaaccacatgggaagctggcagaggggaagtcagaggaagggagtggtgtccagagaactccaatacagctgtgggctcaggagctgagtaggaatgatggtttcctaattgtgaaaacaggaacaggtgccactacaatgtacgccaaaaataaaataaaaacatgatgt

SEQ ID NO: 618680 - DNA, 235 bp, Homo sapiens
gtgagacgacttatgtgtgtgtgtgttactgtacttgtgacagagggaagagtgtgagtgtctgtggacacattgcggatagtggtgctggcacgtacagggttgaccaagtaagagaggcagactctaagactatgtttctgcgtgtcaggttaccaggccagaactctctctctcttctctctcttttaccaggcccaatgtgttgtcgacagcccacacatttacttcccag

SEQ ID NO: 618681 - DNA, 807 bp, Homo sapiens
gagaatgcgtggctcaggcggcggtgctctttgatcgctgacttctcaggccctcaggtcggagagaactcttgttccagcatggttacccccgtttacccgctccatcatgtacaaaacggagtcttttcgcgcgtgtggacgcgacgagttcggcaggagagaatttgatcgctgctgatgagaggaggcgaggtcccgatgaggctgagggtcgcgaagcctggctggcgtgcgacactgagaggcgacgagaaagaagtgcttcacgaacggcaagtacgaaggccaagcaaccagacagaagcttcagctaaaagtgggcgagacagcagaaaactgagcccacaaagatggaaggtaggtaggccgagataccgggaggctcaaactggtctgcccaccagcgtggaagcgtgtaggcgacgagaacgggataggcgcattgaagaagtgcggcaggaacgcagaatccagacggacccgtgcgtgacgtaggactgaatgcttgagtaagtttgtctgagaactgactttgtccccagcgccgcttcctaacatatccaaagactgtatctggtgcagctgtcattgtgtatttttgtccctccttgagcaaatattgttacgaagctaatgtagcgagctgtatagggtagatccatgatccagactgtcagatgtgtgcacggggctaaagggcgagaaactgaaagtgtcgaacttctttgtctaaagtgtggtctttctaatgtagctatctctcttgttgcatcttgtctacttcagtacacttggtgtactggc

SEQ ID NO: 618682 - DNA, 193 bp, Homo sapiens
gagctaagaggcaccaaggaggtgtgagcatagatgctgtgtacttctgcatggggagtgtgatggttaatattgagtgtcaactttgattgaattgaaggacgcaatgtatcgtcactgggtgtgtctgtgagggtgttgccaaaggagattaacatttgcgtcggtggactgggagaagcagacccaccct

SEQ ID NO: 618683 - DNA, 269 bp, Homo sapiens
tgagacggagtctcgctctgtcacccaggccggactgcggactgcagtggcgcaatctcggctcactgcaagctccgcttcccgggttcacgccattctcctgcctcagcctccccagtagctgggactacaggcgcccgccaccgaacccggctaattttttgtatttttagtagagatggggttttaccatgttggccaagatggtcttgatctcttgaccgttgacgcggtctttaatttagtatttgtagtcgttccttgtattt

SEQ ID NO: 618684 - DNA, 438 bp, Homo sapiens
ggtgactcaagatccctcaatcgacggttctcctgttctacacagtccacaagctcagcctaccgtaactgtcacccagaaggacatgaagtgacaggagacaggagaagggagtgatagtaaggagagtcaagaacccaatcagatgaatcaggggaggaacagaatggagatgaggattgccagcgaggcgggcagaagaagaaaggaaacaaacacaagtgggttcattacaaatagacatgaagcctgaagtgcccagagagaaactggcttcacgccccactcgcccaccggagcctagacacatacctgccaatcgcggggagatcaaagcccattttgactaccagtttggctaccgaaagtttgatggtgtggaggggcctcgtacgcccaagtacatgaacaacatcacctactactttgacacatgtc

SEQ ID NO: 618685 - DNA, 1601 bp, Homo sapiens
  misc_feature (195)..(195): n is a, c, g, or t
  misc_feature (587)..(587): n is a, c, g, or t
tagtggttggggtcgtgtccgtcaccgcaaggttttggtcgctcagctttgttcatctcctcgcgctggggtgtcacatcacctgttgcgcttcgtgtggtggcgcccctcctcgtgtacgatgctcctcgctgttttgtgagtccaccgctctccctcggtgggtctactattttcataagaagacattcgccncgggggagttatctgagtcgcacggtttctctctggttctccacggagggtgtgctccccctctctttaggagatttttctttatcgaaggagacgctgttcgccgcccccgcggtgttagaccgatagtttttcgcttcggcaccacccacgaggacgacgaagaccccagcccgcgcatactaaatgggggggagactctttgagcacaaagccgagaggtgggggcgccccccaaattttgtgggtattttggggagcccggtgtcgttgtgccccccgttggtcccgcaccaccgccctgttttcgctgctgacggcgtgttgcgctcgtgttttttgcccccccccaagggcgccctctactttggggcggcccgaccgagtgtgtncccaccaggacctcctttggtcccagggccactttttctccgtttcgcatggggccgcctgtcatgcgcgccaccgcccgggcgtacctcggttgctgccaaaaacacagggggggccgacaggcttcgcgtttttcttttgaagagccccacccgtggtgcccccctctgggaaaggagcccgggggcgccaccaccccacatcgggcaacagccacagtgaatttggggaaagggggcctcatacacaaggacacacgcctctgtgagagaaaaaaggggggggcccgcacagcgccgtcgtggatccccaccacttctcactcttctcacggggcgcttctcacactgcaccttaaggcccccccgctttttgggcccccgcctcccctcgtggacgcctctcacagggtttttgggcccacctctggggggcgcctctcaccacaggcgccccctcggcgccccacacactggagtgtctcttgggcccacgcaaatagttcgcgtggttcttcactggcctcccacacttcacaagctggcttttctccacgcttcactgtaaaatgtgtgggcccctgtggccccgcgggggttccgcctctgtgctcgtctctttggggctctccctcgttctccctgtggccacggagagtgctctggttgaagcgagaggtgtgagcacctcttttgaagggggcgcctcttccctccacgcctggtgtttccccaccacctcggggggctcgggcccctcgcctctcccccttatccctccctttccctcgcacggcctggaggcccgtatgggctggagactgagggttcacggtttccccccacgctgtttcaccccccacctttgtccccaccttctaagagcccgggagggcacctgggggagaggagcgcttgtgtctcgttttttgtttccaagtggtttttgggtgttttttcttgtttgtgtcctggattcccgataaaattataagaaattgccttccctccaca

SEQ ID NO: 618686 - DNA, 368 bp, Homo sapiens
tccagcatgagcacatagtaccatgatagctgtatgcggtccatcaggcgttgcacctcagtccggcactggcagttgatgtcctcaggtgtctcattgatagacgtttcctggtcagtatggtccacaaattgggatcgcaagtataccttcagcgtctgcatgcttacgtcctttgcccgagaatttgttttggttaggcgtacagctcatcctgtaccagtcctttggtgggcagctctcaccagcttagcacgtgtgatagaggtatcccgcagcgcgcttgtcagtcctagcatggtcctctctggcgtcaacatcagccgcatctccagaggatcaagcagggtcagctcaatgcatgatac

SEQ ID NO: 618687 - DNA, 362 bp, Homo sapiens
  misc_feature (24)..(24): n is a, c, g, or t
  misc_feature (64)..(64): n is a, c, g, or t
  misc_feature (151)..(151): n is a, c, g, or t
atgtaataaatgtgggaaagcttntcatttgttccagttcactttaaagacatgaatgactcancttggagagaagaagctgcatgaaaattacttaattcctgtaatcccagcattttgagaggctgaggtgggtggatcacttgaggtncaggagtttgagaccacccctggccaacatggtgaaaccttgtctctactgaaaatacaaaaaatttagccaggtgtggtgggcacctgtaatcccagctacttgggaggctgaggcaagtgaatcacttgaacccaggaagcagaggttgcagtgagcagagatcatgccactgcactccagcctgggcgatggagtgagactccatctc

SEQ ID NO: 618688 - DNA, 147 bp, Homo sapiens
aggaaacagtatactggcatccgcaattgattgaagggacagctcatcattgggaactccagtgtgaagctgatcaataggtttctagcaatttctccattctctctagggcttctctcctcttctgagtaagcgtacccagtcggt

SEQ ID NO: 618689 - DNA, 1473 bp, Homo sapiens
  misc_feature (1267)..(1267): n is a, c, g, or t
cgtcgttgtgtattattaacacgccgctgtctgctttttgtggtgcctccctgctgtatgtttcgcctcttcggtggtgtcggtcgtcaacttcctcccccgccactgtgttgttgtgccgcccctcctctcgattgttggtgctccgcccatcccgcgggggggtacgagattatcttgctcgctcttctcggggggtctgcttgtttctccttagtggttgtgctcctccgcgggggcgccgggtgggtatagtctactaattgtgttgttgtcgccacacttagcagcggggggtggacgacgtgtctcgttggttggagctcgccgtctccttattcggcgcggcctcgtctttttttttttttgggtggtctcccaccctcttttattgtggcaccgcaacacggtgtgtgtgtccaccccaataatctcgcgacggtcgtgtgtgtgtgccctcggttctcgcggattttttgtccccccgcgcagagattatgttttcttgtttggtcctccacgctgcgctggtctcttctcgcgcgagagcacagcgcttgtgtggcgccagcgcgcgcagtgtttattatttgctctgtgcgatagagagggcgccccctcactcctctctttgtgctccccccgggtaaatactctctctctctctgtgatggagggcgcgcgcgccgccgcccgccctgcgctgtgtttgtctcgcgcgacgacacaccactctcttgttatagagaagatctctctctctttacagcgggcgctcgctcgcgtctcttctctctgcgtgttctgcgcgcgagagagagagatatatatatatagtgtgtgtcgcgcctctctcctctctctctcacagtgtgtgctctccgcagggtgtggtgacacacacactgtgtgggcggcgcctctctctctctctcacagagagagacacacgcgcgctgtgggtgtctctcgcgccctctgctctctcctcctcctccccagcagaggtgcttgtgtttattgtgtgcgcgtgcgagagagatctgcgcgcggcggtgttgtgtgtgtgtgagagacacacacacactatctctctgcgcaggcgccccagcgcgcgcggttgtgttgtgccacacactctctgtgtgggttcgtgtgtgtgtgtgtgtgtgtgacacactctctccgcactctctctctctgttttgatgatgatgggggcgccctcgtctgtgtgtgtgtaaaatcacacacactctgtgtgttntctcttctctctctctcccagaatctggtggggtgttaatctctgttgccccctctcttctgtgtgttttgcccccgtctctcctctcttgcccacgaggggggcgccctcttgtgggcgccctctctttgtttgtgtgggtgttggcgcccccccccccctctcttgtgtgggtgtgtgagtggagggaaaaaaaaggttttgga

SEQ ID NO: 618690 - DNA, 234 bp, Homo sapiens
gagtatccccaaggcttcgaagatgtggtggtgggtgcggggcgctgtggctgccctcataatggcctcccagacaggagtgcagtgtgcctttaatgtaggaattaggccaaccccaggcccagtctgctcctgggacgagcacgtccacgggatggctgtcttgcccatctgacggcgcttgagatgttcgcgtctggtgtgtgcggcgtccgattccctctaggccccccc

SEQ ID NO: 618691 - DNA, 467 bp, Homo sapiens
ccgtgatcgactcatactacgggtaggactagagaaattataccaagtgtacaaaatatagcaatcatattactacaatgatgctatttcgcacttcctgctcgtaggggaggggagataagaaaccctcactctctacaggtttgggtacatgtggcaacctgcttccatggccgtgtagaagcatggtgccctggcttctctgaggcacagctggggttcatgacaatggccagatgtaacagttcattcttgaagtcagattgcaggctgggagcacagcgtagtagatgttctcacttggttctgctgtactctagacagaatatttggttttcctgtataggaatgagcattaattcctttccaggtattttataattctgggaagcaaaacccatgcctcccccgtgccatttttagtgttatcctatttagatggccatgaagaggctgctgtgaaatcc

SEQ ID NO: 618692 - DNA, 185 bp, Homo sapiens
taatatgatgaacagtaagggaccagagtgtttaggactttcaggaacttaactattctggaataaggaatgaatcaactgacctatgggcccagcaggattttgtaactaaatagttacttgacctcttctcacccagcttcatcagctctctgttacttgttgtcccgtttttgaatacaagt

SEQ ID NO: 618693 - DNA, 149 bp, Homo sapiens
aactgcgacggtcagagtaatgctttcccagtcagattgggacagacaagtatgtctgtgttcaccactcctgttttacatagtattgtaaattctagccactggaattagtcaagaaaaggaaatgcagacaggtgcagcgtagaaat

SEQ ID NO: 618694 - DNA, 182 bp, Homo sapiens
ggtatgtcactattgttaaatataattgatgtcaactccttttttctttgtcccctctctcagctgggtgccttgtgctgggctgtatgattttccccgatggctgggattcagatgaagtaaaacggatgtgtggagaaaagacagacaagtacactcttggggctacccatcggcgtgtg

SEQ ID NO: 618695 - DNA, 150 bp, Homo sapiens
atgctgtgatgatccgatcctattcatccatgaagttaaggtgcatctgcttcagcttcctgaaggcaatgtagtgcacgcccatgcccgccagcatgaggaggaggcagtaccccagcacttgttagttttgtttgtgtgtgcagcgtt

SEQ ID NO: 618696 - DNA, 283 bp, Homo sapiens
tgtagaggggctgccacacatgttgctcagcctgaactcgaactcatgaccttagctgcatactgagtcacatggttacccactcgcgtctggcaaccttcacgaatgtgctcactgaggacatcatcgatgaatgcaagacccgtttctatatccattgggctcacactacgcacaagcaccatgcctagtaccgcaacaaaggtcacagccagctacagacttcgcggctgtcgtctagagtcagccggcagacgtacaaccgcgtcgctagccgtgtgat

SEQ ID NO: 618697 - DNA, 350 bp, Homo sapiens
cgatctagcaggatcccggcccgtgggcggggacacctctttcatgcctgagtgggaactttgcggtctcacccccagtctggatggctcggtgtacgctgactaactcagagccatcctgggttcagggctcccattgtgagtggtggagctgggccatctcccacgttctctttggacagaggaggactcttggtcctgctgggcctgcgcacgcagtggtgaaccatgcaccccaggctcctggccttttatcggggtgccccgttcaggccctggaagacaggctgggttccatatcctcacggtgcgccccagcccatggctgtaccattgtgtccctacctcag

SEQ ID NO: 618698 - DNA, 381 bp, Homo sapiens
gttggacaaagagactaacagtctgcctgctgacagttttgcaaagacgcatgtaggatcgtagatggttgaagagatacctagagtcacaaagagaagtaggcacatcaatatgtttgtggaagtctggcagtagacttgatatcagtgcccacaaaccagtaggaatcaaggcagtttgtgtgtgtgcctgtgtgtggggggtggagtgtacatgtatatgtgtgtgcatgcatgccctcatgtgtgtgtattttttatgggtatgtgtttgtgagtgtgttcatgtgtgtgtgtggtacaactatttgtatgtgtgtgatgaagaaaaggaaagttacacgagtacagagaggcagagagagagagagaggtcgacgc

SEQ ID NO: 618699 - DNA, 297 bp, Homo sapiens
cttcgtaacgagcgccaaatataaactcctgaaacagcagaaagaaagggacttaattctatcaacaacaaaatgattgggttgggttcaaagaacttcaggaaatcattgtaagaaacgtctaatctcttcggtttcctgtagattctctaggtgctagatgtctgcaagcaaaagtaacttttaaaggggacacaacctatagtggggcttcaaaaagttccaggcaaaagttccagtattgccagggcaggtggtaaggggggagtgaggacattgggggcgctcgtatacgga

SEQ ID NO: 618700 - DNA, 285 bp, Homo sapiens
ttgtgggtagtgcacttgtaatcccagctacttgggatgctgagcgctgagaatcgcttgaacccgggagttggaggttgcacgtgacgccgaaatcgcaccactgcagctccagcccaggtgacagtgtgagacttctttaaacaaaaaaaaaaaagtggatttaccatatgaccaagcagtttcacttctggttttatacccaaaataattgaacgcggagtctcaaaaagattttggcatatcctggggcatagcagaaagaagcagaataacccggacgga

SEQ ID NO: 618701 - DNA, 1069 bp, Homo sapiens
tcctttttaaattattcacaaaaagcagcgggaaatcaaaaaggcagctgccgctccagggttctcaaatccattaaaaccaccacagaacaattaaaacaatcagagagagaaagggaaagggaaacaaggtccaacattgggcattgggttttatccacgaggttttcccaaagctcctctgggaattggaaagcaaaattattattgggcaaacactggtcttctcaatacacaggaagggggagcctcagtggcctccggccaacagaggcgggctctggtgcagtcagactgggggggtgcacagcagctctctcgaggcgtgggggtttcgggccttttttccatccaattcacccctttccgaggaaattcagcagccttaccgagacacggggcctctgtgccgggtgtgccctttcccccaggcagaggggcctggggcataataccagggcaaccggccagccccagagcagaaaccctgggggggatcccttccttcatcaacctgggggtgggaggatggtcaatagggcttccacctcccacttcccaagcccatagttacattctctccacccttcctgggacaagtcctactttcccaggtacaccaaccaaccaagaagttaacgtcggggggggatcaatccatcaggtccttccccgtggtgtaactcttttccttccagaagatcccccgtgtgctcctgtctcctcaactattcccctcacatcaactttttctcagatgttcaagacctgaagggggagggtgcccaagagagagggtagttccctcaggaaccaaaaggggtggaatcgcgaggagcgccagaaaatcccctcggggggcccaagtagggtaccccgagttgtgacagggggccctcaagggaggacaaaaaaaaagcacgggcgcaaaaagagggggggaacacgctcgcggatcggaggacacacggtgggacaaggcacacccaagagcaggcacacacggccgtgagccagtgcgagctcgtaccaagcgcagagtacgtaggtcgaaagagagcagatgaca

SEQ ID NO: 618702 - DNA, 312 bp, Homo sapiens
cggctgtacttctttcatgaacttcccactgagtcacataccccactaccacctatctcactgacaccatgtacaagcatttcttttactttacaaattccaggaactggccttcaggaaatccaggtatcaaaccaaggtagtgtgcagtattccacctctaggaaggaatgctgaacaactgacttacagaccttgttgccccagactagaccacctggtaggcccagtactcaagtgtacctttacaaccaaatagtgctaacctgtcataccctacccctcacatgctttgccaagccccagctgcgg

SEQ ID NO: 618703 - DNA, 958 bp, Homo sapiens
  misc_feature (691)..(691): n is a, c, g, or t
taagcacaaacatcagcaccagacatcaggaagagttagatgcacaggtggctcagcggacgcacctgtctacacgcgctggcgccgtacacccttagaatgtggtgctggtaaccactacaattcactggttcgtaaggtggaccaggtatgaaatgggctcaaagacgttcccaatgcttgtctagagtgcttagatcagcttcatcgttgacacggcagtctgcgagaggagtactggattgcacccccagtggtgttccctcacagctgcccactgcatcaggaacaaaagcgtgatcttgcgtggggtcggcacagcctgtttcatccctgaagacaacaggccaggttatgtcaggtcagccacagcttcccacaccgtctctacgatatgagacctcctgacagaatcgattcctcaggccaggtgatgactccagcgcacgagctcatgctgctccgcctgttcagagcgcctgccgagctcacggatgctgtgaaggtcatggacctgggcggcacccaggagccagcacttggggaaccaccctgtacgcctcaggctggggcagcattgaaccagaggagttcttgaccccaaaagaaacttcagtgtgtggacctccaatgttactttccgacttgaccttgtgttgcgcagggtcaacctcagaagggtgccccaggncatgctggtgctggcgctggacaggggccaaagcacctggtgggggtcaatcgaataccgaatgaacatgcagcctgccgagggtctccagggtcctaaggctggaaggaggtgtttatcaacaaaagcctggaggggcctggagacagggagactgaatgtctgccgcacgaattaaagattctagacgccataaagaagcaaaacacaaggagacaccatacagaaaaataaagataagaaaaagatacagatgcggccacaacg

SEQ ID NO: 618704 - DNA, 297 bp, Homo sapiens
aaaaaaaaaaaacccggggtggctatagtcccagtacctgggaccgctgaggcagaagaatcactggaggacgtcagggctcgggtatgctatgatcataccccttcatagctatggactggcattccagtcggggcaacatagaaagacctcatctctattggtaaaatattttagagtgaaatccccatagtgtgggtgggggtacggggtttgggtccataaccatattggccggtggtggaagtataagaagatggtaagggcgggttaattccattcattctctttcagtta

SEQ ID NO: 618705 - DNA, 514 bp, Homo sapiens
aaggtaggaagatcgcttgagcccaggagttggagacccatctgtgcaacatagtgagacgctgtctgtacaagaaacttttaaaaaatgtagctgggcgtggcagtgtgctcctgtggtcccagctactcggagctgaggcaggacgactgcttgagcccaggaggtcgaggctacagtgagctgtgacggctccactgcattccagcctgggagacagcaagatactgtctcaaaaaaaaatttatcattgaagcctgggcattttaaaaaaataaaaaggtgggaaaatacgtgggcacagcagtgaatcctcacaccctgggctttgcccaagaagtgctcgtgaacctgatgaaagtgtcgggtgtggccgacgtgaggctgttccaggagccacgaggggtgattggttccgctagaaggttccagggaggaactggagtctcaggtgtgtcctctgatgagtgatctatttttaagtaaaagtgtttcattaaagtcaaaaaaaaaa

SEQ ID NO: 618706 - DNA, 659 bp, Homo sapiens
  misc_feature (126)..(126): n is a, c, g, or t
actacaaatccattcctaggttcccaaatcgcccgcacatccaacaaaacaaggataaacaactacaaagcacacacaagatcacacaacaaacaaagcctaaccagactaagaaacaccaaaagncaaaactcaaacaatccccagaacccaacaagacaaacttctaaaatatctacaacaacaccaaaaaggcaaactaaaagtaaaacacctgaccaaacaataaccaaaacctcaaccgtattcacaaaactacgaagcctaaacataaccggcaacagaagcctaggaagagccctagccggctacgcaagaccactcggaaccgtcagacgattccgagcgagaggtaatatactactaccgtctcttcgatcgaccctccccttcttaagcctacgcaaagcaccacaactaagattccgccgatcaatgttcagtagactacaaagcggactactaagacagatatcgaccgtcacttcaagaaaaggaactagaagggaatgcggaggactaaggggccttctaagaggagacttttctctaataggagtaccatcctacgacccataatagtatacatcgtaggacgcctacccggaattcaaggggggggctaggtctaattgtaactagcggaaggctatgtcaga

SEQ ID NO: 618707 - DNA, 1000 bp, Homo sapiens
tggaaacggagtcttgtcctgtggccaggctggagtgcgggtggtgcaactctcagcctcacgtgcaatcctccaccctcctgtgggtttcaaggaggttcctccgtgccttctagccctccgtgagttagccggggagctacaagcttgcaccaccacacccagctaatttttttttttttttggaaaggagttctctcgctctctgtgtgtccgccccagaggcttttgaagtgttgcggtgggccgcagaatctcgcggctctcccagcgtgcaaaaccctctgtgctcccccggggggttctcggtcgcctatttcctcctgggtttatcgagcctctccccgaatttaatccccccgagggagattttcgcgtgggggaacttagggggttgccacaccacgacaacaacacccccaggcattaatttttgtgggggattatttcaaggcataagaaaagtgtgggtgtttcaacccacgtgtgtttctctccaggagaggtggattgaggagtcctcgcgggaaccccgcgggagaattccgggcccggctttgtggcctcccaaaaaaggtgtgtcgggggcattaatatagggcgttttgaaacaccaaccgtccccgcgagagacaaaaattttggggactaattataatgagctcaaaccgaagtgggggtttaccaccaccgtgtgtttgtgcgccacagtggaagtttgtcttctaaaatctttgtggaccctttgtgtatatccgtgcaccacacccttgcgtcttcccccaagtgtgggcctagggactcaccgcggggggataagccccccacaacttactataagcctataaagcgcaataatccctaaaatatttccaaggggttaaaatatgggcctcgcaaaaaaatgcgcggtggggggggcctcaaataacaccataccctttaacaaacggtggaaacatggcttgcaggacaaaaagggaggagatccgcgattaga

SEQ ID NO: 618708 - DNA, 473 bp, Homo sapiens
ttctggatgcacagtgtcataacggctctagaaaacagattgggattgtgatatactgtctgcacacgtttggcagttgttatagaattgtcacccttcatccatgggcaaagcctagtgtagatgtcttaaatcttacttgtggatgcagagcagagttgaaattgtgactgtcatatgtgatcatcaagaaacaactggcgagcttactcattgttcactggtccgctcattgtgccagtaacaactctcatatctggacccagtcattatagaggtgttaactctcatatctgggcatagagccacaggtacgattatgggtcgataccattacaattgtctcccagtcacaaaagattgcgactctcatgggaaccttataaattcctcggttggtacagggaatgttctaactaggctcattgtacagttgaggttttgacactcatgcacacccagccgacagtaac

SEQ ID NO: 618709 - DNA, 379 bp, Homo sapiens
atttttctgagcctgtagttcagggaaacccattggtttgggcctccttcatatttgagagaacaggtttcttccctattgttttcccttgcttactgtcacccaggctggagtgcagtggtcccatcacagcttactgcagcctcgacctccacggcctcagccttctgagtagctggaactataggcacacaccaccatgcctggctaatttttctggtttttgtaaagatgaggttcaagaccagcctgctaacatggtgaaaccctgtttctactaaaaatacaaaaaattagtcgggcctggtggcatatgcttgtaatcccagctactcgggaggctgaggcaggagaatcgcttgaacctgggaggtggaag

SEQ ID NO: 618710 - DNA, 424 bp, Homo sapiens
cccgacctaccaacagctcctaagaattctctcacttgccttctgctcttaggctccagtagattgcaaatgacctgctttctttctgatcccaggctgcattccccgtgtcggatagtaaatcccaagtaacgtacctgctgtcgacagatctcagcttttttcttggacaccttatacccacagtcctccaggcgctggagtagggcatccgttcccttggcgcacctgactgccgtggggtgtctcagcaaaaggtcatcaacgtactggagcaacacgcagcctaggtctctggtgggaagcttctggaggtctgtagccaacgcctccctgaagatggtggggttaggtctcagatggtaaaggacagaggtctacgtctactggctgtagtgctcaggtatccatcctcgtttcccta

SEQ ID NO: 618711 - DNA, 454 bp, Homo sapiens
tatctatccatccgtccatccatccatgtatctacctatctacctgtctacctacctacctacatattctatagttctgctctctggataaccctgttctatactgtgagtatttaatgagttaacatgtacattgtttaggaagtgctagttaagtatgtctcttatttctgaatccagctacttacttttatgacaataaaaatgtaaatgctggttggcaaatgacccacatgttacaggaggacataaaatagcacgaagtttcctcaccctgggccaggactgtcacattccccagagcaacactgtaaactggtgtgtcctcttctagacatctcctctgcgtgaatgtgtgcgcacacacacacacgttaatgtgagtggcagctcgtgccctgcgcatgccttgctactttcatgtacagtggctgaggctctagtggaggacgga

SEQ ID NO: 618712 - DNA, 152 bp, Homo sapiens
aattcggcacgatgggggaaaagaagactgcagagatgaatgaacgcctgcaaaaaacaggagaatcacatgaacctggaaggcagaggttgcagtgagccgagattgtgccgttgcactccagcctgggcaacaagagcaaaactgtctca

SEQ ID NO: 618713 - DNA, 167 bp, Homo sapiens
  misc_feature (142)..(142): n is a, c, g, or t
accccctcacaagacctgttcaaaaaaatagagtagtggcttattggcttatgattatggaggctggaaagtcaagattgagggggcagtatctggtgagagcttcttactgtatcatatcatggcagaacgcatgacatgngtggcagaagggcagaagcaggaag

SEQ ID NO: 618714 - DNA, 127 bp, Homo sapiens
tcccttcatacattcatacggtgcttccctcttcccactgtaaagctttcccactcctctgcctgccttggcctctgacaaaatgcaagtgatggtggctgactcccttccaagcttggaataaaga

SEQ ID NO: 618715 - DNA, 110 bp, Homo sapiens
agtatccggtctgtcgacgatcacacctctaatgccagcagtcttgtcataagcacaggtactcttttctggatgcttcgcaagaccggtccttctgtgttgatggcaag

SEQ ID NO: 618716 - DNA, 736 bp, Homo sapiens
caacccaccaggctacatatactaaacaatacccattaaagggaggatataaaaaataacagcaaaattctggaaatcctcaaagaacatattattacaatgggcatttcaaattacttttccattatggcctgttctgaaatcacggtagctatgactagaaaaatttaaataaagtctcaactaaaatgacaggaaattaccagatgttgaagaagtcattaataagatcactgagtacaatggaaactactatgtaaccataaatatttcagacatgctctttgtcatgccaatagacaaggaaagccaggaatataccactttcacctatgaaggcaaacaataccaatttaaaagctcaatgcaagggtatttaaatagctcactccattttatcattacatataaaccaattaaaatacagatcactaataatataatacatagattacattacatcattgctgaaacaatgaccagcagaatcttaaaagcaggaaccatgacaaattagttaacacactgtaaagatcaactgagaatgtgagctattccataatagagaaacaccataggcccagacacctaattcgtaacaattaacagagtacaatggttgtccagaacgtgcagaacaattaatgacccaccactgtttacaagcccttaggggcaccaacaacacaggaagcacaagaaaaaaagggttaatcgcgcactgggaacacacagt

SEQ ID NO: 618717 - DNA, 729 bp, Homo sapiens
  misc_feature (84)..(84): n is a, c, g, or t
ggacagtttgctgagggctgtcaggtaattgagaaggggaaagcagttaggacccctgaaaagcaaaagtcatccctcgaaganttgataccatctgtcaaaaactaacctgttaccctatgacccagtgattccacctacagtaatttatcttggaaacagcaaaaagtatgcacaatttattatagtcttatttttatagcaaagagtgagaggatgttaaatacaattatgacaaattgatacaatagatactttctttgcagccatataaaagaatgaagaagctctttgtgtaatgatatgaagtgatcaccaaatgtatcgtgttttcaaatgtttatttccaatatacatgctaagtggaaaaaaggtgacaaatatatatatagtaacaatatatatataacacatattagtttacatatcccataaacttcttctgcagagatacacaagacagtgataacattagtgtcacggaaacgaaagctaagaggctaggggtcaacagaccaagaggaagtcttttcactgtcaactccatttttcaacatttacaatttatgataccatgtgaatgtattacctatttaacacaataaacaaggccggacatggtggtcatgctataatccaagcacttaggaggccacgtaggaggatcacttgagctcagggttcaaaacagctgggcacaaaggatagcatagacggtgtacatccaaa

SEQ ID NO: 618718 - DNA, 178 bp, Homo sapiens
  misc_feature (13)..(13): n is a, c, g, or t
catttctacaccnagcagcgtcagcagcaacttctgtggccatacgcttctcatagaaagtacgaaggttggcgtaccatcgtccacttcaatgagtttctggcagccagtggctgggacggagatgtacagcttcatcttgtgtagaaattgaccacactgatctagaggtcccgga

SEQ ID NO: 618719 - DNA, 363 bp, Homo sapiens
tcccagtccgatcggatcagcgatccgctgatccggaacacgctgatccgcaccctgaaatctccccttagtgaaagctctcgagtccagaaccctctccagctaggtcagaatttcgagtgtaccaaaacaaggaacactctttataggtacaaaatatatacatataaaaatatgctaacatctctaaggaagacagactggccaatgcttcctatacaatacaggagcaaacaaaacgcggtatacacaccatttcacacacacaccattgccacaagttcctgcgggaactacgggacaaaagcaacaatgcaacgtcagaagtgccagatacctagctacacaaacacaaacacacac

SEQ ID NO: 618720 - DNA, 416 bp, Homo sapiens
ggatgaaaaattaaagaaaggaagaaagagcagagtgagaaagacagtagtaacaggccagaaaagatgaatgaagtatgtaaaagcagggagaagaagtggatagaaaggaaaaaaaaaccgagaaccaggagtcttgaaagaaaaaggtagaaattaaaaagagcacaggatgacataagaataggcaaaaaagagaaaaataacagtgaacataaatattaactaagagagcgagaaatagggaaagaagagacatggatcacagcagaaacatgaaaaaagacaaaaaacatgataaaagatagagaaagacatgaaacagactctctctctcactctctctactctctctctctctctctctctctctctctctctctctctctctctctctctctctctctctctctctc

SEQ ID NO: 618721 - DNA, 123 bp, Homo sapiens
ctcggtaccgtaagtacaatatgggagattattccgaagcctgtaggataagaatataaacttcagtgctgacctgaaaaatcagaataggtgttggtatagaatggggtctcctcctccggc

SEQ ID NO: 618722 - DNA, 107 bp, Homo sapiens
gagctggtacccaaaatgactgacgctctttgtcggacagtgattccggccgtacgccgtgtcgggctatctgtttctcttcgccatacatccaggctaaaaagtgg

SEQ ID NO: 618723 - DNA, 102 bp, Homo sapiens
aggtgctgacatgtggctggcaggtctaagtgctgctgttggatgcaatttcctttggtagacttttttttttaagaaaaaaataaagccaattttggggtt

SEQ ID NO: 618724 - DNA, 138 bp, Homo sapiens
acagccaaccccagcgactctccacccaggactgtccagctctagatagatggtctcaaggggctaagcgccatgatccaaggaaagataaatttgtgtctccactactgaagaaattctattttgggcatgcatggt

SEQ ID NO: 618725 - DNA, 159 bp, Homo sapiens
gagtgacttacaggagttagccccatgtggaattggagacggtccgtaaactctggagaacacagtccagcctatcaatgacatgtctactttggttgcctggacaggtgtactggagaactcaaaggtgctggcgcgaggccatgacttggcatctcc

SEQ ID NO: 618726 - DNA, 216 bp, Homo sapiens
tttccccgttctgggtagggggaaatgttgtatgaagggcattctataccggcacagtggctcacgcctgcaatccctacactttgggaggcagggtggtggtggatcacctgaggtcaggagttcgagaccagccaggccaacatggcaaaaccccgtctccactgaaaatacaaaaattaactgggtatggtggcaggcgcctgcaatcccaga

SEQ ID NO: 618727 - DNA, 338 bp, Homo sapiens
caagaacattaagttaattggacgatgcaagtcacaaaagaccatgtggtctatgctgccactcatgtgacatatctagtggaagcaattctatcgagacagaaagtaatttagtgtttgcctagggcttgacatggggtgactggggcgtgcccgatatgggtacggagtctctgtgcggtgtaatgaaactgtcctgaaatatgactgtgatggcagttacacaactctgtaaatatatgagaagcagtgaattctctactttaaaagggtaaatgttaccgtgtgtgagatgtcttgtatctcaataaaacttcttttagtacatccctcatata

SEQ ID NO: 618728 - DNA, 356 bp, Homo sapiens
tctgttggacaaggctgacctagagcaggtctgtccgatggaaacacagttagagccacatttaaaaagccaaaagaggccgggcacggcggcccatgcctgtggtcccggcgctttgggggactgaggtgggcggatcgttttgggctcgggggttcgggaccagtctgggcggcgtggccaagccttgtctctgcagaaagtacaaacattggctgggcatggtgccatgtgcctgtggttccggctgctcgggggtctggggtgggaggatcgctggggccgggggggtcggggctgcggcgggccgtgattgagcttctccagcctggatgacagagtgatacctggtctca

SEQ ID NO: 618729 - DNA, 1993 bp, Homo sapiens
  misc_feature (661)..(661): n is a, c, g, or t
  misc_feature (889)..(889): n is a, c, g, or t
ggagagaactagtctcgagttttttttttttatttgtggttttcctcggtttaaaaaaggaccccaattttaaagggtagggtgaaggggacaaggaggggaacattagccccttagttgtaagaggaacagtggagaaggtgacaaagtgaagaaggccttcaaagagggagagggtggagagggagaaatgtcataaaggggcagcaacagtaatctcgtgtgagaaagagaagtgagagaggagagggaaacctctacgcataagtgctctgcagaagaaatgaagcggcgcaaaagctatgtgggccactatctcacaggtggtagccagaagagcggacacaaagtggtacgagatcttaatactattcctctgtacacagtggcgctagccacagtctcacacagtgtgcctctcacactctctgagggaaattatatcctgtcttggcactcgcctgttcagtgttcagagactgaaagagaagagtgcagtagaaaaaagaagcctcgtctgacaaagagaggcgccagacaagacattagcgcgcatgtgatgatgtgtgcgagcttatcacacacaagtgtcacagtaccaatgtctcacagagtacaacaagtcgccgaaaagtctgtagttgtcgtcttcgtgccacgnagtaatatcttccctcgtcgacaaatagtactctacaaggggagtatacacccccaccgtctggagtcgtgtcgcctacactagtgaggggccgaagggaggaagcgcccccatcttcgtgttgtgacgaagggagacaacaggggggctcatcaccaaacgcggaggaggcgaccacaggagtgagacaaatataaggcacatcatctctgttcgaagaactgtgancgcaaaatgtacttcaaaaactcacggttccttgtaggaacgagatgatgtcaacaggctcgccaaaaatactaccggagcggtggatccgcacaccaacacgaacttatgtatggaggcgccaccgaaactcgtggcgtggcttccgaggcggcctatctacaacgagcaactgttattctccgccacgactagcggatcaaaggaaaagacagcgctggcgttcaatcgaagagccgcagaaacaagaggactctccgttccatgggccaacacaaggacatatccacggcgcaaaaacacatatggtcgcgaaccatgtgttctctcaacaacgggtgttgattacggcacaaactaattgtctgcgaggacctcgttgctgcaaggaacacaacaaccttctcactgggcgacaggactcatgcggggcgtaacccccacggacagtgtgttgtattaccaaactcccaccggctggtgttcattaaatgggtgtgcccgacaatcgtgtggaggataacctaggtgtgataaacacttcttagtgggcccacagggccgacaaagaatatacgagccacaagatatgtaacacttgatgtccccacccacattttgagtcgccccaaagaacaacggtgtcccgtcctggaggagatcaagaaactcctacggagtgaacacgactaacggcacactggcagcgatgtacaccaggcaacacactgctaaacggagcccctgcatacgaaaactagcgtgggccggcactacaaaagaaactccgttaggaagaccacgattagagacgccatgagctaaagacccaaggatagcgaggagtagatgcctcgagtgcaccacagaaattattgcacagtaagaggctagagtgagcattagaacgactcacaagaccgcagaggagtacacgtgtaacacgccgcggcgaaacgctgctaagtgtcgacacaagctaaccaatgcggcgaaatagtagtgacacaacactcactcagtaaacacccacaatggggtgagagacgacaccccatgactgctcacgtactgacgacgcgggaagcactcacgtaaatcgtg

SEQ ID NO: 618730 - DNA, 173 bp, Homo sapiens
tgctgtcagcgctgttagtccacagcacacacatgcaagggtgctggttctgggtttgctttgcgttcacctgtgagcagtgggcagtgagcagtgtcttggtgcccggccccggatactactttttgcctcaccgtaagtactcactagtacatatttccttctctctttac

SEQ ID NO: 618731 - DNA, 954 bp, Homo sapiens
  misc_feature (54)..(54): n is a, c, g, or t
  misc_feature (71)..(71): n is a, c, g, or t
  misc_feature (94)..(94): n is a, c, g, or t
  misc_feature (100)..(100): n is a, c, g, or t
  misc_feature (132)..(132): n is a, c, g, or t
  misc_feature (140)..(140): n is a, c, g, or t
  misc_feature (173)..(173): n is a, c, g, or t
  misc_feature (191)..(191): n is a, c, g, or t
  misc_feature (207)..(207): n is a, c, g, or t
  misc_feature (250)..(250): n is a, c, g, or t
  misc_feature (260)..(261): n is a, c, g, or t
  misc_feature (278)..(278): n is a, c, g, or t
  misc_feature (288)..(288): n is a, c, g, or t
  misc_feature (294)..(294): n is a, c, g, or t
  misc_feature (299)..(299): n is a, c, g, or t
  misc_feature (304)..(304): n is a, c, g, or t
  misc_feature (352)..(352): n is a, c, g, or t
  misc_feature (369)..(370): n is a, c, g, or t
  misc_feature (392)..(392): n is a, c, g, or t
  misc_feature (424)..(424): n is a, c, g, or t
  misc_feature (428)..(428): n is a, c, g, or t
  misc_feature (472)..(472): n is a, c, g, or t
  misc_feature (550)..(550): n is a, c, g, or t
  misc_feature (555)..(555): n is a, c, g, or t
  misc_feature (560)..(560): n is a, c, g, or t
  misc_feature (565)..(565): n is a, c, g, or t
  misc_feature (592)..(592): n is a, c, g, or t
  misc_feature (595)..(595): n is a, c, g, or t
  misc_feature (737)..(737): n is a, c, g, or t
  misc_feature (934)..(934): n is a, c, g, or t
ctccacagaagtcgccacctcagcatattacataacatctctccagcattcagngtgagccgcaaccgcanggagagccccacggtcagcctcnctgtantccaggtgaaccaactagatgttaatactgcnctgctacnaggtaaaagctcctaactcaaacttattggaanaggagtgaaacggctgcnaagtgcactttaagangaggtactttttgcttatgaaaagaaaccagtgagtcctctgnggatatcaanngggagtattttacagtnaagcacatgntttggngtgangaatnccgatgttgctctgctggtccaggctgttactactcttcttgctcctncggggggcccccttcanncggtatcacaaagccttcatcngtggcatacagaatgtctacaatcctctgcantacngggtcgttttccccctcgttctcctggcaaatcaattcaatgtnccgtagctttccgaagtagaaatccctctctttctccaggtcttcaacagtaggtttcaatacgttgacctgcggcancaacncagcngcctngtcgtcgccgttgcccacaccggggtnctntcgcaccacaccagggccagccttaggagccgcagcgcttctctgtgttgagatgggcctctggggagctgcactgctagaagtgagaggtttcttcggtttattcagagctggagcaacaagggaaggagccactgcagtntcttgaccttgtctggcagccacagggtcatagtcttttccatcatagtttgcatcgaaaaacttcttgaaccactgaacgaattcaaattgtcctgaaactttccttttactaatttgtgcacagggaatattttgtcacacccattctcttaaaactgcttgtagtattttgaagtctgggtgtactcgtgtctnacttagctgggatttcactt

SEQ ID NO: 618732 - DNA, 985 bp, Homo sapiens
gtgcggctctcctttgtgggtggtatctgcgctccgggggccaaaggtcgtgtgccctctcccatggctcttgcgccgttctttctgggtgtgtcgcacccactcatgggtacctcttcgcctccgccttgttgtggtctgccacactcgcggggaacttgtgctaatccctgctgccgtgtgccgcgcccgccctttgtacaatagcggtcggaggctgcatgggcctattccgcgagaggtatcgtttctgcctattctcgcggtctatgggattgccgtgtggtgcgctccctaaacaagggaggtgttttttcgcgtccggtggtcgtaagccgccgtgcttactcagcgatgcaggcgtggtacatgttgcgctgactgtttcatgcgtttatgaggtgggcggaaacatctagaatcatgattagtaagaatgcaaggatgataggcggtccgtggtgtgtgactactatttggggtttcctaccgcaccgcttgttttgctgtttgtctgcggcccctattaagcgcccggtgtaccgcccccgtggtgcccccgaagtctccgctccccttgtcaagaagaagcagaggttgtgtgcacagtataaggcgcgggtggaagaagatttcgtctgtttatcaagggcaccccggcgcgctacgctgggtaagaaggcgcaaccccccgcccgccataggggttttttgagagccgccgtctcggggggtattgccataggccgcctagcacctgccgcggcacacataatagggggtattgataacgggccgtggctaatcttcaaaccacgagggtatctcttgggggccaacgccccacgcatatgaggtataaatacaaggggggtgcggtagaggttcgttcaaccagctgcccgatggctgtcgtcatcacccgctgtacagccgacaataatttttgttgctcaagagacaccccccggaaccccacaaaaca

SEQ ID NO: 618733 - DNA, 107 bp, Homo sapiens
tctcagagtactgcggaccagtactcattgaccccagcgcatgggggcttcgacatgggctggagaggagtcataagtaggagtccgtacaagaggtatctttcact

SEQ ID NO: 618734 - DNA, 151 bp, Homo sapiens
agttggatgcctacatggcgcagcagatccggattccaatgagtgaagcctgcccatactcccatgagagactcttgttaagtcaacacatctgtaaataaacctgagataacagctgagaagaaatctgattgatgctggatggacctat

SEQ ID NO: 618735 - DNA, 198 bp, Homo sapiens
tgacagttcttaacctgtaagaacttctgctcgcccatttctgttccaaatggctgacagagctctagcaggaccacacccaagctgtacatatctagacttggaatcatactacagatccttccaactgtactgggtgaagcgtacagacaagtacccactctggacgtatgtgtatggtgttctcttacccgtttc

SEQ ID NO: 618736 - DNA, 276 bp, Homo sapiens
gaagtcgaatccttttctcgcctggacgacttaatcgagaccattcgcggcctgggcatcaaattcgccgaaattcatatgtaattatttgcataccacggtcacgctgcgggtcttgtagttgccgacatccttgcccagggtcttgtcgctttctttcagggccggtgtgccttcggtgccgacaatccggtaaccggtccctgcgcaggacgcatcagccttttcatagcagctggcccaggagttggcttcgcggaacaatcggtcgacgcg

SEQ ID NO: 618737 - DNA, 375 bp, Homo sapiens
aacggttcctccctgccctcagcctccctgaagtaagctgggaattaccagcatgcgcccattgtgcctgaatggcctactttttatatttttagtggagacggggttttgcccatgttggtaaggctggtcttgaactcctgacctcaggtgatccacctgcctcggcctcccaaagtgctgggattacaggtgtgagccaccgcggctggcctggggatattctagatcttataaatcatttaccatctctttggagacacctcctacatccctgtttaagtcatccccttagttaaggcttattgatttcacatagaaggttacctctagtaaaaggattcagaagtcagagtttgtcctcactgaaatctg

SEQ ID NO: 618738 - DNA, 160 bp, Homo sapiens
aggattacttattcgtgttgcactcatgtctatattcagtcatgcaccccataataatttgcagtcaaatgatggaccccatgcatgacagtggttccataaaactgataatggagcatacacagaagtgatatctagtacttctgtgtatgctccataa

SEQ ID NO: 618739 - DNA, 554 bp, Homo sapiens
  misc_feature (531)..(531): n is a, c, g, or t
tcaaatcgttgaagaaatattatggggcatttttctaggctttattattaactattattattcgatgagacaacatcctaaactacactttttggcaagctactcaggcagtatctcttaccattttaaataaacataacgtttaacacagcaatcctaacttgggacagctatcccacaaaaacaaaagcacctggataagaggaaactgtaggggaaagtgttttgatggaaaccggcatgagggccctcctttccggttttgattctatcgggtctctgaggccttccgggcttttgggctattttacaacattgtagctgattgcaatgcaaaaatagcccggcccctagacaggtacgtgaattctgttccgtggagattcggttgactacgctccccaactgtggaagaggccagctgtgtgtccatttacacgttcactttgctattcatctataaatgtgtctgttctttggattgtccttggtttaaacatcttcattattgcctcaataatgaattaaganatttagtacacaattaaaaaaaa

SEQ ID NO: 618740 - DNA, 1163 bp, Homo sapiens
gggaagtgaaaggcgccaggtgccagtcctggtgctctgatgtaatcccagacgccccgcagtcccgagtacatgattcctggatctcagccccatagcagactatgatccctgctggctgcatgggcagacgcatgctgtagcggtccccgtccgggtgacctctgacactgctacggtggaatctccggagcatgactgtatgactggttcgtggctctacaatgctgcctaagctcttagagggtccgggtgcaggctggctgcatgagacgggctgcagttacaagtatctggaccgatgacgctccgggacgtgtctggctggcgacggtcacgggggccacctcgagtcagacagcgcgcggaagggggggcccgatagggccgcggaaggccgtgtcagtcgcgtctctgttagcacgggaggccaaacaaacgcaggaaccaagactcaggcacctgtaacctgcactctgatcgagatgaaccaaacacgtcatcaaatcccaagacaaggctcagtgacatcttccatgctgtaggtgcactcggaaggtgtagtccatgcgtccttgaccagcggataggagggcttgcttgagctaggtccacaagtgtaccctaacttccctccaccgggccatcctcttgctagcatacagctggccctcatagcgcctgtacctacgggcagacccctgctctgtgtgtcttttccctttcgctcagttctcgaagatgggcaagcagctgacctacagctaccccctgggtctataactaccagctggaaagggatcttttgcccaggaattccccgacttggagaatgtggtcaaaggtgccaccactgttagccaaagaaccctggaaacagcaggcatcacactccacatcccaggcccggggctgtttaccagagctttggcacagtcagcaaattgtgggatgacctgtactccgggtggtggaagcagccctgggttaccagcctgcaggtccagttctgggacaaaactggtaggatcctgccctctaactagcacggaattctaggcaggttctgattgtgaccagataagttccctggaacaacggccaagtacacagacaaggagcactacaatggtgcggtcccaaaggcctggactgttggtaaa

SEQ ID NO: 618741 - DNA, 277 bp, Homo sapiens
  misc_feature (49)..(49): n is a, c, g, or t
  misc_feature (199)..(199): n is a, c, g, or t
  misc_feature (275)..(275): n is a, c, g, or t
ttttatttctttacaaattaaagatgcattgaaaaataaaccaatgaanagaaatgaaaggtccatagcaggggcatcctgggctgggagcaggcaggcctgaccacggtcattcctagcccttgtcctgcccagccaactggagttggaagataacttgtcagccactcagtcaataccaaagcccagtaacgtcctngcaccggaagacaggggctccagcatagtctggcctctccccaacaaacgttttctgggtgggaagcttgaagttngg

SEQ ID NO: 618742 - DNA, 234 bp, Homo sapiens
tacgcaggcgcagtacttcttattctacaccctagttaggctcccttcccctactcatcgcactaggtttacactcagcaatcaccctagtgctcactaaatcattctactactcactctcactgcccacgaactatcaatactcctgtagccaacaacttaatatgactagcttacacgatagcttgtatagtaaagatacctctttacggactccacttatgataccgcgaa

SEQ ID NO: 618743 - DNA, 233 bp, Homo sapiens
ggatttctcagttatgtgtgagcatgggctgattagtcattagtccatcgcgatgtcttatttaaggggacaagagtgggcgcatcttcaggtgagatggtcctgacagtaagaaccagatgcctgttaaagttcatcacatagaaacccccacggtttattgggcccggagcgaggaagcagggatccctgcccaagcgggttgctaggtttcacgcgcgcatggtcagttc

SEQ ID NO: 618744 - DNA, 122 bp, Homo sapiens
aacgatggtctcagctatttattagggtggtaaaattactagtgatttccatttttttccccctcattctgtcacccaggctggagtacagtagcagaatcttggctcattgcaatctccag

SEQ ID NO: 618745 - DNA, 467 bp, Homo sapiens
gacacatatagaaggctattggtttccaatgtttagctagccaatgaaaagacaaacttcatgtacagggttgataccctaaaagataggtggctggagcttaaagacagctggctgaatctaggcggcagtcgaagagaaaacaaagtaagcattagtatgatacagaatgttaacaataggctgcgtgcagtggcccatgcctgtaattctggtactttgggaggccaaggtgggaggattacttgagcccaagagttcgagaccagcctgggcaacatggcgagacatcatttttaaaaagaattaaaacaattagccaggtggtacatggctgtagtcccagctacttgggaagctgaggtgggaggatcacttgagcctggaaggttgaggctgcagtgagctgtgttgacaccactgcactccagcttgggcaacagagaagacactgtctcaaaaaaaaa

SEQ ID NO: 618746 - DNA, 568 bp, Homo sapiens
ggagagcgcactcctgggcggctccgaggcctgacgtgggcatcattttaacaggtgcctttttgtttttggtttcgttttttggtcactccagtagctcctggaaaaaaccttaaaaaatgtttcctccaaatctgatttcattacatttctgaatgtcgaaaaaaaaaaaaaaaaaaaaaaaaaaaaaattgttggggcggctggggcctgcgggaaaggtttttaagaacaattgtggtggggggggcgggccccaggaaggtatcaggggagaccttggggcaaaaaagcgtggtgttccacagaggagaagccccgcgggcgccacatagagaccaaggggcggcaggggagacttctctctaacccaaaatgttaaaaaaaacgcgcgccgggggggaaaacaaccaagcagaggggtcttcgtgcagaaaccaaactctccaagagagggagagttcctgaggaggggcccacatcaagcgggggccctactaacaaagcaggggagaggcccaaaggggagacgcgccagatatttcaaattaacgcccgggacccaggg

SEQ ID NO: 618747 - DNA, 116 bp, Homo sapiens
cttaggctcagagctcgagatcaaccagggcagtaaggtgaaacccctgtctctacaaacaagtacaaaaacaaaaattagctgggcatggtggtgtgcacctgtagtcccaacta

SEQ ID NO: 618748 - DNA, 272 bp, Homo sapiens
gttatccagtcttcacacgtaatcataagaacgaggagcttctcgtaggtggatgcccactttaagtcggtgatcttacccattcgcacatacttataatgtctaagcttccgtaaaaggcttatgttctgtgtgacattatctggtgggttcagagagtcggttttctattctgattaccaaggtctgttcttgaaagagcaaagtgcctataaatggtgcagaggttcatggagctataaccgttaggatgccccacaaggtatctattg

SEQ ID NO: 618749 - DNA, 476 bp, Homo sapiens
catgcctgtcccgggctggcagggagggtcataatgacctgtcaccggatggtccgtctcgcgcggtgacaccgtagtccagcctcaaatgcggccccaggctccacgccaccatacatggccgatgtgccgcttatactagcaagacggcgactattcggggatagcatgatcgaatcggtcgcgagcacttgagatccagtcacctcactctttacaacttctgagatgacctgcttcactcacctaacccgggcctgtgtctaagccttctatggagtgaaaaaaggacactcacctgtcgcagatgaaatgctctggacaaagagctggcccactttgtacaaaccatgccaagatgcccgccatcacccggtttcaccgttacaattgaaaaatgggcaaggacgctatcctgtaccacccaatataccttgcatcaggcgggcagtggtcaagccctagaaatacaccca

SEQ ID NO: 618750 - DNA, 366 bp, Homo sapiens
cggcactctagctcatggtcacacattctgaaaatttaaatggaaagtttcagtaataaacaattcataagtcttaaatgtgtgccattctgaggagcatgatgaaatcttacacgtccctctccattccacttgacgtgtgaatcatcccatcaaccagcttatcctcgctgtacgggctaccctctcattagtcactgaacagccatcttagttatcggattgactgcagcagtatcaagatgcttgtgtttgagtaattcttattttacttaataatgaccccaaagcccaagagtagtgatgttggcatactgttataaatattctattttactactagttatttttgttggactagagtgg

SEQ ID NO: 618751 - DNA, 706 bp, Homo sapiens
  misc_feature (286)..(286): n is a, c, g, or t
  misc_feature (369)..(370): n is a, c, g, or t
  misc_feature (435)..(435): n is a, c, g, or t
cttgtattcaggcgcccctcccaccagcctttttattgcccatggggggagaatgttctgccgagccgggagttaaaggggagttattcgccctcccacccataataaaagggggtcccccattttggggctttccccccggcccatcaaaggggcgttggttaaccattgggcaaacagtggcatggggagcattttgtttgtcccaaggggaaaaaccccttttttggacttcgccattatgagaggaagggccgggcattttgtgaaacccccaatacccagntatttggggatgtttgctccccccccaatggggttataaaaggggagggggtttccgcttttaataaggccgggggggggaanngttttccctttttcccccgccccacaaatttaccccccaagaaatagtttgggggggtttccaanaaccccggtttggaaaagggtttataggaatttccccttggggggggaaaaaaaagccttaagaaaccagctggccccttgggaaggaaaaaggtccctttttttttttttttttaggcaaaaaaagagattccccccattcctttttttgttccccccaattttaaagctatttttcaaaccggttgagagaaggggcccaaaaagaagggttttaggtcttttttttaattaaaaaaaaaaaatttaaatattggggttttaaccccca

SEQ ID NO: 618752 - DNA, 592 bp, Homo sapiens
  misc_feature (592)..(592): n is a, c, g, or t
cgaaacgtcaggaaactagggttcagcccacccggacgaatggggcgggaccagtcattcacttttatagctcttcacgcacagaaggaagccagagacttttggaacgatggttaaagcatacctgtgatatagaatgccaatgatggcaagggcagtgatatttcccacgccaaggttgagcaagtacactaatccggccaactgtagctataatttactcacacaagcctatgcacttagctctagaggccggcatggaaggactcctgctcacagcagacatgattggcctgaagcaacaggtcggagcacaccagagtcacctgatcaatgacctttgacaacaggtgtggacacccgcagatcatattctatatacttgcactcatgtcggacgttacaggcctgggcctgatccaataacgattggaacgccaaggagagcacagtggtgggcgactcgcggtcccatactcacatgaactaccgcgctaccttgtggagctatagacgtgttacgagcactcttaattcactggctcgtacactgtcaagcgctactgatggtcgtacattcgtgcactagaan

SEQ ID NO: 618753 - DNA, 160 bp, Homo sapiens
atctgatactcgcgagtcatggtcactcggggtgtgacgccgaagaaaccgatactgacacgccgagaccccgtactacatcaggggtcggagtggacgaagttgttgtgcacacgccgagggtccatactagaggagatcgtggtggacgaagttgttg

SEQ ID NO: 618754 - DNA, 1170 bp, Homo sapiens
gagaaaccctacaaatgtaaagaatgtggcaaagcttttagcgattcctcaaacctggctacatcatgagataactcatactgaagagaaaccctacaaatgtaaagaactgtgacacaaacttttaagcgacttctcagacccttagctaaacataagtaatacatgctggagagaaactctacaaatgtgaagaatgtggcacagctttaagtcgatcttcaaatcttactatacataaagttcatacatacgtggagagaaaccttaccaagtgtgaagagtgtggcgaaagcattgtaactggtcctcaagccttactaacacataaaagaactttcagtacatagagaagacagagcccttcacaatgctacaacgcctgctggcacaagcaatttacataatggttccttcaaacccctaagctaagacaatacacgacggactaacaacaacatggaggacagaaagcccttaccacaaatggtgcacagcaaatggtgagacacaaaaggcgtcaggcaaagaccagagaaccacgtccagagaccccaatcagaccgtgaaaacagccactcaaggaaagcacggtacaaatcaccaggggaccgcaaagagaagacacgtagccacaagtggtcacaagcacatggacggcccaaacgcagcgaacaagccacagtcccacgagaaccccacggacgtacacaacagtaaaccgacaagacaacgagcaaggggccgcgcgcacgaacacgaacaaccggccgataccagccacagtgcaggacaaagacacacgagcggccacacaaggaagaggaaacagacccaagccccgaaccagaaactcagacaaacgaaaaaaagaagacaaggaaagaacaaagcagacagacgagaaagagggagaaagaccgcagatccacgcaaagagacgaatcgacacgcaaaacaggcaggaaaaaaagagagccaaatcgaaacagcagagggggggacccaacagacaagcacgcgcatgaacacgcaagacgcaggaaggcacgagaaacaccaaaaacgacaagagacagcaagccaaaagaacagagtaacaagacagagacggcagacgaccggcaacaagcggcgaggccaacacagcgagagcaagcagacgcacgc

SEQ ID NO: 618755 - DNA, 172 bp, Homo sapiens
tttggatttttgcccctttttttcccttggcccgggtgtcccaaccaagttgccatggccaagggccgaacccgtttgccctcacccctgctccttgggcccaggggccagggccccgcccctgggggtggcaggggggggctccggggtaataaagtggggaaactgtcca

SEQ ID NO: 618756 - DNA, 140 bp, Homo sapiens
  misc_feature (82)..(82): n is a, c, g, or t
  misc_feature (111)..(111): n is a, c, g, or t
  misc_feature (130)..(130): n is a, c, g, or t
ccccctccctccaccctcctcctgtccctgggctgtctccccctccctccaccctcctgtccctgggctgcagctctgcttncctgccacaggtcccaccccctgcctgcntctgtccacttcccacccncctcttcacc

SEQ ID NO: 618757 - DNA, 359 bp, Homo sapiens
tttttttggtttgtggggtgaaacaaaactgtaaaccccccccgggggggtttttgctttttttttgccaccaggcccccccctttttaaaaaccccccccgggttccagggtaaatttggttttttttttttttttttagaggttcccttttaaaccccccacccccccgggggggggtgttgggccgccccttttccccctttaagaaaaaaaaaaaaggggggggatgtttttgggctttttccccccaaaaaccccgggtttcttttttttttaaagggtttttttatggaaaaagggcccccttttggccaaatgcccccccttttttttcttttaaaaaaatgggggggggta

SEQ ID NO: 618758 - DNA, 1150 bp, Homo sapiens
  misc_feature (1104)..(1104): n is a, c, g, or t
aactaatctggtgcagatgatcaaaataatcagatgcgcagagtatcgtggcggaaccttcccgctgttaaccgcgcgacagtggttgagcccaacagacacggtctacttgagttggcttgctacattgcactaaaccaactcgagagattcgggcttaatccggtgagacaggaagcaagtatggagtacatactgaacagaagtaattcttgacagctcgcgtccgtgttcatgctagatcactgcttttaaagttggacatagagcgcgcaaagccgatataaacagcctcataggttagatgcacgtattgactatacaaggatacttacggacagcctagatggcctggacttatcaaaaccgtcgtgagtctgtggggatacgtgtcgcgaccatagaggtattccgcaatcgatcataattaacttgaaatggggacaatgactttctatacctttcactataacttcgaacttcctttaattgtaaaacggctgtcccgtatagtgatgtcctttcagtgcaaaggacaccacattcaacatttaagcgtgtctcattcacacacgagtggggtcactttacatttgtgcttttaagacagtagcgtctcgactcttgaatactatagggaagtgtaagagtattaaaacactgagcacgtggtattgttacttattatttctcaagcttgtgtggtaaatgcgggaatcctgaggggtgagaaacttttgagaaatggccgtgtaaccaatttgacggtaataaggcaaaaaatctctattaaacatgaatattttcaattaaatgcatagagctaaataaattattgcaaatggaattcttgggtggttacttcgatgggttgccgtagaaaagtgactagattacgtgtggccacaaatgtaagtggttgtggcggaaaagaaggtggatgtggttttggccgaaagtggcagcgcaaatgtaagggttgtaaaccacggggaaacttcctatcgaggttgatggaattagctattttagaggagggaagtagatcgttaaacatagtaatatggttgaggttcacacgggttttattgttctggtgagagngaataaacattgcggtgtgaaagaaagcaggacgtgtaattatcag

SEQ ID NO: 618759 - DNA, 248 bp, Homo sapiens
  misc_feature (28)..(28): n is a, c, g, or t
  misc_feature (45)..(45): n is a, c, g, or t
  misc_feature (76)..(76): n is a, c, g, or t
  misc_feature (79)..(79): n is a, c, g, or t
  misc_feature (155)..(155): n is a, c, g, or t
ctccagcacaagcagtaaaatttaaacnccaggcctggacaaaancaatgtttgttaaaaaaagtctgccagttcnggntgcgatttttcagaaacaaggaaagaaatcctaaataaagatgatctgtgctttggcaaaattcatttaggggaantgccctttttttccaaatggctgtgcatttttaatgatgatgaatataaagtatttagcagaaaattttttattaaagttgttgagcttatgg

SEQ ID NO: 618760 - DNA, 1197 bp, Homo sapiens
gggtccccacagctgccattgtggcccgacacactataccttgccaatggacagaccaaggtgctgactcagaagttgtcatcagtacagaggcaatcatattatctcagggacatgcgcatacatgtggtttggccagagcctatcgggttcagcacgatcaggccttctatcctgggctgcaacatccttcgagttgaatattcctatactgatctatgtagcgtacctggatccaacgaaggttcatccattgacctgccccatggataatcggacagacagatcaggtctacaaagcagacagaacatccagcatggacagacgaacccaggactctgagatgagtagggaagatctagaacatccacatgataacccagaaagctcactccctggctaatatggatgtcattcctgaacagaaacaccgatatggaagagcccaaaacactcctctgcctagcactgacatggataggctcttcaaggacacgaccctatctaaaatgtaatagcacccctagacaggtaacaaggtacatggccaacacaacagactatataactgacggggggaatcccaagacatccacaaaccaaagaaaagagcaggagcagcaatgagagacagaacaaggaaagcaaccaacaaccaacaatgaaacaaaaaaagaacacacaccaaacaggcaccaaaacaacgaaaaacaagacgacatccaaaaacgacacatgcaaaaaggagatgacgaggaaccaacgcaataaggaacgcaggaacatacataaaaaagaaagagaaagaagaaaaaagacagggcaacacaatcaccagaaagacataacaaaggagatgagaccaaaacatcatacagccaccagaccaccatgatagagacaacaggaaaaagaaaaggaaaggcaacagcaaacaacaaaacacgacacgaagaatcgaaaccgacaagacacaaaaacagaatgaggccacaacacaccatgacaaacaataggaggcgccttaaaaaaaaaaaaaaggagagcagagaacaaaaggaacagacagcagatcagccaagcaccaagcgacgacggaaagaaatagagaacatagataacagcacccaataacgacagaaacaatgaatacagtatcaaacgaacagaaataagaaatagaacaaaagagagat

SEQ ID NO: 618761 - DNA, 81 bp, Homo sapiens
cagccccgtggggtgcaaagtgtgacccgcactggggggcggcccgggcatagctgcgttcccggctgaagattttggctt

SEQ ID NO: 618762 - DNA, 103 bp, Homo sapiens
ccaatcagcaggacatgggcggggacaataagggaataaaagctggcgagcgcggcaccccaccagagtctgctctcacgctgtgggagctttgttctcttgc

SEQ ID NO: 618763 - DNA, 93 bp, Homo sapiens
ctcacagggatgtgtgagggttgatgagagaatgaatgttaataggaatggaaaattcaaagcattaaacacatgtaaacaggtggtattatt

SEQ ID NO: 618764 - DNA, 215 bp, Homo sapiens
tcaatgtcatccatctgctcctttctgtgcacctattaaagaacaatgagtgtatgctccattctgaatttcgtccagcctctctctaactgtatctttgtccatcatgaactttcccttttgttcattgaactatatagtactcttcatttcattttgatttactgtgcaatttacttttggacacttgagaacttgaaatggtcgccaatccg

SEQ ID NO: 618765 - DNA, 1068 bp, Homo sapiens
  misc_feature (42)..(42): n is a, c, g, or t
  misc_feature (46)..(46): n is a, c, g, or t
  misc_feature (121)..(121): n is a, c, g, or t
  misc_feature (210)..(210): n is a, c, g, or t
  misc_feature (214)..(214): n is a, c, g, or t
tagggagctgggtggtgaatcggcaccgaggggttcctgctnggtnagctgactggccgttcttcatctcttatcctgtactggtgcttcctcaaatgctttctggaagtagctaggagtngaatgcaaaggatagatcatcaaaggtctctctctcccacctccctccctctttccccacccccttccctcccctctctctctctcccntccnttctctctccttctctctccctcccttttcttctccaccacgctcccacatctcctctctactctttctgtctctctccctgctaaagaaagtgggaacaatggagagttgttacggacagcaatggcatcccagtggggtccactcatgaggcgtcagcgcactgaagaccttgcaggatgggaagctacatccaacgagcgctcgggggattatgccccagatctgcagcgagcgcacactacactcggtaaagttggcgtcagctaagaacctcagttgcttgcgagggacatgccccagtctgcgtctaacgcgagcaacgcagcaggacggagagtgagcgaaggaagtgcaaggagcaacacggccgtggggacagagggaggaggtgggcgagagggtgaccaccgagcatgacgtgaagagacagaaggccccgaaccacagagggagtgccggaaatcggccacgggagggtggcagtacccccaaaaggggagctcacaaccagcaggaagagagcaggccagcgagggaaaaacaagccaagcttccaacgcaggagcacatgcacaagtcgggaccaagatgttacgaacagagacacaaagaagacgaataccataagagcgaacgaagaagcagacggactgccacaagggagagaacatccacatcaacgcacgagcaaatgtgtgacagggcacgggtacacgcggtggaatcccagccggtaagaaaggggaacatggcacgaagcgacgcacgaagggggaagaaaaacgaggcgaggcgggaaagcagcatacacgaagtaaaacccgtgagctggataccacagaaggcccaca

SEQ ID NO: 618766 - DNA, 402 bp, Homo sapiens
cgctggcttcttcttctcatggggtcgccgggatctagtgatggactgagttactaacatgagcacccatgtcttgactggtgtacatggtggcttcgatgtacaagctatctccgagattgaagttgacttagggaagaagggagcagagaatggaaaaagtggagcatgcagaggggtcttacagcaaggatgggtctttctatctctagtactacactgaattcacccccactgaaaaagatgagtatgcctgccgtgtgaaccatgtgactatgtcacggcccaagatagttaagtgggatcgagacatgtaagcagcatcatggaggtttgaagatgccgcatttggattggatgaattccaaattctgcttgcttgcttgtgaatattgatatgct

SEQ ID NO: 618767 - DNA, 792 bp, Homo sapiens
  misc_feature (42)..(42): n is a, c, g, or t
  misc_feature (46)..(46): n is a, c, g, or t
  misc_feature (121)..(121): n is a, c, g, or t
  misc_feature (210)..(210): n is a, c, g, or t
  misc_feature (214)..(214): n is a, c, g, or t
tagggagctgggtggtgaatcggcaccgaggggttcctgctnggtnagctgactggccgttcttcatctcttatcctgtactggtgcttcctcaaatgctttctggaagtagctaggagtngaatgcaaaggatagatcatcaaaggtctctctctcccacctccctccctctttccccacccccttccctcccctctctctctctcccntccnttctctgcctctctattctctctctctctcccccctcccccgtctcattttctctactctctcccccgcttccgcactactcctctctctctttctgatctctctccctgctacgaaagtgggaaccaagtggacgagtgtcaggacacgctggacatcccagtggcagtccatcttgacgctccagtggacttgaacgccctcacgtatggcccacatctccccaggcctggcggtctactccccccacatctcgcacgggagcccactccacttacctaccttgtcctcagatagcactccactgcctttcgccacccagccacctcggctccaccgagcactcatgacgcactgggcctaagagtcaaagaattacaacgaacaaagcgctcttgtgaaacagcgaagcaggcgcggcacgacccgtgaccccgttgcagacctcgcactcaagatgtcctttccttacaagcttgtagtagatagcactctgttgctcgctcgcattcccccacacttgccgacttccaccgagcacccagaatcgcagcaccacccgcatctacccaaccttc

SEQ ID NO: 618768 - DNA, 202 bp, Homo sapiens
cgtcgacaggacagccaatgctgtcatgacttcaaaacagctgtggctatattcattaagtctacacacaaatgagcctatcaacaggtggtcagggaggggcctgtgggacctgctcctccctgctaagctaccagctacttatggatactgaaaaaaaaagtcgtatcgatgtcgagcgtcgacgcggccgggtcgacgc

SEQ ID NO: 618769 - DNA, 408 bp, Homo sapiens
catcatggggttcggaatctcccaaatcaggaagtgagtattaggttgggttcatctgggtggccccgtgcacctgttctccctcctcttgcctttgccatggccgttcctttgcctgtctcatcctttctccgctctactcttcttccaagacccagttcattttatgatccctcgttaaggcctcaaagaggactaggggctgaaatcagacctgaactcacttctggcgtcccactattgccctacacagagcctggtgctaaagtgaagtgaagttatattactctttacactagtgatctgaactcagggagtaacaactaggtcttcggggtgagaaaggggagtccatgaagccaagtcgatgtctgtctgacagggcccgtctcttcccaccctcagtct

SEQ ID NO: 618770 - DNA, 363 bp, Homo sapiens
ccataggtgccacaaacttggattttatgcgcagcttcttctcaaacacgatccggcaggcactcttgaggttcttctgaaggccggtgcccgtgtcaaggagctccttataggtaccatgaatgtctgggctcctgatcaagtcatagtagagagcccggtatatgatgtattctgttcgctgctccgctcccagcgagaggtccgagaggccggtggccactgtgatagaagacagaagcacgttggtcgtggggctctgtgttggatcgcacccggtacaggtcatagtcgaagttatagacatccactgacagcgtgctcacgggctctgtaaacagaggatcctcctcctccaacacc

SEQ ID NO: 618771 - DNA, 518 bp, Homo sapiens
  misc_feature (24)..(24): n is a, c, g, or t
  misc_feature (38)..(38): n is a, c, g, or t
cttattgccaactcagcctagacnatgctgatggtgtngccactatttgctaggccccaactcaagccaaggtgtagatatttagatgaatcttcgactggtgcactgatgtatttttatataaccattatttaaccaggcaagtcagctaagaacaaattcttatttacaatgacggcctccgcctggccaaacccgaatgacgctggcccaattgtgcgctgccctatgggactcccaatcatggccggttgtgatacagcctggattcgaaccagggtgtctgtagtgacgtctcaagcactgaaatgcagtaccgtagaccgttgctccaagcatgtcactttttctgtggctttcggtctcctctcggttcaggcattgaagcagaggtgctggtggtggagtcttttgaggagctgaagaaaaggcagaaggaagccattgggaagatcgtggtgtataaccagccctttgtcagctatgaggagactgtgcagtacagggagtttggggcg

SEQ ID NO: 618772 - DNA, 131 bp, Homo sapiens
agcccgcctggtcccctctgtgagcacccatttttgccaccactaacacagctggctgtgtgtggcacatgccagtagtcccagctacttgtggcagcttagtgtgggcggcttgcttgcgcttggggtgg

SEQ ID NO: 618773 - DNA, 123 bp, Homo sapiens
ctgctctgtggtcatgtgaactgcacgataaaggaactcaggcgcctcttcttatgacgatttagttgattctctgaagtttgcagtgttgatgtggtattactattaggtgccttgttaatg

SEQ ID NO: 618774 - DNA, 546 bp, Homo sapiens
gcactccagtgacacagtgtgagaccctgtctaaaataaattaatttaatttaaaaataaaaataaatttaaaaagaaaagaggctgggtgtggtggctcacatccataatcccagcactttgggaggctgagataggtgtatcactggagcccaggacctcaagaccagcctgggcagcatagtgagaccttgtctctactaaaaattaaaaaaattagtcaggcatgggggcatgggcctgtagtcctagctacttgggaggctgtagcaagaggatcacttgaacccaggagatcgaggctgcagtgagctattgttcatgccactgcactccagtctgggcaacagagggagaccttgtctcaaaagaaaaaaaaaaaaaagaattataaaattagctagccttggccgggcaaagcggacatgcctgtaatcccagcactttgggaggccgaggcgggtggatcacctgaggtcgggagttcaagaccagcctgaccaacatggagaaaccccatctctactacaaatttattaaaccagg

SEQ ID NO: 618775 - DNA, 1517 bp, Homo sapiens
aatagggccagaccggtggaactgggaagtaagcagagtgtttgagatctacatggggaaagagactagccttaattggtagcccacggttatagatgggcctctttagtttatattaagtgtctgaccataactctgattcgtaggtgagtgccaaaatgctctcttgtatagtcgatactaaaaagacccactgggggccctgggagtaatccgcctgggtttcatcctggcggtagttgttcgacccgtaggtaattagggttgcaagtttctgaagaacgccgaaacccgtccacgctgttcgcgtactgttattagacgtttaacagatagccgctccaagggccgcctctatggtagcttcgccgtgtagacaccatagcgggtgagcatcgacttgtcgttgcgagggcgcccactgtccgggtttaaagttgtgataagcgcctttgctcgtgggaccaccgttaaggtcgccaaagtgctttgaaggtgttgtccgaggcgattgttgccgcaacctttgcgcgggtgaaagcgggcctgcccgttccaaataacgcgtaagtggccctctaagacgtgaatgccccgtagccaaacaagccgttaggagcccgcaaagtatgtaagtcgccagaagataggaacctggggcactgcccgtaacatgggtaaagagccaaccccgaatgacaaactggtcaggcgacataagcggcacaaggggtccccagtctgcaatcattcaggcgtcagtctcctttgtttcgcgagaaatgtgaagggtcctcttttgcggaattacttccgggggcacttaaattgctcgtaagtgtattatgttaggcgcgtgccagtgtaaagagtgtgcttagtattgtagcgttgttgcggtctacggagaaatgtgtgtgttgcgttagagggccatttagtaacgtcagctttcccaaaggcccgtaggtcgtccggcgtatgcgcgcgctgctcagagttgtgaggcgaagagcgtggcatgcttggtgtctcgctcgcacagtcagggtcagtgcaagcgcgcgcggcttagaaagtgctccgcttaggaagggtgccgcagcttccggtataagcagcagtcgcgtagttagcgtcgcagtcagggatgtagtcagagtcagacgctgaggctgccaacgcagtatgtgctgaagtatgaaagagcaagcgcgagacatcgcaagagtaacttccaagcgacgtgcgtcatgtagcaactattgtagctgggtcgtctattgttagccctccgtagcaagccgtgcagagtagcttcgagtgctccgcttcagccatttgccgatcggcatctacggctcaagcatttgtttgtagccacaggcttccatcggacttcacgtcacttaatggctcaacgtttcctcactatctgcttcatccgccaacgtaatatttcagctttacagccaaacatcactttggcttcgaagccgccaaccttagtactggca

SEQ ID NO: 618776 - DNA, 198 bp, Homo sapiens
cttctgatggtgatcatggtaaattaaggaacggaagatgggacaggcagataagaaaaatgaaaccctgaaggggataagaagtgctgagaagaagacacctgatgacaaggtaagaatccttcctccctgcaaggaacccagttctctccccaacccagctctgacaccactactcatggccctggcagaagctca

SEQ ID NO: 618777 - DNA, 443 bp, Homo sapiens
gggatctcctatgttgctacgctggtcttgaactcttggactcagtgatcctcctgccttagcctccccaactagctgggactacaggtgctcatcacagtgcccagctctattagatgtatttttttttttttttttgaaacaaaatctcgctctgtcacccaggctggagtgcaatggcatgatcttagctcactgaaaccactgcctccgtgttcaggcgatacccctgccacggcctcccaagtggctggaattgcaggcgcacgccaccacgcccagctaatttggaataaagggtggaaacggggtttcaccatgttggccaggctggtcttagactcctgacctcaggcggtccacccgcctcggactcccaaagtgctgggattctaggcctgagccaccaaccccgaccttagctatataagtactgaaacgaa

SEQ ID NO: 618778 - DNA, 1407 bp, Homo sapiens
  misc_feature (621)..(621): n is a, c, g, or t
gtcacggcgtggggcaagacaccaagatggtcgggatgacgtccgtgtgcagccggtggtggccctgtaggccctgagtggccctgtgatgcgggaaccgtggatggcttccgacgtgagagtttcgtccagatgggcaattctgggagccggcgggtctgctagacagtaggcacggggcactgcggttccgtatgtcgcgagagactcgcgagaggccagtggcgagggattaagtgagtggaagttgccactgtcacctagagttttgtggcctgcttgggtcatatggaccatgatatgatcatacgttcgccttggagagtaggaatctactcgttctatctcccctggcccaaattaaggagaacgtcaagacgagtcaactatgagtattcctatcccttggtgagggccatcctcgtcaaagggatttgaaggtatattcgacagggacttaattgcccatatgccaagaaacgacagaccccaggtcgcgcggtggcacaagcagactcgagggatttcaactggcaagttgttgatggctagtcagtaggtgacgtaacatatggtgcgctcatgccgtcagcgtcgcgtgggtcgtatacatttggcatnccgaaagcgatgtgtagtgaccaacacagccaggtcccaggttgagtcagccaatacattcccttgcgtcacaaagacctacctacccagtcagttcacccctggtggctgtcaaggaaggcgcataccttggggggtgaaacacaacgaagttccgggacgcagaaagtggcgacaagtaatctttggtaccctccgtttggaacataggtggcttagaaatcatgtgggcgcgaatggtagccagaggctttcgcttggttgcgtttggggttaaccagagcgcctgtcgagatacgccacagtgagcattcccgaatgaggggttgcgacgcttaggcggctgagttcgtgcttcccttaccgcggacacccgtagtaggttggcctcgttaacacggaaacagccatttggtgcccaacttgaaactgtggctagggcgttagctccggacactgaaccgttaggcaatttcacaagccgtttcaaagagccctctggagggggtcgttgcccacgattgagccagctgccatctggtggtgtagtaacaactgtacgtcagccaaagtgtgagccaagcctatttatggaggttaggcccacattttcgtttatcgaacgccgttaagcagtgtatagctcattgaaacccagcacaggtagacctgtcgttgtaacagggtgaggaacttggtattctcaacaggagagggttcgtcagggtatatacagaggaaggctacaacacgtgaatccgaccgggtcagtatagagaaagcgca

SEQ ID NO: 618779 - DNA, 363 bp, Homo sapiens
atataccaaattagcctaatatgtttcttttggacttccaggggccctatttggacttccaagggctttaatgcccaaaagttagcttgaggtcgaaaacatttaagttagaattttacatttgattttggaaagtttgtcaaatatcaaaggtttaaaacacttgatcaaaataagattacaggtcactgtaagataatagttattcatttagccaaactgataattcaaaaatttcaaaaagcaaaaattttactctttgacagaggggagattcagttttccaaacaatcaaaagacataataaaaacagcattagggaaattctctcctcttattactaatattttttgcagtttactc

SEQ ID NO: 618780 - DNA, 571 bp, Homo sapiens
agcaataaagctgtttatttcacctgggtgccggtgggctgagtccgaaaagagagtcagtgaaggaagataggggtggggctgttttataggatttgggaaggtaataaaaaattacaatcaaagggggttgttctctggtgggcaggggtggatctcacaaagtacattctcaagggtggggagaattacaaagaaccttcttaagggtgggggagattacaaagtacattgatcagttagggtggggcaggaacaaatcacaatggtggaatgtcatcagttaaggctgtttttacttcttttgtggatcttcagttacttcaggccatctggatgtatacgtgcaagtcacaggggatgcgatggcctggcctgggctcagaggcctgacattcctgccttctgatattaataagacaaataaaacaaaatagtgttgaagtgttggagcggcgaaaatttttggggggtggtatgggaagagaattggccatgttttttaaggccgcttcaaaatggaatatgggcctgtttgggaaacctctagggttaaaaaataaacttgcag

SEQ ID NO: 618781 - DNA, 473 bp, Homo sapiens
gacgtcatatgctgcttgaaaattacaaatgtgtcttcgaacaatctacagtcaaaacagtgcacgtcccgagtttctcctatagtctgacttcgtgaacgtagtctcatccatgagtttttctggaattgaatgaactttgtctaatatttcttcaagtaagtaattaagaagtcctgcttccttgcatttcttaagaaaaggaactttcacagttgcatctgtgtgtctgccatgctcttctttcacttgtcttatgaatgtattacatttcattgtttcgggtggctgtacatgattgcctgagaggggtttcttccttcctctttttcttttcactcctgaaaatttagctaaaaatataaaccatttaaaaattggaatccataaaggaaaagattactctttgactacatgaaatatacaactcatatgccaaaagttcttacaaagccaaaagatatggcaaactt

SEQ ID NO: 618782 - DNA, 161 bp, Homo sapiens
gcagaacgacagtgaacaccagaggatgttcaacccgtgtcctccctggtcaagggccacctctctcccaattgccggccgcccacggagtagaagggaccaatctgtcccgcgacgtctgaacccatctcacggaccactttaaaagggcgaacagcaaa

SEQ ID NO: 618783 - DNA, 225 bp, Homo sapiens
  misc_feature (137)..(137): n is a, c, g, or t
  misc_feature (206)..(206): n is a, c, g, or t
  misc_feature (224)..(224): n is a, c, g, or t
gccagtcattgtggagcaatgtgagagcatggtgataaaggtaaggaacatgttttctttttttaactcctcttctgagtagctgtgtgatcttggacaagcctaaacttcgtgggctacctttcgaaacatggcanatgaggacgtctgaagctccttcccatgctaaatcacttgatttcaaacttgcatacacttagtcctanaatcagatgccctgatana

SEQ ID NO: 618784 - DNA, 1124 bp, Homo sapiens
tggctgtggtgctgggatccctgagctcggcaatgcagctgcagctgtggcctggcccacctgctggtgccctggaggctctgagccccggtgtgctgccctggtgcccacgctggaacgatggggcgagatgctgagccaccgcctctggcttgctcctgctgggttccctgtccagtgaagaagctggttggacgttggattgacaacttagatacctgagctgtcccgtccaggaaacgagctcgaagtgggccccgagcccagacttgcaccaccgtgccatgttgccgcctgatgccacacacttactagcatccaaggatcagtcgcaagcttgctagttgggccacattggctcacccgtcattgaggacccatattgtccctcccgtcgggagcccagagggagtggctggagctggatgcttatccatgtgctccttgctaacttgccccttaccagggcaacattgagattaataacccttgcaaaggggtagtaccacactggttgcaagagaaaggcacttgggcgcctgtgccttgggagaccattaattgcagactggaatggcgcacaccgaaggaagggcattgtaggcatctgtgaccacaaagttgaagggagtcccgttggagattgggtataccacgacaagagcattcaccattcatttaaacggacccgtttatgtgtacgacattcggaggaaccccacacagtggggggcacacaattgcataacaaggtcacaatgggaatgacggaacaggcgcccgacgaaccgagatgattcgccacgttgacaggccccgttgaaaggagcgcttagcacaggagtgtccgtacgttttaccgggtccaaggaaagttatgggacaatcagcgtgggtactcgtttgtggggggacgagtttggtatgatcgcgaaagggcgaaagggggtactatagagatcacggttagacggttagaatttcttctaagaggctgtttgttgatagggagatatgtggtaagtataggatgtgacacggttgaatagagggatatgagagaggattggagtggattgggaagagaaccattgggaaggtacttagcgttggagtatgatggc

SEQ ID NO: 618785 - DNA, 166 bp, Homo sapiens
aggctccatgtaaacgatatttggaggtcagctactgaagctcactgtgtcgacggaacttgtacagtggaggcatgcaccgcatgtggtgaatacacgtcgaccaggatccatgtatacgttattgggtggtgaacacggatctcatatagttgaaggagcttgt

SEQ ID NO: 618786 - DNA, 805 bp, Homo sapiens
  misc_feature (15)..(15): n is a, c, g, or t
  misc_feature (62)..(62): n is a, c, g, or t
  misc_feature (70)..(70): n is a, c, g, or t
  misc_feature (82)..(82): n is a, c, g, or t
  misc_feature (87)..(87): n is a, c, g, or t
  misc_feature (89)..(89): n is a, c, g, or t
  misc_feature (99)..(99): n is a, c, g, or t
  misc_feature (140)..(140): n is a, c, g, or t
  misc_feature (167)..(167): n is a, c, g, or t
  misc_feature (182)..(182): n is a, c, g, or t
  misc_feature (187)..(187): n is a, c, g, or t
  misc_feature (196)..(196): n is a, c, g, or t
  misc_feature (198)..(198): n is a, c, g, or t
  misc_feature (204)..(204): n is a, c, g, or t
  misc_feature (210)..(210): n is a, c, g, or t
  misc_feature (263)..(263): n is a, c, g, or t
  misc_feature (423)..(423): n is a, c, g, or t
  misc_feature (499)..(499): n is a, c, g, or t
  misc_feature (624)..(624): n is a, c, g, or t
ggaggaacggccggnacccaccccgtggggctccaagatgccctttggggaactgatgttcnaatccagnagtagctgcggntgggnanatggcgtttntttttcagccagcgggagccgcgtggcctgggtgagccacnacagcaccgtctgcctggctgatgccnacaagaagatggccntcgcnaatctggcntntgaaanactacnacggctggcgctgaccttcataacaaacaacagcctggtggcagcgggccacnactgcttcccggtgctgttcacctatgacgccgccgcggggatgctgaagcttcggcgggcggctgaacgttcctaagcagagctcgcagcgtggcttgacggcccgcgagcgcttccagaacctggaacaagaaggcgagctccgagggtggcacggcngcgggcgcgggcctaaactcgctgcacaagaacagcgtcagccagatctcggtgctcagcggcggcaaggccaagngctcgcagttctgcaccactcgccatggatggcggcatgagtttctgggatgtgaagggcttggagtcagccttgaaggacctcaagatcaaatgacctgtgaggaatttgttgccttcatcctngctgctggggaagcggggagaggggtcagggaggctaatggttgctttgctgaatgtttctggggtaccaatacgagttcccataggggctgctccctcaaaaagggaggggacagatggggagcttttcttacctattcaaggaaaacgtgcctttttcttgaatgctttcatttattga

SEQ ID NO: 618787 - DNA, 710 bp, Homo sapiens
agcggttcaagactagcctggccaacatggtgacatggtaaaaccctgtctctactaaaaatacaaaagttagccagggctgggcacagtagctcatgcctgtaattctagcactttgagaggctgaggtgggtgaaccacttgaggtcaggagtttgagaccagcctggccaacatggtgaaaccccacctctactaaaaatacaaaaattagtcaggtgtggtggtgcatgcctgtagtcccagctatttgggaggctgaggcaggggaattacttgaacccaggaggtggaggttacagtgagccaagatcgagccactgcaccccagcctgggctacggagcgagactccatctcaaaaaaaaaaaaaaaaggttgccaagcgggggggcacacacctgtaatcccagctattcaggaggctgaggcacaagaagggtttgaacccaggaggtgaaggttgcagtgagccaagatcgtaccattgcactcctgcccgggcaacagagcgagactgtctcagaaaataaatattaaataaataaacctgccatatagcttctatgacccaaagatgagatgcccctgggccacctctaaaaatctcctacaaagctgatgtaaccttgagaatcaccgaggacccaaaagctgactgagcatcaaatattctgctagttcttgcagatggggtagaggaagaatttc

SEQ ID NO: 618788 - DNA, 572 bp, Homo sapiens
agagctgtgaggaagctcactgcagagtgttgcagtagcatgagagggaaaggcacccagcctggatctcactctggtgtcatcgccgcctccctctgctcagggttgtgcagcttcaggctgctcccctgccctctctgggcctcagtttcaccttcagagcaacgggaacagccccatcctttcacacactggaaaccatcaccttcttctgcctgggagggggttgtgctgtctctgggaatcccaggcatcccccaggcaggagtcaacccagaggccctcggacccgggctgtaccctgtgacagctccgggtggctacgacgctcccgtgctccaggccagccccacagacagcccgggacaggttgcttgcggatggacaagcctgtgcctcgctgccttgtgtaaccagtttatgcaagggccagcggcccgcttacataaggggaggccgggccagcgcccagctggggagggggaggctctttaagggagcggcgtcccccgcggctccctccacggggcctggtgcggaatccataggggagctggggactccaccctcag

SEQ ID NO: 618789 - DNA, 425 bp, Homo sapiens
cccggtgggaaggggagggcgcgtccgccgcccgccgcaccccccaccccccggggccggcacgcccccccccggggggaaaaaagaataacccccggggggggccaggccagccaccaggcaatccccggccgagcggcgggacaggggacgggagacccccccaagccgccccggcaccgcccggcaaggaaccagcccggcgcggggggcggggcaccccggagggggccaggcggggcgagccgcccgggccccgggccgggcccccgcggggggcccgggacccctcccaagccgggggcccggggagccccaccacgggcggcggggccggggcccgcacgtggccggggcacccagcgggcgggccgggggccgcacgcccccggggggcggcccagggccccgccccgcgcccgccg

SEQ ID NO: 618790 - DNA, 410 bp, Homo sapiens
ttatctagaaggatccccagcacatcttagtcagttaagagaaaccaatgcagatgcctgtgatgagtccgggatcccataatgagcacacggatgtgtgaccctgttggtgctgccatcttccagagtcacggtggatagatccaccatggcaagacattggctcagtgaccaaacagattcccttttaacgggtggtccccttcaccatgttgaccagattcgggccaaacacagaacttaaaagaaaaaatccaaggggggctggcagagaggaaccaccaaagggagcaactggaatagatacggtgaactaaccaaaccaaaaccaaccccagagttgcagataaacaatggttgggggttcctctcttccgggtcctggtccctttccttcctcctttcctttt

SEQ ID NO: 618791 - DNA, 112 bp, Homo sapiens
atgcctacaaagctttgaattcagggtcccaagttgctgtcacaaaggaagtgaagtgaaactctccccccctacccccttttttatataataaaagtgccttagcatgtga

SEQ ID NO: 618792 - DNA, 289 bp, Homo sapiens
taaagtcctactacctacctggtatatggcatatctgagtgtctggaaagcctactactgccccataagccaggaaaagtgaacagagaacacagtatccttaaaaaactggcagcaaggctatgaggcctatatgtatgtaagctagattcagcaatggtacctgatgctgtctgctttcacaaggacttttctctcctagctgactgatttccttccttagttgacggcactagcttagactgacctctgctgagtcgctctgagctctgtgtcatggagctctgct

SEQ ID NO: 618793 - DNA, 859 bp, Homo sapiens
cgacgtgacgacaaactgtgctcctccaggccagacacaagagcacctcagggtgtactcaaaatttctgtagagtgcatcacccagtgagaagcaaaccaacttcatgaccaagctgggctccatttcctgtaaatcgctgaaaggggggaacattagctagccagcccagcatcttccccccttcttccaccactgagtcatctgctgtctcttcagtctgctccatccatcacccatttacccatctctcaggacacggaagcagcggatttggactctttattgggtgcagaactcggcaaggggcagcttaccctccccagaacccaggatcatactgtctggttgcaaagagagaccaacccctaacaagggctgggccacagcaaggagtacaaccctaccttcttccgttggcagctggacaaacctggggcccaatataactccttgaaaacttcatcgccccgcgccttataattggaagaagtctgggggcccaagttttccttggaagcatccacgccacacgcccccctacctgggatactggcccctggattacagtcactacacgctgctacacaaccgcgaacctgccggaatctcataaagtacttgcaatcggataccaacagaaccaaaagggactaccccggtggttacggaagctttaccaacagtatggcaacttcagagcttcggaactagggagccacgtccccgcccacacgcctgatcgtacatgacctcagaaccagctaaggctggggcgcgcacctagattggaggaccggctgcagacaatactaaccaccgttgagccacaagtaattcagacgtgtccattgggtgg

SEQ ID NO: 618794 - DNA, 263 bp, Homo sapiens
gtagtgattctggacccagtgcggagcgcttgcgcttgtctgtccctctagagcaataatggtcccatccaggcagtcgggggctggactaggagatatctgagggaggaggccaactctccaagggcttctgcaccctccagcctgtcccccagctctggtgagtcttggcggcagcacgccatcataggaagggaccaaggcaaggcacggtgcctccaggtgtgcacgtggcatgtggactgtggcctgtgtcccataga

SEQ ID NO: 618795 - DNA, 87 bp, Homo sapiens
ttttcccccccccccagctacccataggggggggagagttataagcccccaacggggcttggtccaataaaaatgtttttcccccca

SEQ ID NO: 618796 - DNA, 1416 bp, Homo sapiens
  misc_feature (241)..(241): n is a, c, g, or t
  misc_feature (819)..(819): n is a, c, g, or t
  misc_feature (1066)..(1066): n is a, c, g, or t
  misc_feature (1161)..(1161): n is a, c, g, or t
  misc_feature (1358)..(1358): n is a, c, g, or t
  misc_feature (1360)..(1360): n is a, c, g, or t
aattcttgcacgaggtgggcgagtacgagttcctacagaccagtcaacatgagcaccaagcagatcacttgcgaggtatatatagcattggttgtgtgtacgggaaaggaacgtcagatggtctaattgcatccacgatgacttaggcctaagcatgttaatatctgtccaacctatcatgcgtaggttactaccgagtaaagggcttccttgatgtccctattggcaactactggtggcntccattagtgactcacgacgtatggtaccctcttgactgtcaatcctgggagggtagtcttgatagggccacacgatgtgaccgaacagaagctagcctcttccaccctaaacattatcctacatacgtccctcgactgctatccatatactaggagtggtcagcttgcgaatccacattggtgacaacatcgtagacatcatcacatgaagctcctggtagaacagccgctgtactaatgatgatactaatagtggtatctattacgcagcaccggaacattctcttcttgtgtccgtgggcatgtatccatggtaacgtaacctcaaacgcggaagtcactggggtggaggtaaattcccacggtgcaagaccatgctccgcgaactcccaccataacccaatttccacaggatgtacatgaaagtcctgggggtactcgatactccattgttaattgaccacgtgacgggtaggatgcgtccctcgtatcttgactcgtgggcatgaggtctacacgcattcgtcccttaacgcttgcataacagatgacaagcgataaaatgtctgtgccccantaagcgtcgagacgatgccttcgttgtggcaagctggccagggttaatgggcggcgaattgcccggggaggtttctaaccgcgggtagatcgagcggccggtgttgtattgtgtataaccctcagcgcagaggcccgtgacaaggtcccagcgcagtcgctctattccgttaccacaagacccacaatgtgatgtgtgttccagtaccaaacgacatgctggtagattgtgcgggccgcaacccctncgatgaatatgcgctttgcccctgcgaactaacctcaggaccacgcggttgcctatacgccgcgaagagctaccatgcaggagccctttctcgcntacggacagtcgaccacaatctccgcacacctccaaccaatacatatctacgcagcacggatcggcacacctacagcagacagcatcattttgccgcacgacaccaacatcgcatcgtggggtgctacacacccatcaatcgcctgcgcactcagtgttgaactatttttttagtagacgatattagtaattaagtncngcacgactcgaatgacctgcgcctcctgctacctcgagcgatcgagccagcgacgc

SEQ ID NO: 618797 - DNA, 377 bp, Homo sapiens
tgtaaaccgcattatctaccaagagaattctcttcgattataatcacagcggtatataaccccccctcccaagaagacacatcgatgaacgaactttatttgactctttgcaaactggaatccatttattccggaggctgcattcattgaagctggggattttaacaaggctaatctgaaaacaagactccctaaattttatcagcatatcgattgcgcaaccaggggtggaaaaaccttggatcattgttactctaacttccgcgacgcatataaggccctgccccgcccccctttcggaaaagctgaccacgactccattttgttgatccctgcctacagacagaaactaaaacaagaggctcccacgtcgacgc

SEQ ID NO: 618798 - DNA, 154 bp, Homo sapiens
gtcagaggtagtgattctaactcagttctggatgagtatcaaacccatcgtcttcaaccctccagtgtgtagatcagttcctaacttgtctcactcccaggcctccctatatccagtacattctctcatccttccagaatctgcctccatggat

SEQ ID NO: 618799 - DNA, 261 bp, Homo sapiens
cggcatatgtcagcctagtccagagcggatagactaggtagtagattccatggtatgcattacataaatgttgtccaggaaatgagaacgatgccctaaggcttcttcacactgttctagatagagctagacctggtgcttggagaagagacatctttggaagaatcatctggcacaatgttcaacgcactgggttataccttgtgccacctgcttccaaagataccataggccacgattctcggccttgccatatgccat

SEQ ID NO: 618800 - DNA, 822 bp, Homo sapiens
  misc_feature (419)..(419): n is a, c, g, or t
  misc_feature (482)..(482): n is a, c, g, or t
  misc_feature (488)..(489): n is a, c, g, or t
  misc_feature (495)..(495): n is a, c, g, or t
  misc_feature (505)..(505): n is a, c, g, or t
  misc_feature (511)..(511): n is a, c, g, or t
  misc_feature (514)..(514): n is a, c, g, or t
  misc_feature (517)..(517): n is a, c, g, or t
  misc_feature (520)..(520): n is a, c, g, or t
  misc_feature (533)..(534): n is a, c, g, or t
  misc_feature (539)..(539): n is a, c, g, or t
  misc_feature (547)..(547): n is a, c, g, or t
  misc_feature (555)..(555): n is a, c, g, or t
  misc_feature (565)..(565): n is a, c, g, or t
  misc_feature (641)..(642): n is a, c, g, or t
  misc_feature (645)..(645): n is a, c, g, or t
  misc_feature (649)..(650): n is a, c, g, or t
  misc_feature (662)..(662): n is a, c, g, or t
  misc_feature (664)..(664): n is a, c, g, or t
  misc_feature (670)..(670): n is a, c, g, or t
  misc_feature (682)..(682): n is a, c, g, or t
  misc_feature (689)..(689): n is a, c, g, or t
  misc_feature (694)..(694): n is a, c, g, or t
ggggaaacgcgggcgtaggtgaccggcggctttctcagttttggtggagacgggcgcatgtgggcgctttgctcgctgctgcggtccgcggcggacgcaccatgtcgcagggacgcaccatatcgcaggcacccgcccgccgcgagcggccgcgcaaggacccgctgcggcacctgcgcacgcgagagaagcgcggaccgtcggggtgctccggcggccaaacaccgtgtacctgcaggtggtggcagcgggtagccgggactcgggcgccgcgctctacgtcttctccgagttcaaccggtatctcttcaactgtggagaaggcgttcagagactcatgcaggagcacaagttaaaggttgctcgcctggacaacatattcctgacacgaatgcactggtctaatgttgggggcttangtggaatgattcttactttaaggaaaccgggcttccaaagtgtgtactttctggacctccacnactggnnaaatanctcgaagcantcaagnatnttnctnggtccattgacanngaatngaactggntgtgcggncccactctgncccagaatacgaggatgaaaccgtgacagattaccagatccccgtacacagtgaacagaggaggggaaagcaccanncanggcnnagtcagacaggncnctcagnaggctcaggccngagcgancttcngactccgagtcgcatgacacatgagccacacactgcacctggtgtcagccctagacgagggtcagggatcatccctggtcgtgatcccgtctgtcagctcacttacgagaggaaactattggtgtcca

SEQ ID NO: 618801 - DNA, 202 bp, Homo sapiens
  misc_feature (147)..(147): n is a, c, g, or t
tcgtgcatctctcagagtggtatgcagtcttcgtgagacctgactgtagacatcacctcgaagtggagcgagtgacaccattgagaatgtcacggcaaagatccaagacaaggaaggcatccctcctgaccagcagaggttgatctnttgccggagaaacagctggaagatggtcgtacccttgtacgtgacatacaacatc

SEQ ID NO: 618802 - DNA, 180 bp, Homo sapiens
ctgatccgcttagtagagaacttgtttctattgtacagcaacaaaaatgtcccaggtgggctgggcgcggtggctcatgcctgtaatcccagcactttgggaggccgaggtgggcagatcacaaggtgaggagttcgagaccagcctgaccaacatggagaaaccccatctctcttaagc

SEQ ID NO: 618803 - DNA, 129 bp, Homo sapiens
  misc_feature (39)..(39): n is a, c, g, or t
  misc_feature (76)..(76): n is a, c, g, or t
  misc_feature (117)..(117): n is a, c, g, or t
tttgaaatttcaagacaactttatccagacaggcgcctnttaaatagaacacagggaagttaggcagcagttactnaaatacagtctcgccaaatgatttacaacagaacacaaacnggagcagggatc

SEQ ID NO: 618804 - DNA, 277 bp, Homo sapiens
ggactcgactctggtaatgacccctgaagttagtgtggcgctccaagcagagtcgagatcagggaaggaaccagatctggcaggatctgctcgggcaagcgtccccgggaccacacacaccttatggagataaggcctctgcggcgtgaggagacagagaactttaggttggactacagttggtaaaaaaaagctaattttattaagacagaactttttttccttccaaatggtaaatctgtctactaatgtaacgcatgtcgttgttaccccttct

SEQ ID NO: 618805 - DNA, 212 bp, Homo sapiens
tcgataggggccacaaatgccagaggataactggcaggctgaggtgagcagattacttgagcccaagagttcaagaccagcctgggctacatggcaaaaccctgtctataccattaaataaagaacaaaaattagctgggcgtggtggcatacacccacagtcccagctactcggaaggctgatgtgggaggatcgcttggcccttatcgag

SEQ ID NO: 618806 - DNA, 874 bp, Homo sapiens
ggacatagagatgagaatctcactctcgagttttattgtggaaatttcgcaattgtccggagctctatgaatgtcgtgccggtgaaggaggaggatgtccttaaggttccgtgccttccccgaaacgctatcatctaggtgtgtgcgcccgaagtcttgtaagtttccggagacttgtgatcaggttactattcattataactacggtatccacagtgtattggaccaatcgtagtttgtcctatacaaagtcatcaatcgcagttagccctggtcgcataaaagcgttcatgcctgagtatatgcttcctgtttgaccaaagtaagatttgtgcgcacttaggaacacaatctctcctcgccattgggattcgctaccaaaggtgggtttgaaataagttcctcgtacccaaagggcgaaatagttactcttttgtgcgcgcctaggaaaagagagtccttagtttgtcattggtacgaccgaataaaaatgtctttggctttgcaccaatcctttgtgcgagggccgctataattactcaaacaatttttgggcctgtaggttctccgggcggtgtccagacatttctctttggggcagaagtcggccatttttacgaagcgctttaaatgttgccgaggtggaaggttcccccccaacggcggcatatatggttccccctcttcattcactcgtaggtagtgataggtgaccgcccacccccgcggaccaattattccgtttttgggaatgggggatggttgttataccttttgggaaagacggcgcgcgccaatagtagtggagccgttggtcaatctcccacactggctgaagagacaccacgttccgttgccagaatctggtgtgcca

SEQ ID NO: 618807 - DNA, 1134 bp, Homo sapiens
tgcagtggctcacacctgtaatcccagcactttgggaggctgaggcaggtggattgcttgaggccaggagttcgagatcagcctgggcaacatggtgaaatcccatctctactaaaaatacaaaaattagccaggtgtgctggggggtgcctgtcatcccagctacttgagaggctgaggcaggagaactgcttgaacccatgaggtggaggctgcagtaagccaagatcacaccactacactctagcctgggtgacagagagggaccctgtctcaaaaataaaaataaaaatacatttaaaaacaaagaaataaagaaattatacacaaagttaaatggaagtatagaggaagaagcaattaattcttcagttaaagggagtcagggcaaggtttcacattggaactgagccttaaggggatgacaagaagaaggtcattctagaagacaaaaagcaaaaaaaggcacttgtactaagaaagccgatgaagccacgtggtgcatacagcctaggtgcacacaagtgcggcggccgacagcaaaagcacgagtaattaacaacgcacgacgagcccaggcaacgacacacacgcaccagttaagaagtactagacttttcaagtgcgtgagacgcacattgccgtgaccatgccaagcgccgcgcgacatgcgtgcaaggcaaacacggggttggtaaacgtactgagattcttaggcgtaatagtacggtggtccaaggcaaagacgacaggcattgttaccctgaacaaggaaggaaacgcagtctggcgacggatacaacgttaagagacgagttcaagcgcccgctaattagattgccaccacagagttcgtggcgaatccaagatcacactaaggtcaaagggtaccccggggcaacagagtgctaggaggaaaacagaacgtcacagagaaagccgtcaagcaccgcacaaacagctgagcacaaagggacaacacaccgaaccgcccaagggacggacgacgaagggcaaagaacagacgaaagaaccgttaccagaagggactcaggcgaaggaagagccaggaagagggaagaacggacagaaggggggaccaggccgcggaaggacgcagcgacaggaggagga

SEQ ID NO: 618808 - DNA, 540 bp, Homo sapiens
cctactgctccacacgttatgtttacgtttgtttcgagacagtttcactctcgttgcccaggctgcagtgcaatggtgcaatcccagctcacggcaaactctgtctcccaggttcacgcaattctcctgcctcagcctccctgagtagctgggattataggtgcacaccatcgtgcccagctcatttttgtgtttttagcagagacggggtttcactgtgttggccaggctggtctcgaactcctgaccttaggtgattcacctgccttggcctcccaaagtgctagcgttataggcgtgagccaacacggtcagccggacaattttttaaatcaataattcatcctttagcaaatatttattgagcatctgctatctaccaggcactgtctagtcacaaatgattgcagtgaacaaaaaaccaaaaactcctctcatggtgtatatattttagtggggacaaacaataaatcagggaaaggaacgtatattgtatgtgacatgatggtaagcattaaggaggaggttatttgatatata

SEQ ID NO: 618809 - DNA, 410 bp, Homo sapiens
ctgccctagcctcctgagtagctgggaccacaggtgtatagcaaccatgcccggctaatttttaaaatgtatagtagagttggggggggggggtctccctgtttggcctaggcgggtcttaaactcctggcctagaagccaccataccacctacagactcccaaagtgctgggattacaggtataagccactagtgcgcggcctcagatgtaaacttccatctattggtctaaagctactcaagatattcagatgtgttgtcatttggccaatacccattttcctggagtcatctgatctgaacctctctaaggtgctggtctccattacctgcatccacattccctttttggctatacttcatcctgaatggtttctccaagaaatccctttagagagttggaagtaac

SEQ ID NO: 618810 - DNA, 704 bp, Homo sapiens
  misc_feature (27)..(27): n is a, c, g, or t
ttgaggcttgtaggtacccctgggtantggatatcgtcgaccaggcgtcgtgaaaatatatggactctctgagattggatgtctgctagcgggattaattgataaagtacactacgtgtatgatatgtttaagagactctactactaagtagagcccaccccgcttctctgagacgaaacctgtgtctttggttggtttgttttaagagatggggtcttgtctgtcacctagggtggagtgcatgtggcacaatcacagctcactgcagccctgaactcctgggctcaagtaatcctcccgcctgagcctcttacgtagctgggattacaggcatgagccactgagccctactttctcttctctctaaagcaatgaggtcttgcttgtgttgcccaggctggactcaaattcctgggctcacagtgatcctcccacttcaccttcctgagccgccggaactacagatgttggtccactgcacctggcagaaacacacgttttgataggggcagaaatgaacaaggagaaacaggtgagttcttaaggtgcagtgcactttagggtactgggtacgccctaggtacgctacaaggttgcatgaacggccctgggccgtttgccagatggtgtagaagccagccaaagcctcaactacttgttccgcacagttccttgacagaacaggccttgttcctaccgacaa

SEQ ID NO: 618811 - DNA, 302 bp, Homo sapiens
ttttttaaaaacccaggttttcccccgggatggggggaacccctgatcaggttttttgggccggtccccgggtttcccaagggccttcatccggggcggggttcaaatgggtttagggggcccctattttcagggaggtggggggacccccccggtggggaaatttaaaaatggtcgggcctatcggtttcccaaaatccccccttcccctttgattttccctttagggggggggccccttggttggcccttttgttgaaatgaaaaaaaaaaaattttggccttgttttaaacccccccca

SEQ ID NO: 618812 - DNA, 598 bp, Homo sapiens
gagcggctggcggtgctttctagacgattcacaattgtgtcattaggtcccccactgggagtgcagagtaaccaagatgacctggtcgtgcgaggtgtggtggccggcaaccgaggttccagtccgtcccaacccagcggttactcatgcatgcatgaggactgactatgagggatgacgagtgtagagatagtagctttgctggcataccatcccaataactcttgtgccattatgatatttgaggaggagatacgggaatcgatgggaataggtcgacaggggcgcatgagagctgagtctgcgtgtctagaatgagcgcgaagttgtttccgggtgcgtaagtcggaggcagccgagtaactgcctaatgcaaagcggtcgtctgaggggtgtaatcacacgtcgtgctaatagggacgatctcccattcgcacaagggagccgtcatcgaagttcccttgcatggttccaacgtcggatgactagtaaggctagtggggacggacactggcgtacgctcacgggactgctgtgcaagatgtctccgaagcatggacgtcgggtccagggcccccttccaactcgcatggcacac

SEQ ID NO: 618813 - DNA, 185 bp, Homo sapiens
  misc_feature (111)..(112): n is a, c, g, or t
ctctagaggatccgactgcatctgtgctcatggctaaaacaaatttttaaagaagaaaaaaattgcaaaaatatattacaaatgttcaccatccattattattcagagaannttacaattaaacataaggagctgggcatagtggttcatgctggtaatcccagcactttcagaaaccaaggtgg

SEQ ID NO: 618814 - DNA, 566 bp, Homo sapiens
agacccgatgagtctgcagagatgcacccatgctatctattgatggcggtatcttcatgtgagtgcttctacagctctaaccgacgaactttatcagcgtaatagtcctccccttaaaatgtcgtatctgtattgaccttagaaaagtacattcttccaatctggcatatgcacaaagcaatgtccatatcagtacatacgttaaatggtcgagattatgttagcagataaggctgtaagattgtgagtcctaaccactcgaatgaaagacctgcttacatttaattatcagtggagctgccggtcagcatgtcaggctgtttgtgtgtatggctaacgtctaactacatatatgggctgcagggaaaagacaattctagccacttggccctctcatgtaaaaagacaactgatcaggcatatggatagctttctggcataggattatcaaactttcatctgtaaatgacgaactatcaaaacgagtagcaataccaacaccaacaaccccaggatgggataccttctctaggtctacaagtacctgtagagatcaaatgcaaacc

SEQ ID NO: 618815 - DNA, 456 bp, Homo sapiens
cagtggttgatcctgttgtacaggaggcccatggggatgttccagccagccgttctgtccaccgctgtgtggcaggacttcttgccttccaggttgttccagtttatgtcaggatttgacttcttcaccactgccacagaaagatacccttcctccggtgctttcttgcaatcagtgctttcatagttctctgccaggacaggcaccagaccacactggcccgctatgtagacatatcctccgtccaagctcatggcgtcagcttctccattcatgatcttggcaatgcagtcttctggggtctctgccgattcacactctattaaccctccactggtaacgctccactcatcacacttgagcctctcgtggtggctcagagcgcaccacttcaccgccttgcactcatcctgtaaggggtctgggcatatgccttcccgtaggttacgaacggcg

SEQ ID NO: 618816 - DNA, 256 bp, Homo sapiens
  misc_feature (103)..(103): n is a, c, g, or t
  misc_feature (105)..(107): n is a, c, g, or t
ggtgaatgactgagaatgtactgaacgttatggtagggaggtgtggatatcctgcatcctgctagtacaggacaggaccacatcagaaagaattagcctgccngnnngggtgcagtgactcacgcctgtaatcccagcactctaggaggccgaggcgggcggattgttcgaggccaggagttcaagaccagcctggtcaccacagtgagaactcatcctttatatatatatatatacagtgcaccacgacacagtg

SEQ ID NO: 618817 - DNA, 438 bp, Homo sapiens
gcggaggtttcaacaagaggaaaacagatataagttctggataggggagaaacccctagtgcgctgttttcccagcaacaaaagatgccacggcggcttgaggcaaggagtacacgaccagcctagccaaagtggtgatacgccatctctcctaaaactacaacagatgagccaagtgtggtgaaacacacctgtaatacccagatacctggaaatctgaggcacaagaatagcttgaaccgagagagcggaggttgcagtgagccgagatcataccactgcactccagcctgggtgacagagtaagactattttcaaaaaagaggccaggcacagtggctcatatctagtaatcccagtactttgagaggacaagatgggcagatcacttgaggtcaggagtttgagaccagcctgagcaacatgatgaaaccctgt

SEQ ID NO: 618818 - DNA, 239 bp, Homo sapiens
  misc_feature (66)..(66): n is a, c, g, or t
  misc_feature (71)..(71): n is a, c, g, or t
  misc_feature (105)..(105): n is a, c, g, or t
  misc_feature (216)..(216): n is a, c, g, or t
  misc_feature (239)..(239): n is a, c, g, or t
ccgccgcatcgctatttatttgcacataagaagggaacattttaaagaacgcaaaaagtcatatanttttncttagcatcggtgttcattttaaagaaaaacatntgtccactgggttgacaacaaggtaaaagcccatggtaattgcattttaaaacaaagaggggaaccttggagtaaatttaacttggctcctttaaactgataacgtcatantgtagagaggggggtgctaaatn

SEQ ID NO: 618819 - DNA, 224 bp, Homo sapiens
ctcatgacacctgtcaacatctcatcgctccttccaacatctcatacccccttccaacatctcatcactccttccaacaacacatcactccttccaacatctcattgccttccaacatctcatagccccttccaacatctcatcgcgccatcattggtatatggttagtgtgtaggttactcgggggtatgagatgttggaaggggctatgagatgttggaagg

SEQ ID NO: 618820 - DNA, 379 bp, Homo sapiens
tccagttgtcggtgggtggaggaagacgaccacccacttcctagctagctcgtcgaacgtactaactacgtccctgctggttgctggctggtaactcgtctacctctgctcgaccccctcgctgctgcagcagcagccgcagtagagtagtagtagtagtcctcgtactgtcgtctcgactcccctgctctctcacgcgctactcgtctagtagtagagagagagagaatactactctctctgtatagtatagtgtcgacgcccactgactcgtgagagagctagagacctctctttatcataaataatatatctcatcagatctggcgcgcagacaagaccgcacatacaaatagaacagcagagaaaatacacacag

SEQ ID NO: 618821 - DNA, 859 bp, Homo sapiens
  misc_feature (18)..(18): n is a, c, g, or t
  misc_feature (69)..(69): n is a, c, g, or t
  misc_feature (82)..(82): n is a, c, g, or t
  misc_feature (128)..(128): n is a, c, g, or t
  misc_feature (279)..(279): n is a, c, g, or t
  misc_feature (300)..(300): n is a, c, g, or t
  misc_feature (361)..(361): n is a, c, g, or t
  misc_feature (506)..(506): n is a, c, g, or t
  misc_feature (541)..(541): n is a, c, g, or t
  misc_feature (727)..(727): n is a, c, g, or t
  misc_feature (841)..(841): n is a, c, g, or t
ccggccggagcggaggcncgcgagcgcgagcagcaggagcagcccgcaccggacaacgggcgagcacanggggcgggcggangcggcggggggagggcagcgcacaggcccgggggccccgcgcgagncacgcgcgggagcaggcaggcgccgcgggcgacgccgcgcgggagcaggcagagcgccgcgggcgacgccgcgggggaccgcggcggaggaggcggcaggcggcggccccgcggcagcaaggggggggggcgggagccggcgcgaccccangcccgggggcggggcggaaanccgcgggggggacgcccgagggccagcccgggccacagggaggcagcggcgggcggaggancccggccaggagaggggccggcgggggggcggggggcacgggaggcccgggcagcggcccggggacgagcggcgggcagcggaggcccgaggccacccagcgccacggagcccggagggagcgcgccgagccgggcgggccccangggccggccgacagggaggggccaagagagacaangcgccgcccgccaaacgcggggcccaagggggcgggggagggagcccgggaagaagaccggagggacgcacggaggaaaggagagggggcgcgacgagcgccgggagagagcgggcccaagaggcgcggaggagcggccgggcacccacgccacacgccgccaacaggacagccaggggagaggcncggcccagaccgagggacacacaggcacggcgggcggcaacacaagcaagggaccggcggaggcgagacgaccacagggaacggccgcggcggaaccaggagcagggggaggancgggggcgcgggggcgca

SEQ ID NO: 618822 - DNA, 405 bp, Homo sapiens
cagacaactcagggcggaagtgccatgagctatagacactgcctgttctcacataccgttccgagagctggacccagcaggctgcccacatgtgaatgccttcaacaggtaacgtgagctaaggatctacagatgtggtcatctccagatacttgcatcgagatggtgaaggtaaagcggtacatatagcactgaggatcccatggaagcattagaccctggttgataccatcgtcctccacatgacctgcacacagtggaaacctagggaatgtagccaacagatgagtgtgagcaattggcacaggacctggacaggctgtgcatggcacctacagtatcagaatggcactgacactcatagggactgacagcgcagagtgattaccgtgaccgagcctgagg

SEQ ID NO: 618823 - DNA, 123 bp, Homo sapiens
agcagacgaaaggaaaagtgaaactggcagctgtggatgctacagtcaatcagggttcttgcctcccgatacgggtttagaggttttcctacaatcaagatatttcagaaaggcgagtttcct

SEQ ID NO: 618824 - DNA, 272 bp, Homo sapiens
agctgatgtgctagttctgaacacatagacatgtgtccccgactcccgcgtgtaccgatcgccccaggcttcacactgtgtgtctctacgtcaggtccaatctgcacttacagagctctacggtacaggaacgagactctccggggctcgccaggacctaaccgtgctggcacatcggctgcatatgggatgctctctacttcctgtgcacgattctcactggtacaggctggcatagtccgtatctcggccctctatagcatggcgatgct

SEQ ID NO: 618825 - DNA, 392 bp, Homo sapiens
tgtccagtaagcaccaagtgctagtctttaccgggaacattcaaacaccaactggtgctcagcaaacacgaagccccacactaaggcctgggaatacagagatcgtattactgcctcaggcctgaaaagggttctaagattttagaattccaaaggtatcctcacattcacaagctgtgcaatttggggatgggggactgggacggacattcagtgccacctgtgtctcctggcacctctacaactctagattgggcatctctaatgtctttagactttcctccaatggaaaaaaaatggagacaatacaccttaattccacaagttctttggaatgagtatggcatacaagacacatttgagaaagcgtctaggacagactcaccccaaca

SEQ ID NO: 618826 - DNA, 467 bp, Homo sapiens
  misc_feature (132)..(132): n is a, c, g, or t
tacctaaatggctgtgctgtcatcaaggaatattgtcgaacacaagctgtattgttgactgaaacgcacagcagatacctgaaggggaagggaactgtaagtcaaacttatcaaagtgtattattttctcanttaaaatgtcaaatgacaaagcactaagatatgtcttacactccatgaactgcctgagtgtggtatcatgtgcactctatagaaaacccattggaggctctcaacttccagagatgatgtttaagatatgggttataaaatgctgcccttaatatggtacctgtcatcaaacctaacaaggattttatgaattaccgttcaaaataatgggaaaagtcgttcccgggcgcggtggctcacacctgtaatcctagcactttgggaggtggaggcgggcagatcacgaggtcaagagatcgagaccatcctggctaacatggtgaaaccccgtctct

SEQ ID NO: 618827 - DNA, 244 bp, Homo sapiens
cacgaggatgtcgctcccctcacggcgtagccggcgcgttctcgtgcccggttggctcgccgcggccggtatagcactgtcccggtcggccgttcgacgacgacaggagggagaaatgccgctggttcgcttcgagacacgcgaaagcgtcgcgatcgtcaccatcgaccgcccggacgtgcgcaacgccgtcgacggtccgaccgccgccgagctcgccgccgcgtttcgccgcttcgaggac

SEQ ID NO: 618828 - DNA, 966 bp, Homo sapiens
cgctgctcaagttaattttcgcccatgctcagtacgtgctgttttgtctgccgcattatctgttttgtggttccgctgtgccgtgctgcgttgtttggccgcgggaccatttgtggcccccccgcgtgcggttgtgccccgcctgtcggaggggggcttgaccgttttgttgccctccgcgaccgggttgtcttttgctcacaaccgccctttcgtggcctgttggccgcaaccgtagaccatgtacgcattgggctgcgtgttcaccgctgaacgttctatgcataggcgccacaaccctacgccgtcttgcttaggccccttcgacggggggattttctcattgatgtgcccgtccgaatcttcttgtttcgcccgggagttttagaccgttctaccaaggcgcggtgttcgccttcctcgccctgtgtgtgggccgctatggcccgccacaatgggtcgctccgctcggtatcccccgtcagtgctccctcatccggcggacccacccgctttgacctccctccggcatggggatctcaagaccccgccgcgccccccaaggattgtcagtagcaccctctccgcggtcccgcccatgatgtatcagcccccgtgggaacgccctaattgcctcggtggtttgctatgtgcggcgccgtcctaacctgccgcatgattaggttgtccccgctcctccatattttcggggcagtacttacggcctcagagacttattgggtgagcacggagtagtcctccactggcttttcacatccattatttggtgccccaccattctactccatttatggttgtctcctccccgcccaagtagtgttcctcatgtcacactccccaagtcactacgcagcgggtgcggtaacacgcccctgcgacacgttggctttttaaaggggtaattttggtaaatgccccatttaagtaggggtcccaacaaaacaa

SEQ ID NO: 618829 - DNA, 934 bp, Homo sapiens
atggcggacagcaggaaaggcctcgctctgggaccaaagtttgggacgcggacgggggggcttgatctcggcgtcgatatgggcctctgtgccctcccgggctcaaaggcacgttgtctcttttgccatcgatgctttagcgtccagcatggctggagaacttggggggtgcctctgcctccaatatatctctgggctttaagttttggagagtttgacatccagaagagagtgggtgatgaacccgcctgttttgctgggcagacgcggggcgtcatgctcaagtgtcactggaccatcaattggagtcgtggccttgactggggcgctacgcaaaatagggcgtaggatacctaggcgaagggtctcaagaagatgttccagggaatcactcaaggtcctgacaaaatcgagtcttcacattggtccagagagatatcgagtattcgggactatcttggtaaaggatttagaccagcggagctagttcaggggattgagcgcaggagggatagcccgaagaggttaaatcctaaatttacggcatggagggacaagcccttatatcaaggaggcagttgcacgattgaggggctcctgtttcttcacagggaaaggccaggcatgattggcgggggggaggcgtgcccacagtataccttagcatattacacgtgcttactaaccatcctgtgaatttgttccccgacgcgccgaaaagaagatgaggatggtgagggggtttggtgacactaaggtgcggaaatgaatttgccccatcgtcggaataaccattttttctacgcatgacatgggtccccggagacgtcctgtcaccttcattaattgaacccctgaaaaattacatgcctaggggtggacgggacaaacacgccctgagaggtttaaacaaggaaaggaggcctgctgcaac

SEQ ID NO: 618830 - DNA, 681 bp, Homo sapiens
gtagcggcctatgtcgaccaggcgtcgggtccgcatgggcccgaaccgactttctgctactctcgggggccctggccctgatccagacctgggacgggctcccactccatgaggtatttctacacctccatgtgccggcccggccgcggggagccccgtcttcatcgccgtgggctacgtggacgacatcgcagttcgtgcggttcgacagcgtacgcctgcgatgccagaggatggatgcctgcgggacgccgctggctagagcaggaggggccggacgtattgggaccggaacacacggaatgtgaaggcccagtcacagactgaccgagtggacctggggaccctgcgcggctacatacaaccagagcgaggccggttctcacaccatccagaggatgtatggctgcgacgtggggccggacgggcgcttctccgcgggtaccaccagtacgcctacgacggcaaggattacatcgccctgaaacgaggacctgcgctcttggaccgcggcggacatggcaagctcagaccaccaatgcaccaagtgggaggcggcccatgtggcggacgcagtggagagccctaactggagggcacgtgcgtggagtggctccgaggatacctggagaacgggaaggagacgctgcagggcacggacgcccccaaacgcactatgac

SEQ ID NO: 618831 - DNA, 1119 bp, Homo sapiens
ggcctgagtcacgtgtcagggggaagctggaaggcgtcgttctcctttcccagctctcctgcctgtcctgtcatgttttcaggccgggtctggcttgtgtcttcccccgtcaaggaaatggcctggtggagctccagtgggacccagtgcgcctgtcgcttctgtgcggagcctgggctgaccagcacaggacagcggtggtcaaaccctgaacaattctgcgctgaggtcagggaggcccatggcagtccggcagtcaactgtgctctccgtgggtgaatgtcgtgctggtgatggcctacgggagcctggtgttttgtactgctatttatttttgtgaagaggcaaatcatgcgcttgtgcaatgaaatctcgaaggggacctcatgtccctgtgggacacaatgcccccaaggacttgaacagaggcagatcgatattcgactctccagaggtttaggatatcaagtatgagccccagttccttgcagatgattgatgctagaactactacaactggaaacccagggaaatcaaaagttgctacaactatctcgtataggatcgacaagctcttggatgccattcgtacctctgagatcccatttcacttcttgcagggctggattcccggttcttctaatgggcacagaatttgcggtactacctgctggatctgagaaacaactagtacgccctttcacggggtgtacgcaaagcactcattgattacccgttttggatggcttctgaacgcgagccgtactgggaccaggggcctttgggcaccactgagtacctaccgtatcacgaggcctcgagtgattgtccatctggtagttgacgcggaccaccgcaccagggaccgcccacgaaggctcggcacgctcaccagggagcaggagcttcatacggcttaaccaagccagaacccccaacgagtcgggctctgcaatatgacgaactacaatagcagcggggcgcagcggggggccaccacaccaggcgagcggcagcacaacaggcgacaacgccaacgtaaacagacgaaatagggggtgcatgaggggaacatggtcgcgagccctcgagcagaaatgacaggcgcaggaacacgga

SEQ ID NO: 618832 - DNA, 299 bp, Homo sapiens
gggtctctctgctggttactctagcggctcccctccagttccggttgggatgttgggacgacgcggacggtccctggtgctggctgcagacgcgggcttaggctgcgcagagcggcgttcagggctgtggtgtggccagggtgggcggacaaagacctacaagttggggtggggcgcaggtggcaagctctgctggtcgcatcgtgggccgcagtggcctcaattccaaggactgtgacaagacccggtggggatcctcgcctgctcaggaggggttgagacaggcggctggtgttctc

SEQ ID NO: 618833 - DNA, 102 bp, Homo sapiens
ctgagcgaaaccaacactcacacagagggaggatcaagctctgctaatggtagaaaatatttgcgaaccatacatctgacaatggtttaatatccaaaatat

SEQ ID NO: 618834 - DNA, 123 bp, Homo sapiens
gcggccgcctactactactactactgctcgaattcaagcttctaacgatgtacggggacatgcagctatttcaaagtgtgttggattaattaggatcatccctttggttaataaataaatgtg

SEQ ID NO: 618835 - DNA, 461 bp, Homo sapiens
cacgagtgagtatagtagtagtagagagtagagagagagagagagagagagagtagtgcgagatagtgagtgcccatagccatgtgcagcctctgttccctgctcttgctgctgaccccctgccttcctttcagcccttgccctgtgccaacgctgcccgccctcatccttctgcacttccgccttccatctcctctccgttctttgctatgtctcttctccctgtccatcgctttcccctctgttcctgtctctcccctttctatcacttgtcttaccgcttctcttctcctcttcctgttacgcctccgcttctcgcgcctctgtatcattttctccctctcctcccttcccctcccgttctcttttcccatcctctcttcttctcttccctttcctccactctccgtctcactctcttcctccctcttcctctcgccccttctctctgctttccctcc

SEQ ID NO: 618836 - DNA, 340 bp, Homo sapiens
agttgaggtgtaaaactaggcttcgaggaggttagttagtggcaataaacatattgaggattttaatataagagatcaggcttcgtcctttaatgtcgtgtcttgttatcatctgtcttgaggttagtttgattagtcattgttgggtggtgacttagtcggttgttgatgagatatttggaggtggggatcaatagagggggaaatagaatgatcagtactgcggcgggtaggcatagtattgtggtgtgacggtgcgttggcccaacacggtgcgttggcccaacacggtgcgttggcccagcacggtgcgttggcccaacacggtgcgttggcccaa

SEQ ID NO: 618837 - DNA, 728 bp, Homo sapiens
ttcttgtgagttaacctctggtgacatttggctgagtgttcgagtttcggcaacgcctgtcttgggaaatgtgatagggggcttattgagcagactgcaactggaaatgaggaatgttgacttgaagtctgtaattcactctataccctttctctccaatcctagactgagtcactcaatgtgagataagtactgcacagtgcatatgcaatggatttcacgttagtacagtggagctgggtaagagcagagacatttagaggcaatggcaggaaatccaggtgcaaatcccaccctataagtctttagttttcccactttgtaaagctgaagatccagacacttttgtgcattaggttgcggttggagaattgaattagctaaatgcttagtactaatcccaaggcactggaacatacttatgtgctcaataagtgacacatatgattcactatatatgtaacagtatctaatgttaaaaacataataggccgggcgtggtggcttacgcactgtaatcccagcactttgggagaccgaggcgggtggatcacaaaatcatggagcttgtagaccaacggtggccaacatgtatgaaaccccgtctctactaaacatacaataattagctggacatggtggcgggtgcctgtaatcccagctgtctcgggagtctgcggcaggagaatcgctgggcccgggattaaatcgtgggtgaccgagagttt

SEQ ID NO: 618838 - DNA, 298 bp, Homo sapiens
acgctattgtgtacatcatctggctcccagtgttaccaattctgatgacctttattcatccttactccatgctctcccctaccaccggatgtactgagcagcagagaatgggacctgggaggggtcctattccaggtcaaaggttagagattactcctgttcaacggggaactactctgggtctattgagagggctagtttcggtagatgaggtactactccaggtcaatggggaaccactctggatcaagggaagactattccaggtcgtgcaaggggagctattccaggtgaagaa

SEQ ID NO: 618839 - DNA, 205 bp, Homo sapiens
atctagaggatcctagatgattgtccaccggtccataaagatattttaaaaaattagccaggtgtagtccgggcacggtggctcacgcgtgtaatcccagcacttgggaggctgaggtgggcggatcacctgaggtcaggagttcaagaccagcctggccttcatggcgaaacgctgtctctactaaaaatacaaaaattagcca

SEQ ID NO: 618840 - DNA, 145 bp, Homo sapiens
accagaggatccccagtctccactccaccttcccattccttcactggagctcccagaccttcccactcatctttgaatgtgtatctgctgactggcaatgcatcaaaatcttttttttttttttttttttttttttttttttttt

SEQ ID NO: 618841 - DNA, 146 bp, Homo sapiens
agtagagacagtcttgttgtgttgcccaggctggtcttgaactactggcctcaagtgatcctcccactttgtttttccaaagtgctgggcttacaggcatgagccatcttgccttggtttagtatatttataaacttgtgcagcca

SEQ ID NO: 618842 - DNA, 148 bp, Homo sapiens
gtatacgaagggggctagcgttgctcgtgattactgagcgtaagggcgcgtaggcagacagttaagttgggggtgaaagcccgggctcaagctcggaaatgccttcaatactggctgtcttgagtacgggaggggtgttaacggaggc

SEQ ID NO: 618843 - DNA, 125 bp, Homo sapiens
gtgaacctgggtgcgttatacctctctccaagctgagagcagcacacagagcggactggaggactgcagcttcggtgttgggggacgtccctccggagagttagtttcatgtaccagccgcgggg

SEQ ID NO: 618844 - DNA, 336 bp, Homo sapiens
attcggcaccaagaagaagttgaaagcatcttgaagaaaaactcagattggatatgggattggtcaagtcggccggaaaatattccccccaaggagttcctctttaaacacccgaagcgcacggccaccctcagcatgaggaacacgagcgtcatgaagaaagggggcatattctctgcagaatttctgaaagttttccttccatctctgctgctctctcatttgctggccatcggattggggatctatattggaaggcgtctgacaacctccaccagcaccttttgatgaagaactggagtctgacttggttcgttagtggattacttctgagct

SEQ ID NO: 618845 - DNA, 330 bp, Homo sapiens
tctggttgggagaatagagaagagtgatcaagggctaggaatgacgctattactagtgaagaaaacaggcagctgtcaggatgggcgccatggctcatgtctgtaatcccagcagtttgggaggccaaggagggtgatcacttgaggccaggaattcacgaccagcctggccaacatggcgaaaccccatctccactaaaaatacaataaaattagctgggcatggtggcacatacctgcaatcccagctatttgggaggctgaggcctgagaatcgtctgaacctaggaggtggggattgcagtgagcagagatcacgccactgcactc

SEQ ID NO: 618846 - DNA, 377 bp, Homo sapiens
aatatatagcatacttacctgaatgagccactagaagcagtagtcagcagtacatgcagaatctgaactgcaagttcagaaaaaggtgtttcgcaaggtagcaattctagttaagatctcaacagtgctgttgggaggcggatttatcaagcacatcatgtgagcagtctgaccctggactgttcccaaaggtcagagccataaaacgcagccagaatttcattcaatttcacaaatgcagcaactgggcatgtctgctttccttgtaacaggggcaactgcaaagtcttcttcaagaagattaataatcaaagtcaaaaattcagaggtcatcatgtaaaccactttctcctttttaaaagctaagcttttccaat

SEQ ID NO: 618847 - DNA, 367 bp, Homo sapiens
ggatggtgacttattataacattccattgcattaatatatcccatttgtctgttgatgaacgttggtagctttcactcttgggttattatgaatagggcacattttgtgtcttgctggctgtatgcctttatttctgtttggtatattaccaaggtatggagttgctgggacttagggtagccagctttagcagagactgccaagtagttttccagagattgttccactgtacattctgagtagtgtatgatttccagttactctgcttcctggtcggcacttggtattttctgtttaaccattctggtgggcatatagtatctagttgtggttttaatttatatttcccttataactgataatgca

SEQ ID NO: 618848 - DNA, 154 bp, Homo sapiens
  misc_feature (6)..(6): n is a, c, g, or t
  misc_feature (42)..(42): n is a, c, g, or t
  misc_feature (57)..(57): n is a, c, g, or t
  misc_feature (119)..(119): n is a, c, g, or t
  misc_feature (140)..(140): n is a, c, g, or t
tccttnccatcctaaaaagcagctgggacaacattcagggcnttcatcgaagaagtnccttcaaaactttcagctccttgctgcaaggaaaaaaaggttcctccgggacttataatgcnctctttccccgggggccgaanaacattaaactttg

SEQ ID NO: 618849 - DNA, 929 bp, Homo sapiens
ggcagggtcttctccatatccccagtccaaagacagaccttagattttcgaggacttcctggtatctcctcagtgtgttcagtagacaacacgcctacgccatgcactatcgaagtcccattcatgccgttccgcatctttgactgtgatgatgacggaaccttgaacagagaatatctgagccggctggtgaatctgcctcacgggagtagggcgaggacactcggcttattgcgtctgagatgaagcagctcatcgacgaactctcctggagagtagttctgacgattgacagggtatggaaccatcgaatctcatctgagttccagcgacgtcgatcgtcccgttctccagactttgccatctcctttaatattgtcctgtgacagcagccccagcgtgtgtcctggcaccctgtccaaagaacctttctactgctgagtctgtggcgcaaggtcacagcctgtgttgccagtgcgggccaagctggcccagcctggagctggcgctgtgcaggctcaccccgggcaggggcggccctcgttgtcagggcctctcctcactgctgttgtcattgctccgtttgtgtttgtactaatcagtaataaaggtttagaagtttgaccctatgtgtgacatgagatacactggtatgacgaaggactggacttctcttctaagagccttcaatcatcctgagaataagcagcatatcgagcagatgcagcgggaccgtcaaagcgcaccacgcctggtgtcccgtggaggtggaggttagggccgccgcggttggcccgcccgatccgaaagggggggtataatctgctggtcaccattctaacccactgcagcttccgctgcacacaaaaaaaaaccgctttcggcgcaaaaaaggccctgtccccttaagacgccatatagctccaaag

SEQ ID NO: 618850 - DNA, 258 bp, Homo sapiens
gctaaatcatgttagacacaactgtgcataaggttcaaaacactctagagcagtttttttaaggatatggttttatactgattgcttttcattgctaagaaaggtggttattaatagacgatataccctctttactgcctgctgctatgttcacatgctatagctggataataaaacctacaaagcaggctcgtaactaaaacttaacagtaagccttactagctaaacagtgtgaaggtcaaattagatcactcact

SEQ ID NO: 618851 - DNA, 203 bp, Homo sapiens
ttaacgcttagtccgcgccttctaccgcatgcgcacagcaggccatcagcactgagccatcaaccaacgctgcacggtttgccagacgggcttgcggatgaaaaaccctgcgatcgagcccgccatgagggcaatcaacgcgttgacgctcacactgatcatgatctgcgtaaagccgagcaccaaggactgcgacagcccac

SEQ ID NO: 618852 - DNA, 392 bp, Homo sapiens
  misc_feature (16)..(16): n is a, c, g, or t
  misc_feature (20)..(20): n is a, c, g, or t
  misc_feature (55)..(55): n is a, c, g, or t
  misc_feature (59)..(59): n is a, c, g, or t
  misc_feature (177)..(177): n is a, c, g, or t
  misc_feature (179)..(179): n is a, c, g, or t
  misc_feature (188)..(188): n is a, c, g, or t
  misc_feature (216)..(216): n is a, c, g, or t
  misc_feature (244)..(244): n is a, c, g, or t
  misc_feature (254)..(254): n is a, c, g, or t
agacaggttgtctccnaacnactgccctgagaaatgtccttcagattggcctccnactnctggaacaccagaagaggacttctggattcaggatagagagaggagatggagccaataggaggcgatgcacttctatcaggcccatcccagtgctgagagagcactccagttgacagntnccttcaggnctggtgaacccatggcctgaagatatgncagcttctcaagggtcgtcagcaggtgncagcactggnctgcccatagtctgctgctccagggagagaatctgtggcttcgaaatctatggatttgaattgagacaatggtggccctgatttttgaggccatgactcaggaaagggatgggattctgtggcctcggctgctcgtgc

SEQ ID NO: 618853 - DNA, 502 bp, Homo sapiens
agggaaatacaacatatatattagctggataatgatttacatttacatttttgcacctttatgaaatttgataaacttctagaacgcttgtttttaaatgtttaacaatgtaaaagttgttcagcaattttttttaactcctagcattacagaagttaatttctacaaaactggttttctgggctcacaggtaaatgtaaccagaaaaagccctaaacaaattgatggaatatagatggatcaatttcttagtacagtcatgtaccacataatgacattttggtccacaggagattgcatatgtgatagtggtcccataagattataatggagtttaaaagttcctattgcttagtgatgttatagccatcctaacactgtagtacgacacattgctcacgtgtttgtggtgatgctggtgtaaacaaacctactgcactgtcagttgtataatggtatagcacctatattgttattttatagtgtactcctcctatttact

SEQ ID NO: 618854 - DNA, 122 bp, Homo sapiens
  misc_feature (74)..(74): n is a, c, g, or t
gatcttgacctcacggtgtaagaagggagaggatggtttctcttctgccctctcccatggtgcccgtgcctctntgctgtgtatgtgaaccacccacgtgagggaataaacctggcactagg

SEQ ID NO: 618855 - DNA, 349 bp, Homo sapiens
acaggagacaacagctttatacatttctggaggaactatttctttctttgctgtcttaagctctaatgaatatctgtctgagcattctatcgactaaaatattatgaaggatgaaactgaagcatatcatgacccaataataaccgttgcccctactgaagatcttaaactactgcataatcctgaaccatgtgccttcacaactattaaacaagaaataactaatatttattacagtatgagtaggaattacagcttacagcttagattctgatctttgcactgattagctcttgattaattcaaaaaaatagctagcacttattaaacatttactacacgctaggca

SEQ ID NO: 618856 - DNA, 117 bp, Homo sapiens
ttagtgctctctgattgcgagtatacggatgtgtctagcgcagtgggacgttctaggtggatttagcgtgggtgatgcctgttggagtgggcagttggcctcctaattggggggttg

SEQ ID NO: 618857 - DNA, 806 bp, Homo sapiens
  misc_feature (23)..(23): n is a, c, g, or t
  misc_feature (29)..(29): n is a, c, g, or t
  misc_feature (32)..(32): n is a, c, g, or t
  misc_feature (51)..(51): n is a, c, g, or t
  misc_feature (58)..(58): n is a, c, g, or t
  misc_feature (66)..(67): n is a, c, g, or t
  misc_feature (77)..(77): n is a, c, g, or t
  misc_feature (82)..(82): n is a, c, g, or t
  misc_feature (87)..(89): n is a, c, g, or t
  misc_feature (102)..(102): n is a, c, g, or t
  misc_feature (106)..(106): n is a, c, g, or t
  misc_feature (108)..(108): n is a, c, g, or t
  misc_feature (118)..(118): n is a, c, g, or t
  misc_feature (129)..(129): n is a, c, g, or t
  misc_feature (144)..(144): n is a, c, g, or t
  misc_feature (146)..(146): n is a, c, g, or t
  misc_feature (150)..(151): n is a, c, g, or t
  misc_feature (154)..(154): n is a, c, g, or t
  misc_feature (156)..(156): n is a, c, g, or t
  misc_feature (159)..(159): n is a, c, g, or t
  misc_feature (164)..(164): n is a, c, g, or t
  misc_feature (167)..(167): n is a, c, g, or t
  misc_feature (171)..(171): n is a, c, g, or t
  misc_feature (176)..(176): n is a, c, g, or t
  misc_feature (181)..(181): n is a, c, g, or t
  misc_feature (188)..(188): n is a, c, g, or t
  misc_feature (193)..(194): n is a, c, g, or t
  misc_feature (198)..(198): n is a, c, g, or t
  misc_feature (217)..(218): n is a, c, g, or t
  misc_feature (223)..(224): n is a, c, g, or t
  misc_feature (227)..(227): n is a, c, g, or t
  misc_feature (230)..(230): n is a, c, g, or t
  misc_feature (256)..(256): n is a, c, g, or t
  misc_feature (271)..(271): n is a, c, g, or t
  misc_feature (287)..(287): n is a, c, g, or t
  misc_feature (297)..(298): n is a, c, g, or t
  misc_feature (301)..(301): n is a, c, g, or t
  misc_feature (305)..(305): n is a, c, g, or t
  misc_feature (312)..(313): n is a, c, g, or t
  misc_feature (315)..(315): n is a, c, g, or t
  misc_feature (321)..(321): n is a, c, g, or t
  misc_feature (326)..(326): n is a, c, g, or t
  misc_feature (336)..(336): n is a, c, g, or t
  misc_feature (355)..(355): n is a, c, g, or t
  misc_feature (363)..(363): n is a, c, g, or t
  misc_feature (370)..(371): n is a, c, g, or t
  misc_feature (378)..(378): n is a, c, g, or t
  misc_feature (384)..(384): n is a, c, g, or t
  misc_feature (388)..(388): n is a, c, g, or t
  misc_feature (404)..(404): n is a, c, g, or t
  misc_feature (416)..(416): n is a, c, g, or t
  misc_feature (419)..(419): n is a, c, g, or t
  misc_feature (434)..(435): n is a, c, g, or t
  misc_feature (448)..(448): n is a, c, g, or t
  misc_feature (463)..(463): n is a, c, g, or t
  misc_feature (490)..(490): n is a, c, g, or t
  misc_feature (494)..(494): n is a, c, g, or t
  misc_feature (503)..(503): n is a, c, g, or t
  misc_feature (540)..(540): n is a, c, g, or t
  misc_feature (709)..(709): n is a, c, g, or t
  misc_feature (786)..(786): n is a, c, g, or t
gactgggccgccgaatacccctnaggacngcnctagaaacgggcaggaagngggggcncgcagctnnggggcaaccnaagcngggannngggaacagccgcnatcncngccgccgcancactgggaacncgcggggaaggagcngnaagnntancngtngggcnacnaacnccaanaagtncaaaatncaaannaaanaaagaaccccaaagaaccnnaaaannaanaanaataaaaaaaaagaaaaagaaaaaanacaacaaaaaggcantggggaaaaaaaaaanaaaaaaaaannaanaagncataaanncnaaaacnctaantttaaaccanaaaacccaaaatttaaacnccaaaacnccaaaannaaacctnaaaacncggngtttgacatcccgaanccctgggcttanacncccaaacactaaatnnacacccaaaaacnctgaatcaaattctnaaaaccctgagtttgaataccagaacnctangtataaacnccaaaacactgcctataaacctcggagccccgggtangaaccccggagccctggctatgaatctgagagctctagatatgaatcccagaacactgagctcaaaacccaaagcccagaatttgaagctcaaagttccaaattccaggaaggtgcggagatgcttctgaaccccgacgaaaagagtcctttgaatatctccgtaggtntcaccccctggactccttcactcaggggtttggggagcagcccacaggggacctgcccatagggccacctttttganatgcccacaggggccctgct

SEQ ID NO: 618858 - DNA, 869 bp, Homo sapiens
  misc_feature (277)..(277): n is a, c, g, or t
cataatccatcacataaacagaaccaatgacaaaaaccacatgattgattatctcaagagatgcagaaaaggcctttgataaaattcaacaccccttcatgctaaaagctctcaataaactaggtgttgatggaacatatctcaaaataataagggctatttatggcaaacccacagctaatatcatatagaatgggcaaaaactggaagcattctctttgaaaaccggcacaagacaaggatgccctctctcaccactcctattcaacatagtatnggacgttctggccaggcaatcaggcaagagaaagaaagaaagagtattcaaataggaagagaggaagtcaaatggtccctgtttgcagatgacatgatggtatatttagaaaaccccatcgtctcagcccaaaatctccttaagctgataagcaacttcagcaaagtctcaggatacaaaatcaatgtgcaaaaatcacaagcattcctatacaccaagaatagacaagcagagagacaaatcatgagtgaactcccattcacaactgctacaaagataataaaaatacccaggaatacaactcacaagggatgtgaagaactacaaacaactgctcaaggaacataacgagagtacacaaaaacaaaagcaccgaaaccgacgacaacacacctttgggggcgcccagggccccgagaaagagtgtttaaaacaatgaggtgtaggcgcggggccacaaaagataagtgaacagggcagagacagacacaagaaaaacgggaaagaaaaggggcggaatccgcacaaataaaaaagccgggggaaacaaagtcgaacaaccagaggagacggagaccaaagcgaaaaacag

SEQ ID NO: 618859 - DNA, 185 bp, Homo sapiens
gaatgaacattatatataaagaacatatcaagctcaagatttctcagataacttttctttcttcaaaatctagctataatgtgttataccatcatctgtaggtagcacagcatacatctgattatcccaagccagaaaacctcatagttattcctagactccaggccagaaatattcattgagtt

SEQ ID NO: 618860 - DNA, 772 bp, Homo sapiens
  misc_feature (149)..(149): n is a, c, g, or t
  misc_feature (407)..(407): n is a, c, g, or t
ggtgaagtcttgtgaaagtgtgtggggttccggaggcggttgttgcttcgggtttcaaccagttggttatccaggccccttccgatctttaggaaggccctatgaatatttttctacggttcctggggctccgccccatgaatgttttngacgcgctgtgaaatgccccctgtgccccttttaataggcaagttgtcttggcgcgtcgttcgctttcccccggagctagctaatggggttaggaacaaatccctgggtttctttgccctttaatgtgtgaactcctcgccagggttgttggggaaaaacaccactgagtcaaggcaaaactaagtggaaattttctgtttaaaatcccttctttttttttgttttgtttaaatcaaccaagcgcttgttttctattntagaattctttctttgggccagaaaatccatttagattacatattccttgggtacaaaaccagtaccagttttagacaacagacactaaattttccaggtggtatctctaacgtcaccctatttctacaccagattggggaaaaaccaagtgatttagggtgttaaaatatatcattggacgaacccataaagatatgctgagtatcactctggtcagccatactcactgctctttagttaacacttggcactaaaacgaggtcgatgactccattttcccaaaaaccaaacactttttataaacaatcaatcttgagaaaaccagtcaattacgccacattttttaaatactaagaaacaggaa

SEQ ID NO: 618861 - DNA, 1232 bp, Homo sapiens
agcggggcgttgccgggagccgggcgcgggctctgtgtggactcggagcaatacgcggttttgacgaagtatattatgcggcagtacatctctctctttacatgaagacaaagtcttctctctttggatgacgagtgggccgcctatttggcacacatggctgctggccttgtggagagttatttacgaggattcgatggcacacttctcctggtggaacagaatttggagcacgatgaatcgctctcagtcagctcagtcccaaggctaactgctattctggaatcacgttgttaactatttttcaagtcctactattgcgccagtagtatagtcactaccctgaaggttctctcaggcttgccaaaagagcaacgaagccgcacttttttcctccttgatcgccttgcgttagcgtctccctcgcgcttagagcaatcattgaccaaagggggtcacgctgtttagctctccctttaggttgccaatgattggtgtgcctagtgctagatcgatagcgactgggcgataggttggtctcacacccggttacccgtttgtcctcccgctctggcgtcgcgaggttcgtattgggcgaggacttgatgcgccattgttcgcttgggggcctaacccctgggggcttgtggtgcacaggaacccccacggtcacctctttgtggttccctaacacgtggtttccttcggttgattggattcttcccttgggtcccgagcattttcgcgtcctcccggggcccgggcagggccaggttgcggcccggtttgtcgggcctctgggggtgtgccacggtcccacccggggcgtcccgactttcgccggtggtttgaccgtgtttagcccttgtttctctcttatccttgagcgggatttccctagcttttctgctcactctattccgttaagggtttccattcgtcacctggcttgtctgttgcggaggtacacagcccccaaatacgggaacacaccgaaaacaagtttcaacgatgcatttgccctaagggtctgatcgcgcgttattcgccgtagacggcggcgccaatggacacatgtatagaaaaggcggtgtccacgggtgacacccattaagcgaccctcttccgtgtaacttgctatctccgcctatgtcgggtgactcccacgcgtctgtccaccttgtgtgaagcgggattgatgtccccgttaattggcgagcgggatataacac

SEQ ID NO: 618862 - DNA, 982 bp, Homo sapiens
gagcggtggctcgggagagaccttggagcgcgcgggaaagagaccaaatataaactgtggacgggatagtgtttcggggtccttgtcccagttagaaacgaccctcggcacgggaagtcaagttcggttactcgtgcctctacctactcttacttgtgtagaacgatggtgcggacataaagctagacagtggttccgaggcgacttaacaagaagagaggtcggtgtgcttgcatcggatgctcctctcaggagacagggatgcatatggtttcatttgccacctgtctgtcacatcttatatatcgagcactgcacgattatcagtacgcaggaagacgcttgatctagtaggactagtgcatgcgacgggaatcgcccgtattttgcggtgacagctccaaactacaccatagattggcacatagaaggcaacttggagagaacttcgttcagggattgatccaccgtaaaggattctgaagagacacgacgaattcatagattcactgaacgacaggcaggaacgcaagtgagctataggaataaggcaaaggagaataagcatgtacctttagcaagcctggtagtcacacagaactgatgaatagagatatacgaacctttctcatgtacatcttttgaactaagcgttctcctatgttttgaacccgtggttgattcgtaagaattggttagcatgtgtacagttaacatggtgttaggttccaaagtatagggtcttggttgggaacaggcgaatttatgttccaagacaatttgagagtttaaatttgtagcatgttccaaaaggtagttgggaaaatttgagaaatttggtaagactaagttattggtaactatagctttagtattgcagttataattgcataggtaaggttggtttgtagccaaatttaaagtgtctaagtggcttggctgaaaaatcaagtccattaggcattgttgttctgaattaaga

SEQ ID NO: 618863 - DNA, 120 bp, Homo sapiens
  misc_feature (33)..(33): n is a, c, g, or t
  misc_feature (64)..(64): n is a, c, g, or t
gacacagagcaactgagaggtatggaacagctnacaaaaaagtggagagagaacgaagaagacnagaattagcctccagatatgcagaacaaatttcagtgcttaaaacagcgctcttgc

SEQ ID NO: 618864 - DNA, 419 bp, Homo sapiens
acagaaaaaagagtctggccatagcagaccaggccaggaaggtgcactgagagtggttctgccttgctgctggtactgataactatctagcatcagtacatctacaatgatctttccctctaaatcacagatcttgatagcaggggcctgtggcagaacacagacagtagcggttagggctgaagcacagggagatatgatgatgtccccaccatctagcgtgtaaaggtgtaagcctacgttgagatcacataacatggcctggacatcattgcactccagaagcacagagggatccatctggagagacagacacacgtgttcagatagcctgtgtggacaatgtggatggtcttcagcttgcagaaagccaggttccataccttgaccagcttgtcccagacacaggagacgatgat

SEQ ID NO: 618865 - DNA, 1345 bp, Homo sapiens
ctgggtggccacgcatgagcacgaaggcaaaccctactgacaaccacccctgactacgcagaccatgtttgtcggcctaaatggctttgggcggggcggagccgagagccacacatttcaatgtaaaccatggctggtggagaccccatcacttggctgcttgcagtggccacatgtccaggcaaatgccaggccattgtccccagatgcccagggcatcccttgattgcccctaatgctctcagttaaacctgcaacacttggaaccaacaacaaaaaaacacaaaaaaacaacaacacccaggggccttctattgcgcgggcgggcgccacagaaacaagaagcgaacaagagacagcgcgcgccacacccggtgacaaaatacaaagagaatacgcagtgcaccccacaacatatcaccctgtgacacaaacacgcgcgcccacaaaccaaacacacgaggaaacaccgatatattagagagagcgcgacaagcaataacaccttctacgcgactacgcgccccacgcgctctaccccccagcgccactaccccgcgagacaacacgacaaacgccacacaaccaccgacacgacaacgtacaacaaccacaagcaccaccccacgacaaacggtgactatatataacacgaacaacgatcaaagaatacgcatggaaccaacatactcacatatccgaacatatcatatctaattaccagccgaccgacccacacaaccacgcccgcaacgcttaaagctacaagatcaacaaggaaaacaagcaaaaaataatcacacaatggacagagacaagaaggccagcacgacacgagagaccaccaaacaagagacagcaaaaaagataagacagcaatgggaatagctgaccacaagaaagaaatacaccaaacacaaggcatagcagagagtggaaagggagagagcctcgcagcaacaacagggccaacagaggaaggtaaggataagcgacacgcacgattccgtgcaggtctgctagttcttgacgcgcggtcagaccgacggtggcacatacgagtgacgcacctgggtacgagcataagcacgctacctcagactagaagtgacggcatggcgtaatcacacctggacaacaaggcatattagaggagaaactatggaacgcgagtagcgatggcagaagagatacgagacaacggacacgtatagctagaacccaggcgaactgatacgagagaaggttgtcatattgatgcacgcatgtacagcggtcgagccaccagtcagtctaacaccataggacaggctagtcacgtacgtgaggcacgatagacaatggt

SEQ ID NO: 618866 - DNA, 140 bp, Homo sapiens
tcccccatttcacctgccacaaaaaagaaaaactgataaattagataccatcaaaattagaatctctaactgctacaaataataccatcaagaatgggaattgcagctgggcatggtggctcacgcctgtaatcccagca

SEQ ID NO: 618867 - DNA, 794 bp, Homo sapiens
tgggttggcttttctcttttgtgttcacagattctctcccccgtgttggcttcagggttagaggtgcgggggctgctactctgggcctcacgtgtacccctcgtgccctcccaggttcacacttgttcttccgggtctgccctccgtgaggttagctgggattatagtgcttgcgccaccacgccgtggctaatttggggtcttctttaaggggagatgggatttcaccatctaggccaggcgtggccgtgggacctctctgactttctttatgtgactccgccccacctgttggttccccaaggggctgagatttacggggtttgacccttggttgccttggccatgtgggtttagacttcttttgaggctacgggaacccccctttgcttgaatacttgctgtcagaaagtgcctgctatttaaacgcttgcttgtcagattctctgtcgtcccctgaaagaggtttccgaagatattttgagcgatccgtcgggtgtgtccaaatttgtggctccacaaacgctgtaacgcgcttggaacactccgtggctccgggttggtgcttcacgaaccttgtgttgggcgtgtaataaccttttcccccattcctaaaatccgcgggaccatcgtttattgggccctgggaccgacatggtctttttctaacccttgcgacgcctagacaaaccgcgtccttggtttatccctctggttccgagttgtactctcggggtttgccccctgggggtccccccgatggtcgtctgggtaacgcccacatgcgcgtcgac

SEQ ID NO: 618868 - DNA, 241 bp, Homo sapiens
  misc_feature (81)..(81): n is a, c, g, or t
agggagttgagtgactcatagaggatccctttgcggtgcctttccaccattttcagcccctcaggcttggaggaccggggncacactcttggagcctcggtgaagtggctggcatgacgccgtttctctgacgtcccccatagatcttggtcatggagccaaacccagcggcaacccggaaggtacaggtgcccgcgctggttggaagcagctcggggtgtagaaccaggttcttcatcgg

SEQ ID NO: 618869 - DNA, 184 bp, Homo sapiens
ctcaacgtcgcgcatgcttaggtggggcgagacgaggcttgatgactggcaggccctggggcagaggggacaactggccggttcccaggcggtgacctcaagggtggcaagagcaaccgggcacgccgacgtcgccttgcggcgctgcgatcgatgatcgaggcagcggcacagccttggcccg

SEQ ID NO: 618870 - DNA, 212 bp, Homo sapiens
cgtgtcgagcactgctcctgccagctcccgctgccgcgcctcctgtgtagaagtccctgtctacagaataaggctggcaataaggctgggggtacgccttcgtaaggcgtccggtcccccgttgtcatagctctttccctgtggagaggccgcctctaaagagcgtagcggagtttctctggctgctctgaaaaaagcgttggctgccgccg

SEQ ID NO: 618871 - DNA, 294 bp, Homo sapiens
cagagtgcagagaaggattactgagcttttcccgcctgcacagacacttctccttgcttcccaaccttgacctggagaaccaccaagtgctgtgtgcagcctcctgtgcctcacccaggcctgaccccaaaattgtccaacaacccggtctcatgcccactccccatccctacttcccaaaaattgcactgtgtcaagtttgcaacaaagaatcccgctggcatcctgtccttgggaaccctttctcattctccaagcctggtcagctgcctgcacaagcagaggcgccctcat

SEQ ID NO: 618872 - DNA, 431 bp, Homo sapiens
tttcctcacttcttgagctgctttccctcctgtggtgccacagttggacaagtatcaatcaacatctgccacctgaggcgcttccgtctgtgccagaaggctgccagctactgaccccctacaaagggagctgctgtcactgatccagctgcagagggagttcccgcgctggtgccgccaaggtaacaatcacacctgtacatggaaggtctgggaggatacccttgaccaaatactgtgaccgggagtaatgctgtgaagacccagcaagcaattgtgttagcggcaaccctcccagccccaatcgggatgagttgcctttgcccggcggggacctaaccccaattttaccgggacattttgaccattgacatcgggcggagtcacccccaacctcattggcaccttcttgtggacaccaaggagttctc

SEQ ID NO: 618873 - DNA, 929 bp, Homo sapiens
tgctctatcgtgtagtggccgtgcttgtgtccgcctgtgtgttcgtgcgtcgtcttgccctgtggattatgggccgccgttttaaatgggagcgtgcacactgcctgcgcctggggagcactgtgtgcccgcgcaccgggcgccgaggcgttcgcgcccgtgttcctggggccctaacgggttgtgtttcgtcggcttctataaatggccacagtgcggacaggtcggttaagggagatttgctagagcgcctcctgtttgttgacagcactgtgactggccgaggtgttcccgcggtacccgcgcgtggggcgtgatctccctgtttgtgccccacggtgagtcccccagtgaacaaaaaggtatatcaccccacggggtcccaaacaacaccggccgggaacatatttctgcccctttttttatagaggcttacaaaaattcttaaagacccccacgtgttaatagctctccaatactataaccaccctttggtctgtaagaccactttatccatattactatgacctctggatcctgatttataagaatttttgcgacgtaatatacacgcccaaacctatgcgtttattataacaaaaaatatttatacaagattgggctgtagcaaaattgttttcgaaacaccattggcttttcgacgaacccacatcaagagaataattatgcaccgcatatttcacaattatggaaagaaagagtgcgcagtagacgcagaaactctaggtaaagcatgtgtttccccacagatatctccgtcgaacctctcgtgtatcatcgcccaaaagagaacagacaccttggggcaacgccaaaggagggtctgattctccccgagctccaaggagtgctaatctttccctccccacaaggggaacccccttttttaaaaaaaaaacaacaaataa

SEQ ID NO: 618874 - DNA, 418 bp, Homo sapiens
gctttatgtttcaagaagggccgactcgcgaattttttagacatcagtgcttcttaatgctacgctattatgcttattagttatgtgcgagctttgtatattcttatatttatatataaatatcctcatttgttacaggcacgtatagttaagagagttttattttgataaggtcatattgttttgcctatgtttaactcactccacttttcctaggagcacatttatattgaggtcattagtgcgtcattgtgttttttgttgggcccttcagcttggggcagtatagtgtgtaattaaccactggattgttatagtttgtactgcattgcgctttattatatatatcgacagtagttctaggcgccattgtaaatttattgcattttcttttggaataatcacacgcatcaaacac

SEQ ID NO: 618875 - DNA, 667 bp, Homo sapiens
gaaggatggcgcgtcctgcgggggctgcagcgaggggctgcctcctttggctcatccacagcctctgccgccctggaactcagcaacctggttggtacagtgctatccaggccacagctgagacctgtgtatgacatcctgtcccctgtgcagcccccgtctccctgctccctgcaggataagctgctctgcgctggagtgctgcgcagtgggccagcagcctgccgacctgcgggagggtgtggccaaggcctacgacacagtgcgagagggcatcttggatacagctcagaccatctgtgactgtggcatcgctggggccatgagcatgaatggggctgactgggcgccgtggtggggcgtgatccgccagctgcccccgacttgttggtgaagccgctcatccttggccacggatggccacgtccagcctgctcggggtgcatggcgcaaccagatttgtcccctgaagcccacaatggaccactgccctcaaagtgtgcgctctggacatgtgcccaaggactgagcctggggttgccctggcacccagagggtgcatgaccaaccaatgctcctgagcctcccaagagcatgcaagcccacgggcccggacacaggcttggcccttcagggcgattggcacatgtgaattgacgccttccca

SEQ ID NO: 618876 - DNA, 433 bp, Homo sapiens
cattttttactttccctacctttatgttgtgctatcctggtccacttggacactctctgatgcctgaagagattcttgtttgggatttagtttcccagggccgtgtttacagtaaaatagcaggcagtccttttagttcctcctctaagtctctgagattcttcatttcagggttttaaacataagcagtccatcttaaggaaagtgtaactgccgcggccacaagtctgctagttgcacttgaatgttctagcagggttgttgactgccctttctacgttctggactccttgctgagactgtttaacttgaagattaaagaaactattgcaaatgccagtgcatcagaacctaagagtggtcaaatattatgtgcaattttttttgtaaagaaattttaatttataataaagtttaacagtttaaagaacaa

SEQ ID NO: 618877 - DNA, 102 bp, Homo sapiens
gtggaagaatgcttttgcgaatgtctcaagctctgggtcgaatagttttggctgggcgtgaaatgactagattggccggttttactgctcggattacagaat

SEQ ID NO: 618878 - DNA, 625 bp, Homo sapiens
aataataataactattatccaaaaaaaaaaaaaaaaaaaaaaaaaaaaaaaaaaaaaaaaaaaaaaaaaaaaaaaaaaaaaaaaaaaaaaaaaaaaaaaaaaaaaaaaaaaaaaaaaaaaaaaaaaaaaaaaaaaaggggggggccccttttagggtccccctggggggcccccctttcccccggcttgcccccttttttttttttcccttttggggggcgtttttttacccgggccccggccccttttttccccccctgggggggggaaaacctttttttggggtttttttgggggggcccttttttttggggggggcctttttgggccccccccccccccaggttttaagccctttgggggaattttaaatttttaggggtttttggggttaacccccccgcctttccttggcgcttggaggttttccttcccgggtttttttttggaaaattttttcccccgggccctggggttctttttggtggggttttttaaattccacccccccggggtttttttgggccccctgaccctcccagttggttttggtctttatcccccctcccacctttgtgggggtttttctttgtttaaaaaccctccccccctccccttgccctta

SEQ ID NO: 618879 - DNA, 136 bp, Homo sapiens
ctgaaatggctcaagttatgagggcctaatgtggatgggacaggggagccagtgaagaaatgcccagatgaatgctcccacattctatcagtgaaggtatgaagatgcttgcaaagaagctctgtgggacaatgcc

SEQ ID NO: 618880 - DNA, 1017 bp, Homo sapiens
gcgttcgcatgtggtttgtgctgttggcgctgagtggtcggctacgctgtccagccgctaaccggagcttgtcttcggcgctgtataatagctctgcaggtctgcgatagtacttggcctcataccacaaatagcgtacatctgcagtacaattgggacaatctactgaaatgggacgtacggtaacacagacagttcgactgatgcgcatatgcctcgaccgacactcttggtcgtggaaaaaagtaactagattcgacgtgtagtgaactgggaaacgtggaatactttcctgaagtggacagggatttaccagactgctgacaatacttgggaacctgaagacaaactttacgattgtccagaattgattgaagcgtttcttaactctcagacaagctggcaaaacgaaaaccgatggtacaaccacgcacaactctttatcctgacagtgaatctgatgacagcaaatcaaactgaacgaacaagagatggctggtggccaaaccaaagagagagtttgcgcccggggtctctgggacctcgtgaaacaatactctggggtgccagagacaacggaggtggaccaagtttgattgtcttccctcacttgaagagtgcgacatgactcccacgactgacgcgcacgaacttgggtgggatgggagaaagaggaatgtttggaagggtctcataatgtacttgctttatgaagacgagattgagtggatttcatgtacagaagattagtcatgaatggtcgcaatggtgtgatactattattagtattttttatgaaatgggttagattgatgatggtgtgacgaatacaagtgtagaaacaggtgatgtaggtgagaaggtgtaaatgatggagttaagcaagaggggttgagagatataaggtgtgatgatattggaaagttgagagtaatgtcaataagatgtgtgagagattaatgtatagagaactgagagtggtaaaataaacaactatcgtctttgtgtttatctcag

SEQ ID NO: 618881 - DNA, 257 bp, Homo sapiens
actgactcctaccaaagagtacagttccaactgagctgtccagcctttgctaccatacctatgggctgtatacaccatggccttggacaccctgtgaccctatcacttcctcagcctctagtattgtacactttacagagacatggtgctgtatagcctgtatctaggtagcgcatgataagtaaggctgacacgaatgcatgaagaggcgtggtaagcacttgataacctgtaggaccatagcttgattgttctgt

SEQ ID NO: 618882 - DNA, 941 bp, Homo sapiens
ggaaaacactctcatgtcaagatagggcgttaccactcagacactttacaagtagcagctggacttagatctctcacctttggagtacagtgatgaagtgctacccagagatcaaggagaaggaagaaatgaggtaagatcattcgggcagatacggtctcactgggaaacaacaggtgagccctaagtccggaacttgtcagaccgggcagaagtgccgagtgtgtctggcctggctggccatggcagaaccccacacagtgctcttcctggatgaatcccacgcaatcacctggatatcgagaccatcagaggccctggcaggatgccatcaatgaagtttgagggtggtatagactgctggatcagcccatgacttcagactcattcacgcaggttgcacaggaatattggggtctgtgacgaagcagacaattcaccaagtggcctggagacatcctggcttacgaggagcacctcacagtccaagctgcgatgccgacgaggcagagatgagggcctcgcggatctagcatggactggcgtgtcacagctgccatgcagcgcaagaagctaagcagacttcaggacaggacgcctggggctacttctcctgcattgctcgcaatactggctcccccatgctctcccctgcccctcaaccgtgccttagctgggactctcttacctacagctggacagtacctgtctgtttccttgtcctccttccagttgacatctgtcccatagtctcggaactcggctgggccgataccctcacaaggccctttgacttggtaatccttactctggaatggtgaatgcagctcagaacgcaacttggggttagacacaggggccaaagccctgatattggccttgcggacgcagcttaggaatccacgaaactggggtaggacatgttgaagagagtcccccag

SEQ ID NO: 618883 - DNA, 202 bp, Homo sapiens
  misc_feature (78)..(78): n is a, c, g, or t
tacagatcacgtgctaagggatcttgctgtgccatccacgctacactgtctggctttggtgtatgccatccctgggantccagccttctcaagctttcacggtaccttttttatcccattgtctctggctggaattcatcttcattgtcgttgaccttgtcatcttcatcatcttttaggctgtgctttccaaattccaggt

SEQ ID NO: 618884 - DNA, 406 bp, Homo sapiens
  misc_feature (27)..(27): n is a, c, g, or t
cgattctagagaatccccttttgcggngccctttccccattttacagacgagagagttttcatgacattaagaaatataccaaatacggtggagagctaagagttaactccaggcctctcaaaaaattacattatcagtcacaggcagtttgaaaaacaaatcaggagtttacaagacaggacgatgcatgtgaatgtggtgccttgaacacagagaaatgtaagtttcagtcagtttagagcaagggcatttccttgttatatttattccacatatttgtcatgataatatgtggcagttcacctataagagctcctgagttgttcctcctaaactatacgccttacatttggtaaaatagtaaatttagtaaatctgcttgtctatggtaggatacttttactt

SEQ ID NO: 618885 - DNA, 608 bp, Homo sapiens
aattagccttgcgtgttgagcctggtgatcaacatcagtgatccgttgagcacatcataatcgccctctttatcagctgtggtctccatagcaaatgagtcactacgtgctacagcctctgagaggcagaaacctccaacttactctgtagtcagctgagtcatatatgtgacgtactgttagtctgtgccatgatttctaatcagtgtgtcaagtaatgtgttatggatctcacgaatgtcagccgcagatgcatctgcattggctaattcctctatcacgagcgcagtgagatgtgaatgcagctcctgtgcctccatattctgggtcaccttccgaattttcatccatggttgaatccaaaggtgcaagttgttcctgagctcattgtagaactgaacgcagtatcatcatttcatcatctgtgaatgtcagcaaggaagcaaagtgtattccataatgtgttatattcagtacagcttctgactgggaagatttttagacatgaggaggaatcgtacgatgatgcgaacgaggcaggaagtttcttcttagcagcatgcttccgtgcaacaatcgcactgagaggccctacatcctcaccgcag

SEQ ID NO: 618886 - DNA, 120 bp, Homo sapiens
gaacgggtgacgcggtggagggtactgctggggaacgggacctggatgaggttgatatgtcagatctctctccagaagagcaatggagggagatctgacatatcaaccgcatcacccgtt

SEQ ID NO: 618887 - DNA, 1239 bp, Homo sapiens
  misc_feature (1239)..(1239): n is a, c, g, or t
gccgggacgctgaggggcccgaggagaccgtgaggctctggcctgcagctcgcgccgccatggacgctgccgaggtcgaattccatcgccgagaaggagctggttaccattatccccaacttcagtctggacaagatctacctcatcgggggggacctgggggccttttaaccctggtttacccgtgggaagtgcccctgtggctggcgattaacctgaaacaaagcacagaaagtgtcgccgtgctccctccagtagctggagtggactgtacgaaacagttggacgaacgatgagggatcagtgagacgatgacggaagacataccttttatccgccaagtgcccagtcaccttactacgatggaagcttagcgagagctccttgttaactcatgcttcagacaacatcccgcaaggcacgacgaaagtccggaccctggtcaaggatacctgtggtgacacgtcgtatagccaagactccgagtgtctgctgacagctttgtgagacagcagtgaggcacagtgccaagctggataacttgagccttgagtggagatcaacatccagcgggactttcctcacacaagcgctcaacacatgtcaaactccgtacgaacctccagcctctggagagtactccgtctcaggacttctaagagaaagggcctggtgccagcggcttgctggggatgtgagcgctccaagacgtgaattgaaggtacccggggtcctggagccttagacactcttgatgccttgaaacattgtgtggtgcacaggacagggtcagcagttgttgggaacaacattgatatacctcaactaattctctgggaagatctacaactggttgtctgaaagcgagcgttttccccgtgtggacaaaagcacgctgagaaatctcgatagaacatgagtgcttgtaacaaactcgagtgagagtgatgcatacaaaagtgcggaaacgactatcggagatacacaaacgagaggaagatggatctcgactccactgcttctttctcgttcttctctgcctccgcttctccctcgctccagacaggaggcgagcaggagaagagaaaagagaagcgaagaaaacgacgagcgagagacgacgtgccgaacagcaagacgacaacgaagatcaacgaaaacaaagcaggcaagaagagaggacaagcagaaagaaacgaagaaaagaagaaccaaagcaaagagagcaaagaaagacan

SEQ ID NO: 618888 - DNA, 550 bp, Homo sapiens
tccagtcggtacctgcatttactccatggcattccttttttttttggagatagagtttcactctggtcgcccaggcgggagtgcaagggcgccatctcggctcacggcaacctccacctcccaggtgcaggcgatggtccggcctcagcctcctgagtatcggggattacaggcatgtgccaccaggccaagctaaggtttggtattttcagtagagacgaggtttttccatgtgggtcaggcgggtctcgaaactccggacctcaggtgatccgcccgcttcggccccccaaggggctgggattacaggcatcagccacggcacccagccaaaggtgggatgttctaacttacagatggagataagaggtgggcataagatacaggtcactaagacctggcggataaaacaggtggcagtaaagaagcgggtcaaatcccaccaaaaccaagagggccacgagagtgacctcggggtgtcctcacggctacactccctccagcaccatgacagtttacagatgccagggcaacgcctgggagtaaatgg

SEQ ID NO: 618889 - DNA, 138 bp, Homo sapiens
tcatctagagggatccgtgatgtgaatggaccaccttcctggcatagttctctctgggcagcgagcagcttacagtgcactggtggtgtggaatggaattgggagcgtcaagtatctgctcctcaaagttcaaggact

SEQ ID NO: 618890 - DNA, 189 bp, Homo sapiens
ccccgtgattaagcgagagaacttctgcaatgctagtaatgttctacatttcaaaatcttgatagttgctgtgtaataaagtgagctgtacatcttctgtgtacttatctgaacatgtattttcacaataaggtatttatttttcttgggacagggcctcactctgtcaccgaggctggagcgcaatgg

SEQ ID NO: 618891 - DNA, 353 bp, Homo sapiens
ttctcgttcgttatacagctcatggagtgctgggagaagaaggtggagcgcatctgagaacaaccccgtgtggtgggccaattgagatgcaacggtgcgcgatgtactatgagaacgcagttccctgagatccgcaagcagcgcgagctgcaggagcgcatgcagagcagggtgggccagcggggccgtgggctgtccatgtcgtgccgcccggagtgagcacgaggtgtcagagatcatcgatggcctctcagagcacggagaaccgtggaggacagcagatgcgccagcgtggcctgttgatccctgcccaatgctagtacgactgctgaccacgcagcgcatcactgttc

SEQ ID NO: 618892 - DNA, 335 bp, Homo sapiens
cccagcaggtcaggggtcggggcatgcttttgggtctagggaggagagtggaaactttaaatccctgtttccttgttttgtggcttcaatgaggaggcctgattgtggcaagtaagcctccacctcctttccctgggtcctgtcttggaaggacagagagcagctaaatcctagtgtatctaaaatcagtgagggtcaaataagctaaaagcagctgaaattcctttgtcccctgtaagctgggaaaacagcgaaggccttagtcgtagagattgtaagggccatttttggtttttccacaccacagtctgtgtttttcccccagtccttggttg

SEQ ID NO: 618893 - DNA, 820 bp, Homo sapiens
  misc_feature (820)..(820): n is a, c, g, or t
agctgtcggggtcctggaggacggtccccaatagccctcgccccaagtccttgggatcacttgggtccccagagctggggagatggttagtaggcggcttgcactgctccaagaatgcgcttgcgctctcaacgtggtctacatgctggtgagcttgttgctcattgagaagtggatgcttgcgggcaaggagcctgggtctggtgtccagcactccgacatcatcggcggagtcattgctgtgggagtcttccttctccttattgcacgtggctggactggtgggtgcatgtcaaacacgcacaagtcgctgctagtgcttttacgatgatcatccttggtgtgggtcttcatcttccactgtgtgaatctcttgctcgatgtctggctattaaccgaagcaacacagatcatccttaggtgcactgcgttctggcctcttgggctattcgcttcctctgggatgtctggttagatttgtccagtgaggactgatctagagaacctcagaagacagagtgtcactcaagtgcttcttggtgggtcatgagcaacaagacgtcgggatgaactggaaagaagttggactgtgtggcttatgcaacctcacaaccctgtatcaacaagattatgatttctgcactgcaagtctgcagagccagagccacacatgccagatgtgtggagaaaaaggtttcttaagcattcagacgaacagcccttgaaaattcgtaggaggttgttgagactctttctttagcgtttacagaggtaacattcgtccagttccctcacacacatccttttggagactgggaan

SEQ ID NO: 618894 - DNA, 852 bp, Homo sapiens
gccggaccggtgatatgccacaggaccctaagctggcctcgtgcgctggtgcgacgagcttgagcgcgtgtctgcgtcatagggctccgcgtggcacgtcatggaggggattctggagtgatgactcgttaaagctacatgcaagcgcgtcagaaggagttcgatgcgcagcgtcgaaaagggaggttccatcgtacgtgaggagaggcctggtcgtatatcataaccgacgaggttgcgacccagagggtgtgagacgaaagaacgatacttgtcgatatgtggcccacatggtctactcgagctctacagagggctgagtgtgctgcgttcacttgaagcgagcgcgtacgaggcagaatcctggaagactcgcacaccgtgaatctggcccttgcctagagatcatcaagatgctgggcgccgagtggaggcaagctgctagccaagcggaaacagcagcggtacctggatgaggccgagagagacgaagcagcagtacatgaaaggagctgcgggcgtaccagcagtctgaagcctataagatgtgcacggagcaagatccaggagaagaagatcaagacagaatgcactcgagctctggcggctcatgaacgctctcctgaatggacaccaggcgttggggactgcgaatggcttctccagccttacgacgttccccatactttcacctgacagacttcctagggaccaaaatcacaaggcgggttgaggcggcagctaacggctgcttgcgggaaagcatgaatgtggcactatcgaggagacagaacgcgagaactgacgagggaacaaggcagagcatgagcaagggagcgcgcagcgtactgg

SEQ ID NO: 618895 - DNA, 498 bp, Homo sapiens
atgccatgactatttatactttatggaatttactaaaaataattactataagcacctatttactgttaggtgacatatgaagccccttgtcatctgagacccctaagtcccttagaagtcatttttctcccctgcatttttttgatcaatttctttgaaatattgtaaatgaagagttatccagctattggttaaacacctttagtggaggggaaccactttctctgatgacaaaccctcttattgttagacatttcttttatgaaaagtgtttctagaatttgagctagaatttgtttcccaagagttccactaatgttcctggttcaacactctggattgctttccagatattttagtacatcttgccatgtaatgtcttgccaacatttctgacttttttgtttttgagacggatcttgcactgtcaccgggctggagtgcagtggcgtgatctcagctcactgcaactctgcctcccaggttcaaggattctct

SEQ ID NO: 618896 - DNA, 149 bp, Homo sapiens
gtaaaacgctgtcacttaccatattccacactatattcacaacatctgagttactgtacaccaccccaatactacaagaaaccattacctttgcacctggatcactaccaacagtctcttacccttagtatcttatcgtatactctcaa

SEQ ID NO: 618897 - DNA, 967 bp, Homo sapiens
  misc_feature (109)..(109): n is a, c, g, or t
  misc_feature (818)..(818): n is a, c, g, or t
  misc_feature (906)..(906): n is a, c, g, or t
gtggcgcgtggttattctagatgaatcgagtgcgttaggtatatacctattcctgctgcgtatgcttagagaggttctcgtgatactacgcttcaagatcttcagtgtncttcctatctagtggacctataatggaagttctaagatatccgattggtcttcagtaaagtatgcttgactcctcaggaaccacctcatatatctctcctcacgcatcggtcagccttatactcgaagctcgaattgtccgcctatggatcgcttttgtgggacttggcgaggcacctggttggggcgaattccatacatagtgattggtgtccagcttgctatggggctagacgcaaagtatcctaaacgtcattatctgacttgagaggttgtcttatatatatcttagatacagatacaccttatactaattcttcatattagcaatagaccaacttgggccttggaacgttgttggcaggcactacatttcctgagtgttaatgttctgactaaatgaactaaaggctcatcgtttctcccggcttctattacagatactcaaggacgaccaaaataaactctgaatgatgacacgtgggctctacaagccgcctgttgctgcactgatcccacacctaaagcattactaccactacttatggacggaatactgtgcccttcgtgatgtcctcaattgctgtgcgattggctgggactacctgcattaatgggttcacgtatctactcaagaggtgacccctacgtgtaatattactggggcgactggaacgggctctctgcattggtaaataatcagcgcgcangtgtgtccctgtttgaattccgacttctaagacggaggaaatgacttgaaggcgtacatgctcgaggaagcaacgctaataacacagngtggagaatctcgttgaacctggagggccctccgcaagaaggaagaaaacaagctgacaaa

SEQ ID NO: 618898 - DNA, 404 bp, Homo sapiens
  misc_feature (30)..(30): n is a, c, g, or t
atcgatctccattcggcacgttcaacgccnattgcgcagaccccccggaattcggctcatatggccggcatatatccttgattctaggattccttacactgtaacacccattatggcttgaaactactgtaaccgtttgcaaggggattgcattaaatgactagaccaattgcttagtgcagtgccaaaacatttattgcatctaatatagaggccaaaattgctataaattaacctcgggttactgccaagcactgacgccggctttatgtgctgtatgcaactctgacctttgtcatctttcaggaggaaaagcaaggcttacagaaggacgtgccttcagcctgaaccaacactactttcactttgagcaagctaatgctgtgcccgatctactagccaca

SEQ ID NO: 618899 - DNA, 120 bp, Homo sapiens
ctacttgcaggtagggtacgcggcgtgaacatgtgtcactgggcaggcggtgctctcaatactggtgatgctagaggtgatgttttggtacacaggcggggttagatttgccgagttcct

SEQ ID NO: 618900 - DNA, 112 bp, Homo sapiens
ggttttcttttccaatttaaaaaaaaaatcccttttttgtataaagggcttccccttttgttaactaatccctttttttggttaaaattgttaatttaaatgtgccccttta

SEQ ID NO: 618901 - DNA, 918 bp, Homo sapiens
  misc_feature (68)..(68): n is a, c, g, or t
  misc_feature (266)..(266): n is a, c, g, or t
  misc_feature (280)..(280): n is a, c, g, or t
  misc_feature (292)..(292): n is a, c, g, or t
  misc_feature (306)..(306): n is a, c, g, or t
  misc_feature (347)..(347): n is a, c, g, or t
  misc_feature (374)..(375): n is a, c, g, or t
  misc_feature (379)..(379): n is a, c, g, or t
  misc_feature (384)..(384): n is a, c, g, or t
  misc_feature (398)..(399): n is a, c, g, or t
  misc_feature (514)..(514): n is a, c, g, or t
  misc_feature (711)..(711): n is a, c, g, or t
cttacaactgaatttgggcagtcaattaacataaataggctgcttggagaaaatgatggggaaacaanagctttgagttttacaggtagtgctcttgctgctttggtgaaaggtcttccagaagctttgcaaaggcagtttgaatatgaagatcctattgtgaggggtggcaaacagctgctccacagcccattctttaaggtactggtagctcttgcttgtgacctggagctggacactctgccttgctgtgccgagacgcacangtgggcctggtccnggaggtactgcntggcctcccgtgtngctgtggcccttgacaaaagaacaccgttgccccgtctgtntcttgatgaggtggctaagaaaattcnntganttaantggcagacagcgannacatggatgttctgcatgagagccatgacatttttaaaagagagcaagacgaacaacttgtgcagtggatgaacaggcgaccagatgactggactctctctgctggtggcagtgnaacaatttatggatggggacataatcacaggggccagctcgggggcattgaaggcgcaaaagtcaaagttcccactccctgtgaagcccttgcaactctcagacccgtgcagttaatcggaggggaacagaccctctttgctgtgacggctgatgggaagctgtatgccactgggtatggtgcaggtggcagactangcattggagggacagagtcggtgtccaccccaacattgcttgaatccattcagcatgtgtttattaagaaagtagctgtgaactctggaggaaagcactgccttgccctgtcttcagaaggagaagtatactcttggggtgaggcagaagatgggaagttggggcatggcaacagaagtccgtgtgaccgccctcgtgtcatcgagt

SEQ ID NO: 618902 - DNA, 847 bp, Homo sapiens
  misc_feature (68)..(68): n is a, c, g, or t
  misc_feature (266)..(266): n is a, c, g, or t
  misc_feature (280)..(280): n is a, c, g, or t
  misc_feature (292)..(292): n is a, c, g, or t
  misc_feature (306)..(306): n is a, c, g, or t
  misc_feature (347)..(347): n is a, c, g, or t
  misc_feature (374)..(375): n is a, c, g, or t
  misc_feature (379)..(379): n is a, c, g, or t
  misc_feature (384)..(384): n is a, c, g, or t
  misc_feature (398)..(399): n is a, c, g, or t
  misc_feature (514)..(514): n is a, c, g, or t
cttacaactgaatttgggcagtcaattaacataaataggctgcttggagaaaatgatggggaaacaanagctttgagttttacaggtagtgctcttgctgctttggtgaaaggtcttccagaagctttgcaaaggcagtttgaatatgaagatcctattgtgaggggtggcaaacagctgctccacagcccattctttaaggtactggtagctcttgcttgtgacctggagctggacactctgccttgctgtgccgagacgcacangtgggcctggtccnggaggtactgcntggcctcccgtgtngctgtggcccttgacaaaagaacaccgttgccccgtctgtntcttgatgaggtggctaagaaaattcnntganttaantggcagacagcgannacatggatgttctgcatgagagccatgacatttttaaaagagagcaagacgaacaacttgtgcagtggatgaacaggcgaccagatgactggactctctctgctggtggcagtgnaacaatttatggatggggacataatcacaggggccagctcgggggcattgaaggcgcaaaagtcaaagttcccactccctgtgaagcccttgcaactctcagacccgtgcagttaatcggaggggaacagaccctctttgctgtgacggctgatgggaaggtaagagctctttttctatgtcacaaggtcattgagcctgaggcagttgtggctaaaggtgctgtgtggttcttagcacgtgcaaggatctgtactaaaacgtttctcaggattaatgatactgtggtatgcaggaagcagctagagttctaagatatttttgtataatcttt

SEQ ID NO: 618903 - DNA, 401 bp, Homo sapiens
agattcgccacaatagtcatgatgtatagcacagacaacacagtcttaatgattaaagaaatttttgtttttgagacagggtggtgcctttacaccaacgaaaaagatccacgtttgtataggctgctgatcttcaatttcagagtccaattgtcatggtagcatgagatgcatttgaatgtgttgttataagcttaagacagctagccttgcacccacaagttttagaccctagtcgacaaggcaggtcaccttatcgtcagccaggcgcctcttctctccaagcgttgccagatcatgcatcacacccatcagtcgctagtttggcgccatgcgggtttgtgtttcactagcaccacagagagcagtgtgagtcttcgtttgtcagtccatctcacagc

SEQ ID NO: 618904 - DNA, 236 bp, Homo sapiens
ctcaagggaaatttaacatccatttgtgataaaactcctcacaaactaggtacagaagggaacttccccaatctgataaagggcattttcacaaaacctactgctaatatcatatttaatggtaaaagactgaatattttctccctaagatcaggaacaagttgactgtccattctcaaccctcctatcagtatcctactggaagtcctagccagtgcaataggctaaaaaaaaaa

SEQ ID NO: 618905 - DNA, 2576 bp, Homo sapiens
gggtgacccggggtgcaagaattcaggggttgggaaggtgtgagccgcaaacccagcggagggcgggaagaaggaggaggcctctagggtggtcgggggactgggggccccgccggcagaggtccctcggcctcctgactgactgactgcggccgcctccggccaggacgctgggagctgcctgcgggaaggtgcggggagcggagccatggcctccggtgcgtataacccgtatatagagataattgaacaacccaggcagaggggaatgcgttttagatacaaatgtgaagggcgatcagcaggcagcattccaggggagcacagcacagacaacaaccgaacatacccttctatccagattatgaactattatggaaaaggaaaagtgagaattacattagtaacaaagaatgacccatataaacctcatcctcatgatttagttggaaaagactgcagagacggctactatgaagcagaatttggacaagaacgcagacctttgtttttccaaaatttgggtattcgatgtgtgaagaaaaaagaagtaaaagaagctattattacaagaataaaggcaggaatcaatccattcaatgtccctgaaaaacagctgaatgatattgaagattgtgacctcaatgtggtgagactgtgttttcaagtttttctccctgatgaacatggtaatttgacgactgctcttcctcctgttgtctcgaacccaatttatgacaaccgtgctccaaatactgcagaattaaggatttgtcgtgtaaacaagaattgtggaagtgtcagaggaggagatgaaatatttctactttgtgacaaagttcagaaagatgacatagaagttcgttttgtgttgaacgattgggaagcaaaaggcatcttttcacaagctgatgtacaccgtcaagtagccattgttttcaaaactccaccatattgcaaagctatcacagaacccgtaacagtaaaaatgcagttgcggagaccttctgaccaggaagttagtgaatctatggattttagatatctgccagatgaaaaagatacttacggcaataaagcaaagaaacaaaagacaactctgcttttccagaaactgtgccaggatcacgtagaaacagggtttcgccatgttgaccaggatggtcttgaactcctgacatcaggtgatccacccaccttggcctcccaaagtgctgggattacagttaattttcctgagagaccaagacctggtctcctcggttcaattggagaaggaagatacttcaaaaaagaaccaaacttgttttctcatgatgcagttgtgagagaaatgcctacaggggtttcaagtcaagcagaatcctactatccctcacctgggcccatctcaagtggattgtcacatcatgcctcaatggcacctctgccttcttcaagctggtcatcagtggcccaccccaccccacgctcaggcaatacaaacccactgagtagtttttcaacaaggacacttccttctaattcgcaaggtatcccaccattcctgagaatacctgttgggaatgatttaaatgcttctaatgcttgcatttacaacaatgccgatgacatagtcggaatggaagcgtcatccatgccatcagcagatttatatggtatttctgatcccaacatgctgtctaattgttctgtgaatatgatgacaaccagcagtgacagcatgggagagactgataatccaagacttctgagcatgaatcttgaaaacccctcatgtaattcagtgttagacccaagagacttgagacagctccatcagatgtcctcttccagtatgtcagcaggcgccaattccaatactactgtttttgtttcacaatcagatgcatttgagggatctgacttcagttgtgcagataacagcatgataaatgagtcgggaccatcaaacagtactaatccaaacagtcatggttttgttcaagatagtcagtattcaggtattggcagtatgcaaaatgagcaattgagtgactcctttccatatgaattttttcaagtataacttgcaagatttaaatccttttaaatcttgataccacctatatagatgcagcattttgtatttgtctaactggggatataatactatatttatactgtatatataatactgactgagaatataatactgtatttgagaatataaaaaacttttttcagggaagaagcatacaactttggacatagcgaatacaaaattggaagctgtcataaaaagacaactcagaggccaggcgcaggggctcacacctgtaatcctagcactttgggaggccaaggcgggtggatcacttgagaccaggaattcgagaccagcctggccaacatggtgaaaccccgtctctactaaaaatacaaaaattagctgagcatggtggtacgtgcctgtactgtcagctacttgggaggctgaggcacaataattgtttgaacccaggaagcagaggttgcagtgagctgagatcacaccaccgcactccagcctgggtgacagagtgagactctgtctc

SEQ ID NO: 618906 - DNA, 424 bp, Homo sapiens
  misc_feature (393)..(393): n is a, c, g, or t
  misc_feature (396)..(396): n is a, c, g, or t
ccccccacatttgcaggagaggaggagatgaaatatttctactttgtgacaaagttcagaaaggtaattatttatttcattgaatttagaataaattttagattaatagatgcagttactttgttttcccatttttttttttggtttcttattgactagatgacatagaagttcgttttgtgttgaacgattgggaagcaaaaggcatcttttcacaagctgatgtacaccgtcaagtagccattgttttcaaaactccaccatattgcaaagctatcacagaacccgtaacagtaaaaatgcagttgcggagaccttctgaccaggaagttagtgaatctatggattttagatatctgccagatgaaaaaggtatgacattttgctggtaanaanttatatatttcttgaagtgtccgcaaat

SEQ ID NO: 618907 - DNA, 316 bp, Homo sapiens
  misc_feature (101)..(101): n is a, c, g, or t
  misc_feature (272)..(272): n is a, c, g, or t
ggtcactgtgcccttcaccttctgggttcaagtgattctcctgcctcagcctccctagtagctgggattacaggcatgcaccaccatacccagctaatttntgtatttttagtagagatggagtttcaccatgttggccaggctggtctcgaactcctgacctcaggtgatccacctgcctcggcctcccaaagtgctaggattacaggcgtgagcacccatgcccagctgggagcgttctttcagcaaaaagtctaattcagagacttcancttccatcctgggacttaaacaatagtactagaggtaagattct

SEQ ID NO: 618908 - DNA, 2482 bp, Homo sapiens
  misc_feature (96)..(96): n is a, c, g, or t
tattaatgtaggacggacaaaaatcttgttttagtctgcggttataaaaaaaaacagaatgttaaaatccattattaatgctatattaatctcacngacctcctcctttttaaaaacttttcaggtgcgtataacccgtatatagagataattgaacaacccaggcagaggggaatgcgttttagatacaaatgtgaagggcgatcagcaggcagcattccaggggagcacagcacagacaacaaccgaacatacccttctatccagattatgaactattatggaaaaggaaaagtgagaattacattagtaacaaagaatgacccatataaacctcatcctcatgatttagttggaaaagactgcagagacggctactatgaagcagaatttggacaagaacgcagacctttgtttttccaaaatttgggtattcgatgtgtgaagaaaaaagaagtaaaagaagctattattacaagaataaaggcaggaatcaatccattcaatgtccctgaaaaacagctgaatgatattgaagattgtgacctcaatgtggtgagactgtgttttcaagtttttctccctgatgaacatggtaatttgacgactgctcttcctcctgttgtctcgaacccaatttatgacaaccgtgctccaaatactgcagaattaaggatttgtcgtgtaaacaagaattgtggaagtgtcagaggaggagatgaaatatttctactttgtgacaaagttcagaaagatgacatagaagttcgttttgtgttgaacgattgggaagcaaaaggcatcttttcacaagctgatgtacaccgtcaagtagccattgttttcaaaactccaccatattgcaaagctatcacagaacccgtaacagtaaaaatgcagttgcggagaccttctgaccaggaagttagtgaatctatggattttagatatctgccagatgaaaaagatacttacggcaataaagcaaagaaacaaaagacaactctgcttttccagaaactgtgccaggatcacgtagaaacagggtttcgccatgttgaccaggatggtcttgaactcctgacatcaggtgatccacccaccttggcctcccaaagtgctgggattacagttaattttcctgagagaccaagacctggtctcctcggttcaattggagaaggaagatacttcaaaaaagaaccaaacttgttttctcatgatgcagttgtgagagaaatgcctacaggggtttcaagtcaagcagaatcctactatccctcacctgggcccatctcaagtggattgtcacatcatgcctcaatggcacctctgccttcttcaagctggtcatcagtggcccaccccaccccacgctcaggcaatacaaacccactgagtagtttttcaacaaggacacttccttctaattcgcaaggtatcccaccattcctgagaatacctgttgggaatgatttaaatgcttctaatgcttgcatttacaacaatgccgatgacatagtcggaatggaagcgtcatccatgccatcagcagatttatatggtatttctgatcccaacatgctgtctaattgttctgtgaatatgatgacaaccagcagtgacagcatgggagagactgataatccaagacttctgagcatgaatcttgaaaacccctcatgtaattcagtgttagacccaagagacttgagacagctccatcagatgtcctcttccagtatgtcagcaggcgccaattccaatactactgtttttgtttcacaatcagatgcatttgagggatctgacttcagttgtgcagataacagcatgataaatgagtcgggaccatcaaacagtactaatccaaacagtcatggttttgttcaagatagtcagtattcaggtattggcagtatgcaaaatgagcaattgagtgactcctttccatatgaattttttcaagtataacttgcaagatttaaatccttttaaatcttgataccacctatatagatgcagcattttgtatttgtctaactggggatataatactatatttatactgtatatataatactgactgagaatataatactgtatttgagaatataaaaaacttttttcagggaagaagcatacaactttggacatagcgaatacaaaattggaagctgtcataaaaagacaactcagaggccaggcgcaggggctcacacctgtaatcctagcactttgggaggccaaggcgggtggatcacttgagaccaggaattcgagaccagcctggccaacatggtgaaaccccgtctctactaaaaatacaaaaattagctgagcatggtggtacgtgcctgtactgtcagctacttgggaggctgaggcacaataattgtttgaacccaggaagcagaggttgcagtgagctgagatcacaccaccgcactccagcctgggtgacagagtgagactctgtctc

SEQ ID NO: 618909 - DNA, 1103 bp, Homo sapiens
tcgggggtgtcttcatgtcacatagcacttcgctgcgttcgtctcgtctgttttcggtcctttggatcgtcgcttcttgtgtcgccaggtgtcttgtctcttgtggggtcgactctagctagatgtcgctccgtagttcggtgtctgcgcccggtatcttgtgtgcttacttgtattatgtgtatcgtcggcgtcgcgaccatctctcgggagttcgctcgcttcgtgggcgtggatgccgcgaccaacgtatatgtcgcttcgcttgcggtatacacagtgctgatccccctgcctggttgatttcctcgttgtgggggtcatgtttagtacgagtcgttcagtgtgtgtgcttgtgcaacattggcggtgtagtggcggcctctcgtcgcgttttgtggcatcatgcacccatgtgggccgctcgtgtgggcccgggccctttggtgtggtgcagagtcccccctgatgttcgttatgccgtggtgccgatgattactttgtagtgatggttgcgccccggtgcatcacatcgcgcttcgttcttcatgtttgtgcgtccgtgcgcgtaggtcgcgtatagggcggggggcgccgtcgacggcggtggtatctaaatatcgctcctgcttcagacgatgtgttctgagatggcggggtctcccgcatatgctggcgttgttgatggatgtttgtggtcacagctcgtggtgttgcaggttgcggcgggtgctcccgcgcgctatgtacacaagtagggagggacctcttggtgtgggttcggtttacgcgacggttggtctcggtgatcctaaatatactggttgttctcatcatgcacggtaggtcgaacaaagatgatggtcggcacagccacgataagtgttcctctgtctcgacacaatgatgtggacccaacaagtaccaaatgggggcgactactcacgcgcccgcagcacttgcgcacaacacatgatagcctccttctttaccacactagatgagcaacacctccttgactgggttacaaacgacccattgcccccctttttctcctttccccccaccccgaaatcctttccggggtttcccttaaaaaaaaa

SEQ ID NO: 618910 - DNA, 889 bp, Homo sapiens
cacatgatctgtaatccacacaataatctgggaaataggtcttttaataacagcttattgagatataatggacataccataaaagccacccttgtaaagatggacaattccagtaggtttttagacattcatagtgccatgacatcaaattagttggttatcactaattccagaacattgggttttttaaaaaattttgatagagatgaagtttcacctgtttttgctcaggctggtcttcaaactcctgagtaaagtgatgcaaagtgccttggcctcccaaagtgctgagattacaggtgtgagccatggtggccagcccagaacattgttttgagcagttttaagttcatagcaaaattgagcagaaagtacagagttcccattcattccctgcccccacacatgcataaacaaggatcagcatctccactagagtgatagatttgttacaatcaatgaactttcactgattcatcattaccccccaaagttcataatttacattagggttcactcttggtgccatacattatatgggtttggacaaaagtataacgatatgtatccacttttgtagtattatacagagtggttgtcactgcccccaaaatctctgtgctctgcctattcatcactctctcctaatccttggcaacctggacttctccgtatttttgcttttccagactgttatgtacagtatttggaatcacacagtatgtagccttttcagattggcatctttcacttagtgatatgcgtttatgggtcctccatgtcttttcatgtcttgatagttcattttttagtgctgaatgctattccattgtctgaatgtactacagtttatcacattcacatgctgaagacatcttggtgctaccag

SEQ ID NO: 618911 - DNA, 691 bp, Homo sapiens
ccacgcgatcgggcgcgtgctcaggtgcggcgcggaccgggccggagctgggtgtagggggcgcgggtggcagtgcgggtagggaaagcgcggacccgggactcgggcgagggagggccctaaatgctgcgggcctagaccccggggtacccattcgtcccagtcagcgcccaggagagctcgtacgccagcccagtgtcgcgggtcaggcagaagcttgtcctctccagcgcgtctgcatgggcacctaaggcactttcgtgccgcgaccgggcatcggcacgatcaggccgagcgcggtgcagccggggtgcccgggcacagagctcgtgggcacgcatgcctggcaccagcaagtatgcggatggcaagcgtcgtgggacacaccttagggatggcatgctcgagctggcaggcacagaacgacgaggcatcaccgctgaggcagggttgccacgttcgtcccccgcaggggccaaaacagtatacgtatgtcatagaaatccaattggggggtattacatcgaaggacagcaaggtgatccaggggccacaggcgcacggtgtacaacacccatgggacaagaaaaggcccgtatactaattatatatcctggagacgataggttggggatcaaagttccagaggatattagaagcagtcaaagaatcaatagtcgagtaggatatg

SEQ ID NO: 618912 - DNA, 1992 bp, Homo sapiens
  misc_feature (1440)..(1440): n is a, c, g, or t
  misc_feature (1833)..(1833): n is a, c, g, or t
caagacacagaacaaacacacagaaaaaaagtagcaacgaggaaaccgcgagcatgttcgtgtctgggcgagtattgaggatctcgcgccgtccattggataactggggtttcctcatttctcaccttacgagcgccggttattgcgcagataggattggtggaaaagtattgagatagacaagagtgcccctgatgtctcttctatagtgggcatatacaacgtgatggtggcacaacatatcttacccacagaatgccttgtagggcactgtgtgagcaacctcgaggagagactcaggaggaggagttcagggcgaggagaatctccatcgcgcgccctctttactctccgcgcgcgacatatttccccccagtaaagagtagaaactatatatagccatagagatagtttagaaacctcgctcgtgtcctatactgtctaccagacattatgtatacttttgcactcgaaggcattaaatgtatttaaactacaggaatatctaattttgtgcaagtgcttgagggagcggtggggtgacagagggtatgtgtgtttgtctctaaactataatcataacaaaaaaaatgaagtagtggaacagacatagagagacgaacatagagtttatctttaacacaaacaatagatctttatcgtttggatggcggtggggacaaacagcactttcgttaggtacgcacacaagtgtggggtaaaacgcgcgcttttccgtgaggtgaatatgtaattttataagccgagaagtgatgtgtggattggacatataatatcttctatagagaggccgcacatgatgttctatgtagtcaacggaaaggggatcgcgtgggaggggaaatattattgtctcttggaacgccggagatgtgacgggtggataaaatgatattgtctttggtacctcctcatataagaggaggaccatggtcctaaggtatgttgttagtaaacaccattgtatgtaaaagcaaggcccacccccgcttgtattcatgtaaaagactttctggttcttatctaacgacgcctcatggcgtgtagccgtgtgaaataatatcccttttggttattaatacactctgctggaagggaagacaacatatcaggcataatcattttggggaccacaggcgtgagttctcaaatccgtttgcgggtggaatttgccccaacgatggagtttgatgcgaaaggattttgcggacatgttttatgagggggcgctggatataatgtgatagatatgagacaccaatgtggtatctggcgaatctattagagccacctttgtaagctggcaatgaataaatttcaaggaaaagcgtgtaaacttcggagagggggttcaatttacaccaggattcaaggagctctcgaaaggggccaaacttattttttcataccgcggatacnatattaattatttcccttctagtgtgcgaaaaaaacggattctcgaaacaggtgctgcccaattcccaagtgaaattgtcgcggaatgttagcatcagtggttttatcagtaagaaaatcggtagagagagtgggtcattacaaacacaccggggggcccaacatttacaaaacacgtgtgggccagttatagaacatagccaccgactgtggtgcacgtcgcgatacaaagcgactcccacgcaacaattaggtgaacccgcgaggagataaatcaactgaggaggagcgctacccacgaggatccgtgccaaccgaactaggcgcacacagcacatattatcagagccacagcgaggacacacaacgcataccagcgacagccgacacaanacaagagagagagagcaaacaacataacctggagagacaacacagaacggcactgatgaagaccgagaagaacacgcaacacgaaacatcaagcggacagaaaatcataccacagcgggagcaaacacaacagcgtacgacaaaacaacgagcaaacac

SEQ ID NO: 618913 - DNA, 847 bp, Homo sapiens
aagcaaaaagctgtgtataggagcggatccggtgtgattcatgacgaggctggatgctagtggtaagtccaaggaagctgtttatgagacaaaatgatatacaccacaaagtattatctctgaacttcagatgaagtgtcatactaaaatacgtcatgtggatgctcatgcaaccttgagtgatggagtagttgtccaggtcatgggtttgcgtagtcataacagtggagaaaccagaaaagataagatttagtgcaaaccgtgtatgattctggctccgtgcaaggcatcgtggttccaaagtaaagttgtgtatgttcacaatggatagtgtttcggttatgcaagatgaagtgttgtggtgagttcgtgagacctgaagcatatgagtgaagcaatcgagcacagcatgcaagatagaagcaggaaccaagaagcaaagacaaccaatctcctgcaaccgtgatgcaagaaacatgctaacgagtaggttactatgaagctccaccctgatgactcaatggccatagcaggcagccttttggcaaagcaatcactctcgatgcaacctgaaacctgagccaggaatctgacacgaaagactgacagagcgtgaaaccacaagtggagggcagaagaacttcagaagaagtagaggagaaatctactaatcctcctccggacagaacctgtatctctgccacaagaaccacaaaagaccaagcagtcgaagctacaaccagaagttcaaatctcagacacctcggtgtgcgtgcacaaggaccctagagaacggactggttttcctcctaagaagacaaggaccaggccgaggagatttggaccg

SEQ ID NO: 618914 - DNA, 223 bp, Homo sapiens
agaaacagacatctacacatatataacaaaagaactacaggataggagataagtggatagtaaaagctactagaccgaataaaagccacggaagtaataccgaaggccatacagcacaactagcccactaacgatactagccacctagaggaataacaacataacataacccctagataatcgaagacagccaaagtaaaaggagtaaggctaggaaaagcta

SEQ ID NO: 618915 - DNA, 843 bp, Homo sapiens
atctcggtcatgcaaccaccacttcctgggttcaattgattctcccgcctcagtttcccaagtagctggggattataggtgcctaccaccactctggctaatttttgtcatttagtagagatggggtttcaccattattgtccaggctgtctcgaactctgactcaagagattcacttgctcggcttcccaaagtgctgggattacaggagtgagccaggtgccggcttaatgtttatttggttcaggtagctagagtcttactgtcttttttaatagcaaatgttactatttataatgtgccattcagtattcttggaattctcaggatatgggttggttaattataaaaggcatctgaaacctttttatacttttaaattagtgagtaaaaatctgtcccacccctgttggacccagcagaggtcacctgacaggtaaatccctgccctctgtatctctagcaatctccctgaaatgattactctttttaatattgatggatgtcttggatccaaggtatatctgagaaaaatgaagctctgtcagataacagtacgttatacacaggagtgtctgatggggaagtaggtatgtatgtatgtattatgattatggagaggagtttgtcttgttggcaggtgggtacaatggtgatctgggtcatggaacttgctccaaggtaagtgttctctggttatcgaagagtggtaaggacacctatgtgggttttgttgagcgaccggtacagggcagggttaactgatgtgacatccggcagtgttggtaccaccgggttttgcacttgcaattgttagtttgcaaaaaaaggggcataggggaa

SEQ ID NO: 618916 - DNA, 206 bp, Homo sapiens
ggtggctggagcatcagaaagtcacctcacagatcttactttactatctagcttcatattggctagcagactcactctatctgacgaacggatcaacaccctagaatcactccattcgataaatcacttcaccttatacaaatcaaagagcctcggttatctcttcttctctcttatgcataacactattctcaccacgacagggg

SEQ ID NO: 618917 - DNA, 357 bp, Homo sapiens
ctctaggtggttgtgggtagcacggactgtttctgaacactcgagcaagaaaagtcattaacatgacaagtgtgatggtgctcctgttccatctgtgggccacagggcaatattggtaaaatccacatcatagggttaagcctgttgggcacagttttcattcttaacccacattcttgtgtggtttaagaaagtctggggcccacagaaaaagaaaccaaggcaaccggtgaaagggcaggtctcacaattgggcagaaacaggggctgttagcccttctgggaggtggggtagggggcaccctcttacccaaaaacaacctgctggtaccggagctcgaaattcggaaatcattg

SEQ ID NO: 618918 - DNA, 790 bp, Homo sapiens
gtgaacccggcgctcgttccccaccccggatcggcctgcccatagaccagaccctaccgtcacctactatacacctgcaccctcgtgtactgtccccaatggacccccgaccagccagctacctagcagcacagcagactagaccgacacagaacacgacatgaacagaccagaacagtacatacacataatagatactgcactgctacatgcactagacaccatgcgataactcacatatacagacaatggatatgcaagctcaaagataaacaactaaccacgagacacccagagcagaatacaaagacacgagtgccgctgacacaactactaaacacagaccctaagacagttacaaaaccattagagaaggctaccttaaaacggccgtacctaaacagcttataccctagtgcccactagtacatataaacatacccaatctatgagaaacgacgccagatcatatgagaaatagatggcagacacctacatatgctacgctcgtcgacacgccagctcaccatcctaatatatatagtcaccacacatcaacatacatacactaaagcccgcaatcctgttccccatataatatcaaactacaccctaaaaaagacattaccaatctcccagaatactagatgaacggcagagcagatagcgcaatgcacggtcgcaacaacgtccacagcatttgtcacccatatcggaacgaagcgcacagagcagacacacattatgagcacacaattagggacaaacaacagagacgccattgtgaacc

SEQ ID NO: 618919 - DNA, 412 bp, Homo sapiens
tgtgtcttcaggaccctcgaataatttctcagacccacccactgtaaccgtgtatcctatatccttagcccaaaatatgagtctctcatgtgtctgtgtctctgggtgcgcatccaagaaaatccggtacccgcggttcaagcacagttcggtgtagaagtgaaggcacacagtagagcctttgagaggcttggttaccggtgctttgagggatccttaggaagtatccgcctctttgggaaccacaaaagccttcctcccagtgtctgtcgggccaaaggctatgagagagctgtggtcaagaccaagacacaccacagtttctcacatggtcagcgttctgctgacagtgacacgagggcctgaactctctcctttggaaaatgtgtacgcgtctgagagctcaggggct

SEQ ID NO: 618920 - DNA, 107 bp, Homo sapiens
ccgactgcgcattgtagccatcctgcaggcgcagcgccatcctgtcgcagccagaagcctgtgatggtgaagaggaagcggacccgccccataaccacgcgccacaa

SEQ ID NO: 618921 - DNA, 185 bp, Homo sapiens
aatgattaaaccccacaccaagcagaagagagtctgtagagataagtcgcgcgggcgcagaaggagaatttgggatctgcttgtacccatgggacacagcccgggaatacaaatgttttcctgactcttctctgaaagccagatagactccacctaaaaccatattgccaaggatgctgggatcc

SEQ ID NO: 618922 - DNA, 608 bp, Homo sapiens
aaaccatctgctctgggaaatgtcctgcgtgcgctgtgctcccacgtctcggaaccttgtccttgtttgtcccccagctcggcaagcgccatatgatgcctggctggctgccagattgcgaatcctgcttgtgggcgttttttggccatattccctgacccctcatgtcttagccctgtggatgtgcacctgacctgcaatagtgacttcgcagtggttgtggctgcagtgaggacgttcgacgtgcatggtgcctcagtaatatctcgcattatggagtgcatgcatccttccagatgctagggacaacacatggagggcccacgctgtcgagtctcccgtacacatccgacaatctatgatatttgggaacactttcctgcccattggcaaggtctccatgtacggatgttgtgaagctcattgtgcatggatgatatatgcattatgtgttggagcaacactgggcactttgttgtcaggcgcattcgaccccccacgatgtatttgtagttaaccagaacatgacaaaacttatttacctcagcaaactacataacttgatcagaccacttcccaagacaaaattgtctggacgattactctga

SEQ ID NO: 618923 - DNA, 617 bp, Homo sapiens
ggcaaatacataaaataaagtctcttcctctcaaaaatcggacccaaagttctcattaaatatttcaaatttataaccaaaaaacccttttggcttcttactctccaatgggataaatgttcctatgactaaatcaccaataacaagaactacgatcaccaaaagaacaatctatacttttacttcccactccattccagctactgatatacctaaaataatcaccactgtaatggctccaataattcaaatatcattgatttcatctatcataaatatggaatgctccttaagcaactccaccacagtttctacaaatccaaccacatacatagcaactgcaacagcattggcaaatgctaacattacaccaattgcaccaccaaattctggccctaaacttctacatattaaataatatactcctcctcctcttacaaatccattcattgctattgctaaactatacaatcctatgatacttatcacaacattggccatcattattacaaggactgatagacctattccaacttgacccacaatccattacaatctaatgacatcacaccccaaatgtttaacatacaacgtacttacacccttgatcccccctt

SEQ ID NO: 618924 - DNA, 934 bp, Homo sapiens
  misc_feature (189)..(189): n is a, c, g, or t
  misc_feature (456)..(456): n is a, c, g, or t
  misc_feature (499)..(499): n is a, c, g, or t
  misc_feature (572)..(572): n is a, c, g, or t
  misc_feature (683)..(683): n is a, c, g, or t
tgaagagcatgccccaagcaggaagctacacctaatgacactaataatcatggctctactgagctccttcaaatatgtgaatacctgcaatcctctgatttaatcatgacataccatgtaactgtggaatctttgttactgtgcagatcctcatgcttgaactgtgagatcacgtcttcatccgaagtnctcgcataagagatgccctgtgtgcggacacacgcgccacgattcagttcgttgtctcactcagtagctatggcgcgacaggtacttctccgtgatacttacgtgcgggtctctatgcgattagtagattaacgtccttcgatcacgttcagtgtatacacctccctctttatctatacttccaccattaatcctaaactccttactgtgtttttaccactgcgtaatagaggacataagactccataacacactaacttgcctaanactagctgtcaacgcagcgatactaccactcatagtaatgccnctagcgattgacatctacaactatctcaccttgcaggctccccataaatgatctctgctctgtcccttgaagnccttctcctaaagtatcgactaggcgcctctagcaaggatatacacacggtgatacatcccatgtctatactaagactaacgagcatacgcgaagcttgactatgcgcttncgtctaaatagaacgttgcctagtcataagcttctagtcttattggacactgtctctttcgactagtacagtcttctatctagtacactactactcactaaggtacgttctaaaactgataacatgccacggatctcaactcattttcctatagattcgaacttcctagacaaagacctacgacctaaacccttcgccttataacccccccccaataatataacctaagggggggcagaactcctactgtg

SEQ ID NO: 618925 - DNA, 550 bp, Homo sapiens
  misc_feature (1)..(1): n is a, c, g, or t
  misc_feature (69)..(71): n is a, c, g, or t
  misc_feature (75)..(75): n is a, c, g, or t
  misc_feature (110)..(110): n is a, c, g, or t
  misc_feature (115)..(115): n is a, c, g, or t
  misc_feature (123)..(123): n is a, c, g, or t
  misc_feature (224)..(224): n is a, c, g, or t
  misc_feature (256)..(256): n is a, c, g, or t
  misc_feature (374)..(374): n is a, c, g, or t
ntccggacgcagagctccaccgctgaggccgacgaggccagctctttatttgtggcgtttaaaggccgnnngttnggggaggacagggcgcttgcatatattaagcacangttcngaacgcancatctttccaggggcttccctactagctcagccccataaagtcactgggttcctccatctggaccagcagccacaccagccaaggcgcccactgggtgtcngaggggggggatgtcaatccccgtggccttcntcaggaggggggagctggccaaaaagagagcgggacagttctggccactgagcaaatgcttccactctgcgcgcaatatcagtgcaacgcctgggccgaaggcggcagttactgtccngagcaggggtcacgtgtcaggagcagagagtgaaatgctgaaacccatgttttcatagaacatcatttcacactcaggtgggcaaagctgacaaacatatgcagctggtcatggcaaagcaacctgggaagctgagtgggctggggtcttaaaatattttcagagagagagaatat

SEQ ID NO: 618926 - DNA, 107 bp, Homo sapiens
aacgtggaaactgatgtggccactgaaagaaattcaagactactgaaacaagtgcatgatttcacattttcagactcgtgtttacttatgaacaataacattgcaga

SEQ ID NO: 618927 - DNA, 519 bp, Homo sapiens
ttactacactgggcccagtctgcggagggtggcaccccagaaagtgccttgtgtatcagaggcgagtagatggagggcaggagtgggggaaaaggagacatggagaaggctgtgggcgagaagaaggccagggtctgtggaaagtagaaggaatagcgggaaagcatccagtccgggactcagattcgaatccgggcttggctacatacgtaccggggtgaggctcttaaagcctcagtgacctcatcggtgaagggggggggagaggggacgggacatttacagcccttttctccctccctggcccacaagtacggtgccccagcagtggcacccgggtcagccccggccagctcgggagcggtcatcatctctccctcttatgcctcttcaggggagggtggccaggctccccgggaccttgtctaccggccggcagcccgggagctcctagacgcccctgaacacttccgtgtgcggcaggggggccacaacccactgggcaactcctctctgagc

SEQ ID NO: 618928 - DNA, 209 bp, Homo sapiens
catacccactcccactccaggagtatgggtatcattctagaagtgtctgtcactacataagcattttcattcaaacacacacacacacacacacacacacacacacacacacacacacagacacacagacacatacgcttacgcgtacacacctatactcgtacacacacacacacacacacacgcgcctggagtggtatctagaatag

SEQ ID NO: 618929 - DNA, 107 bp, Homo sapiens
tgtgaacccccagtaaacctgaaggtgtttgagggaaaaactgctattttttgaatgaaacgtgccctcctattgatgtattaaaatgtttaaaataaaggtcatgt

SEQ ID NO: 618930 - DNA, 238 bp, Homo sapiens
aagtctggcttcttctcctcttggtcctcctgcccacagacgcctcagtctctggaagggaaccactggaagggctgtgttcttctgagctaccatgaatgagacagtgactgtgaggtgcgttcctttgagagtctgttccgaaggggaccagggagcacgtctttcactgagcctgtgaggcggatgtgagtactccactgtgtacgccttcgctgtcccagtttggggtatctgc

SEQ ID NO: 618931 - DNA, 901 bp, Homo sapiens
gacgcgtgggtcgcccacgcgtcgcgatcagtgggtgaccgcggcttgcgaagggactgtgtcatccgtcctccaggatctggggagaagggagccccatcccttctctctctgccaccatattcggacagcctgtaggaactcgtgtgggatcgcactgagcttcaaggaaggacgcgaacccttctctgaccccagtcgggcgtcacctgttttgccgcgtgacccttctctcatgaccctgcggtgcttgagccctccggaatggcggggaagggacgcggacccagtgggggaccgcggggtctgtggaggagccatcccccgcaaggcggcgctgtctggctgagggcccctgcggggagctcggtcagacaggagtggtactggggaagtcatgcacgtgtaaatgatggccaaggagaatttaaaagaggccccagaatggaagcttcttgatcagagatagctcgcattcaggactacctactaacaatatctgtgaagccacatcagctggacctaactaatcttacgaattcgaattaccaaagagggaaaatttcagatggacctctatcatatgtgtcaaatcccacgcttgaaccaattggagcaggtgtggtttccatcatgatcgaggtactagtgttcagatgtgcagaggataaccggacgggtccagaaagcccccggaacggcacggggtccccctttatgtgaccaaagcggtcgtaacttcagcccacatctctgccgcaatctctgtgggctcaccattaaccagtgttccggtggccatcttggggactgccttacccaaggacagactagaagattcttgggagcatattcagttccaggtaataatgttcacattgttaaactgtcctcacataaa

SEQ ID NO: 618932 - DNA, 152 bp, Homo sapiens
catcatcaagttcgctgaccactgagtctgccatgaagaagatgaagacacaacacacttgtgttcattgtggatgtaaagccaaacaagcaccagattaacaggctgtgaagaagctgtatgacattgatgtggccattcatacgcctccg

SEQ ID NO: 618933 - DNA, 89 bp, Homo sapiens
  misc_feature (46)..(46): n is a, c, g, or t
tttcaacaagatttgaaccctccctgtgtgcacgtgcgcgcgtggnaatgcttttccccatctttagggtgagaccggactaaaaaaaa

SEQ ID NO: 618934 - DNA, 423 bp, Homo sapiens
acagagcgatggctgttctggaggcctggctccggggccgacccgaggccacagtgtctacggagcagaccggacttgagtgaccggctgcggtctccacgagggatggaagggtctaagacagtacaacatcagcgccatgcaggtgagctccgtgtgccagcgctgcagtcaggccctgaaactggacacgagtttgaagatcctggaccgtgtgaccatccatgaactcacagctccattacttaccacaggccacgcgaaaccaggagagacccaacaggacgagactaactcatgagaggagccatttattgaaactactggccaggatggtgtctctcgcagattcatcctcacagccaggatgatgtccacaggtgcccagcttgactctgattggggaggcatctgtggcggccc

SEQ ID NO: 618935 - DNA, 505 bp, Homo sapiens
tgcatgagggtgtatacttgtaatcccaggtctgagggaagccaagacagaagaggatttattctcaggcaacccagtgagatcctgacacctgcaagccaaaaaaaaaaagaaagaaagaaagaaagagaagggctgtggacgtggctctggtgctcccttgcctccgtaaggctctgggtgcactgttctagcacccagcacaaggcctgacacctgagctcaatctgtgcaaaccatgggagagagggagaaaacagcccgtgttggctgtccgctgagctccccaagggtagcactcatacatacctgcatgcatgcataaagacacacatgcacttataaaagtatcttaaaagaacatggttgaacttaaaaaaagattattattgggaaccaacaagacggcttagtgggcaaatgctctggctttgaagccggatgacctgaacttaatcctttgactaacaggatggatagagggagagaaatgactttcacacag

SEQ ID NO: 618936 - DNA, 1190 bp, Homo sapiens
ttcaaccccgacacgcctattggccaacaatgaagtgggataacctgtatactttcaccattctatcttactctattagtctcggactctcattccaagaggagctgctgcttctccgttctgaagacaatgcaacacaacagacgctgacgcgcttgactcaaatcagagctttaacacagatttatcgtgcaacgacacggacacacacttctcacacaaagacccccattggggactcagctacgacctctggccatttctaggcgcttccagaacaatcgttatcactggccaacgactgagtcccaaatatatcgcccaccgaattcacactgcgtcccccacgcttctaagagtggcaaattggcacacgctacaacgattgcgacaattctctagaccacacacacgccccaattgcgtccatacctgccctgtcacctcgcacgaatcaacacactctgcacacacacactctggattgacaaaccacaccacatccccacccgtataccaacataccgccccccttgaaccaacccatggtgtaaccgcaaccctacaccaactcttccaccttaggcccacgcccaccgtacagtcagaccaacaaaacacttacgtatttcccggagcattcgaacccacaaccccccattaaacttgggcgctagcccaccaaaagttgggcgcgcgctcgacacccctcggtcaacttggtattgtcaaaccacgagaacaagcaaaggccaaccagcacccatatgagcccgccacgcgcaccaacagttggcaaccacttgggtccattatacccctcagcgcgcgaaccacaaacacaaacacaacgcaacatttgcatccccaaaccgcccccgaacacaaccaccgcgtatcacccaccacccgggacacaatcggggacctggtgcaagagaaatcccatacaagtaacgtcgacaattatgagcaactatgagtctgcgaccccacagacttagcccaaccccctctgcgacactcattatccacccccagttcgggacaccccacaacatcgaccacacactcacgcgcacccccacactcctcaccagcctgggacccaccacaacacactagcatatccacccatctctcacgataactctggaacaacaacaaatataaaggtcccccacaaccca

SEQ ID NO: 618937 - DNA, 360 bp, Homo sapiens
tgatcactcctcccatgcagctcatcccctccatcaaacgtactgagcaccccggaaattactggccccatgtcgtctctctctcctttaccaagacagctgctgaggctgctgctatgacaggtctacctgcccctctctggcctctgtctagctttaacacataatgtgcctaccccaggtagtcagtatctggccccctcccatctcttagccaagcagagcagctatgcaagaaagcacaatccacagactggtcctgtactctaggagcttaagcctcattgagcatgcataacctcaactcaagacataagggccctgctctgtaataaccaggaggccgcaggttgagtgcct

SEQ ID NO: 618938 - DNA, 1241 bp, Homo sapiens
aataggaggtcaagagccagggaatgcccgagccagatcctgtcctggatctctgttatatagcctatcttcctgaccatgctgtagaacataggcgatattagcatatctgtgaaatgtaactcaatttgagttgcgcagggtcggtataaatataatatatatactatctggtattactagaatttatggtagggtatttgagggtagtgtagtagtagtagttttgtagtagtcgtgctggttgctgatgctgctagatgtgcatgatgatagatagataacgcagggatgccaactagttgcgccatgctgtctgtatgaaggttatcaatgctatcatacccggtgtcgtcattcgtacatcatcctgtgtgtcggacttaatacctacacatcctttgggtgggggcgccaagcggtagggggctataacaatcgaaacgacgccttgtataggccgagaggagcgtagacatccacacagtggagtcgtggcagcacacatactcaatgccgcccaacaccacaccatgaagagggaggttttatcactccattgacaggatctgtcaccaaatataactcgtcggtacaaattcaccaaaattttggtgggcgaccagatatcatagatagactagggttaccttaccggacggccagcaggcgaacatatcaactacccgtaggagctggaccaaccttagctgcacaccgacacttccttacgccataatccacaccgtatggcacacgcaaatatgaacagagctgcggccagcggctctggctagggcaacacgattttaccagtaccccaaccaaactaaactacaaccgttgtgcgggacacatgtatcgggctaggacagggcgtcccatcccaataataccaacaccgtcctattacgtttcacacaccagagcacggctttacatttagcgagtgccgaccaccacttcacgatgggggatcgacacacatcccgccctaactatacgagcgcggaggatcgctacatgtaagagtggcgcgctgcctttgtaaagctaatcttgtccaaacgaaccccgctgtagcatcttgtcgttactacacacagaagcagcagcctgaatagacttagtcatttgcactcaggcagccctaacgattgggtacacataaccacacacgtcagtgcggcatgacgcggactcgcccacgtgagtacaacacacagacagctgtcttcgtc

SEQ ID NO: 618939 - DNA, 434 bp, Homo sapiens
tggacagcaacacaaaaacagcccaatacacctaacgaattcccagccctccatgaagattctctaactacaagatcagctttcctggatcctccctggtggccctctacccagcccttataacacagactaagagaggcgtctgcagcctccagttttatctcacacctggtctttgcatgagcatgtttcagtaacacatgtgggcacacacacaggtagtgagtagccacgcagtagttagttcagaaaacggtcttattgtagagggaaatagagggaaaattctttgatataataatattcatctcagaagttatggctctcctatcaaaatccaaagctgccagcacaactgaacctaccacagcggtggcagaaagaaggctcttggcactgtagacctatttggcagaatgtacactggctgaaag

SEQ ID NO: 618940 - DNA, 846 bp, Homo sapiens
  misc_feature (93)..(93): n is a, c, g, or t
  misc_feature (133)..(134): n is a, c, g, or t
  misc_feature (170)..(170): n is a, c, g, or t
  misc_feature (199)..(199): n is a, c, g, or t
  misc_feature (229)..(229): n is a, c, g, or t
  misc_feature (237)..(237): n is a, c, g, or t
  misc_feature (275)..(275): n is a, c, g, or t
  misc_feature (286)..(286): n is a, c, g, or t
  misc_feature (309)..(310): n is a, c, g, or t
  misc_feature (338)..(338): n is a, c, g, or t
  misc_feature (452)..(453): n is a, c, g, or t
  misc_feature (459)..(459): n is a, c, g, or t
  misc_feature (501)..(501): n is a, c, g, or t
  misc_feature (536)..(536): n is a, c, g, or t
  misc_feature (567)..(568): n is a, c, g, or t
  misc_feature (599)..(599): n is a, c, g, or t
  misc_feature (675)..(675): n is a, c, g, or t
  misc_feature (687)..(687): n is a, c, g, or t
  misc_feature (697)..(697): n is a, c, g, or t
  misc_feature (710)..(710): n is a, c, g, or t
  misc_feature (713)..(713): n is a, c, g, or t
  misc_feature (715)..(715): n is a, c, g, or t
  misc_feature (752)..(752): n is a, c, g, or t
  misc_feature (768)..(768): n is a, c, g, or t
  misc_feature (771)..(771): n is a, c, g, or t
  misc_feature (795)..(795): n is a, c, g, or t
  misc_feature (803)..(803): n is a, c, g, or t
  misc_feature (806)..(806): n is a, c, g, or t
  misc_feature (828)..(828): n is a, c, g, or t
  misc_feature (831)..(831): n is a, c, g, or t
  misc_feature (834)..(834): n is a, c, g, or t
ggcggacgtcacgtcactgccatcgctgtcttcatccggcctgtcgccatccaccaactgcactcaggatcagcttgctaaagcccagcagcngaaggagaagcagccaatcagaaaagaactgggaggcaanncaacaggagagtgtggtgctgggaggatgagacagnatgagaaagccaaggacctggcatttcanaagagggattgtcttctaattgcttgaaancgcagttngccactcaccacacgttttatttaaatttaaattttanttaattgttancatttaaattctatgtagagacnngggtcttgctgtgctgcccaggcttcancagaaccacgagaatatcaggcggtgactctgatcctgtgattcattatgacattggcccagaggcaccctcgttaaactcaaagctgattgagtttaggaaactcaggggttnnctttanagctgtatgccggaaagttttcaggtgtgctggatctggaancccaagtcgctgagggagtattctatacacaggtntcttgaattcagtgtccactctggagatttnnccactgctggcgtggctcaggagccctgtanaagagtcctgtgagcttctgctttatcgcatctggcagtctctccgccttctagagccctcatggtggtcctgtcnaatatcctaatngatgcgctgntccgccttctggnctncntgaccttgttttagaaggtgagaagcccagatgtganttctaaatgtgttttnatncccatgtgttcctgatagaaaacntaacaganttnaacactaagacatttaaatggnggngtngagtataccaag

SEQ ID NO: 618941 - DNA, 95 bp, Homo sapiens
ggggaaaattttaaatttagggggttttttttttttaaaaaaaaaaccccatggttataaaaaaaaaaagaataaataggttcggttggccctga

SEQ ID NO: 618942 - DNA, 297 bp, Homo sapiens
  misc_feature (24)..(24): n is a, c, g, or t
ccccccccttccggggtgggtccncgggggtccttttttcttttttgccagctccccgtgggccaaggcgggggggccccgggggaggttttttttttttcccttttggtttggggttttgccccccccttccccccggagggcctttcccctttcccgggttttttggtggggcgggcgggcggcccccccttcccggggtttttcggttgccccgggatttttgggccggtccccgttttttttttttcccgggcccccgggtgggattttagcccccccccctgccctggggga

SEQ ID NO: 618943 - DNA, 154 bp, Homo sapiens
  misc_feature (3)..(3): n is a, c, g, or t
ttntattgtggtgttaccgtatagtagaatatacggctgtgattagtactgatcagacaaacaggggtgtttggtattgagacattgcgggaggttttatgttaataattgtggtaatgaaattaatagcccctaggattgatgatacacctgc

SEQ ID NO: 618944 - DNA, 166 bp, Homo sapiens
ggatccctcgacggacgcattcagtttcacctccaaagtatgacgtgtcctgcacaaattctcccaggatttttcccacggaacaggtgacgtgtctgatgttggctagggaagggacggtactacagtgtaaattgtgcccacttcagggatggcactacaaaga

SEQ ID NO: 618945 - DNA, 831 bp, Homo sapiens
gtttccttgcttggaaagctattgaagattgctatgtattaccactgcaaagtggtatgcatacgggtgaagaacaaggggagtagccaggctgggatggctcaaatagtaaatgaatgaggaatcctgttatgaagtatctagatcgatgatgttatgatattaagatgatgtaactatagcgaattaatgtaaaagggagagagatgtctgatagtgatcttatgtagagaggtacttgagaccgctctcttgattggcataaagttgctaaggcttatagtattcgccctcccttgaggtcgtatagtccaaggtgttttaacatgccaccgggttgtgccttattcgttccacttctaaattgtatcgtatcgattccactcgaagtactagtacttggtgagtgtgatagccaatcacaccagaatactcgagagaagagctgagagcatgtgttgagtcgcttgagacccagtgaggaaggattggtgcagccgagtctatttgagctccgaggcgctgcgcccaaatcgagaggtagcgaaaactctgttcttccaacgaggtgatcacccagagaggggaaagcgcgacggtaaagcgaagaagtgggtcgtagggaatcccccacatcgtttgtaaacaaaactccctcgctgcgtgggacaagacagagtggttctttgaaactagtatgccatccttgggactgcgtggaatgaacacttgacggcggagctctggtctcaacgggggagccccgcgacactcccgccaatttagaatttatcgccgtcgttgggggaaattctaattggtggttccaaa

SEQ ID NO: 618946 - DNA, 298 bp, Homo sapiens
cgatgtgccagggatgcatttttacagactcggtccacgctaccattctgggggcccacagtagaggtcacaagagaagcacctgcctcctgtctgtcacacacgcaactgcgctaggatgtgctgctggtgacccccaaggttcgccacatcagtatgtggtggccgtgttggcggcgccagtctcttgggtctcacagggtgggtatggagcacaccaaggtgacagtgccatgctgcacatcatcctgccctgagtcggcgatggtaactgtggcggtggtcttgtctgtagtcg

SEQ ID NO: 618947 - DNA, 591 bp, Homo sapiens
aaacctgatgttgccaagataaaatatttaaagaaatcaagcaaattaaaatgcaagaaggtaaattctaatctaaatcatgctcctttctgaattctacatcagctggattttcttttttttctttaaaaaagagtctctctctgttgcccagggtggagtgcagtggtctgatctcagctcaatggaacctctggctcctgagttcacgcgattctcctggctcagcctctcaagtagctgggactacaggcatgctaccatacccggctaatttttatatattttttagcagagacggggtttcactatgttggtcaggctggtcttgaactcctggccttgtgatccggccaccttaacctcccaaagtgctgggattacagggattagccatcacgcctaacctaacagactggactttcttcgtggctttcagtagcatcacaatccttaggcccccaaacacaatcattttctactaattgtgaattaccgaaagaacagcttactcctttctctaagaaaccgtaccccgagcttagacctttggttctacctctgggtatcaaactgtgactcctcctattt

SEQ ID NO: 618948 - DNA, 405 bp, Homo sapiens
gttgtgttttgtgataaggtgtttcttctgtcaccgtcgctggttttatttgtgcatcatggctcactgcatgcctcaatgtccaagctctatcgatcctctcaccttagcctctctcgcagctgggaccacagctgcatgccaccatgcctggctaattttgggtactatgtgtagagacagggttttgctatgttgctcaagctggtctcgaactcctggactcaactgatcctcttgccttggtgtcccaaagcgctgggattataggcgtgaaccactgtgcctggcctttcatacattaagtgaggtttggggcagggcacagtggctcatgcctgtaatctcagcgccttgggaggccaaggcaggaggatcgtttgaggtcaggagttcgagacctgc

SEQ ID NO: 618949 - DNA, 936 bp, Homo sapiens
  misc_feature (355)..(355): n is a, c, g, or t
  misc_feature (419)..(419): n is a, c, g, or t
gcggaaaacttaggctaggtacgaggctgggtggtgcgtacttcgacacctacgacgatcgggcctacagcagtccttcgtgcggcggcagagggtcccgcgtcagtgctggtgagccatggttcccgtagccatggaaggagttgcccatcagagcccccctacacagcatacgtacggacatctacctttcaatagcggttgcagggcgcacatagatgctatctttaaggagtctcacgcgataagggagtggtacggcatagatcagcacggacgaacagacagcagaataaactctataaaaggacttcgtgcgtatgtaatcaaatctcgaatgaaaggtaggacttcncctgttagagtgaacgccgttggacattacgaatggatcgcactagtgtaggcgcgactcgggntcgacctctccgtgggtgagactacttgccaggacatggcgagcaacacatacgaacgcagttaaacggtgggctttcgcggcacttccagtaaccagaaggtcggcaccacgattgaccacggaagcgaatgggtaagcgtctcgcacgaaatctcagcaggtgggatcgggaattccccggggatgacttcaattctggcttcagggaatgacttcttagggtggcagcgggagtgtagtcgcccagagcgagccgtgcgacacaggtgccccccccatggagcatgccgcttcaggagattggccgctccgcctccggtggagtcccacatggatttcaggagaaaccccgcaggaaggaggaacgcagcacagagagacacgactcccggcttaaaagcttcgaacagttgacgaaggcccctcaatccatgtaggccactcccacgtcgggatcttccggggaggccggcaccaaaaaaaggtccttcaaaggacaaaaacccgcgaggggg

SEQ ID NO: 618950 - DNA, 1410 bp, Homo sapiens
tcctaaaaaaaaatgtgaaataagggattcctaaatgaaaaaaaaaaaaaaaaaaaaaaaaaaaaaaaaaaaaaaaaaaaaaaaaaaaaaaagagagggggcgcgcacacaaaaaatccccgcgcagggcgccaccacaacgagcgcgacgccaacgaagcaatatcagtggcagacaacagtgaggccccacacaagagagagaggcacataactatacaacgccgcccgcgcgagcgccgcgcgcccgacgccacctaaataacaaacagcggacaaagagagaggaggaaaaatacgaagcgaaaccacgccggacacaccacacaggacacgaaaagaaacacaacaaaaaacagagagagaggagagcgacgacacaaaccacacggcgcgcgcacccacaaccaacacccacccacacacgacgaatataaacgacgacaacacgacagaggggacaaacaacaaaccacaaccaaaagagaacagcgatccataagtgcggggcacaccaacaaaccacacgaagcaaatgccccacgcacagcagcaggaaaaaaaacagcccgcaccccacgcagacgtacatatccatctactaaacccgcacaccatcatttttatatataagaggagagagagcgcactacgtcaccataaaaaaacgacgcacacacaaagacaagaacgagaacaaaaacgacagaacaaccaacagagcaaacagcaaacagacacaagcaacagaacagccagaaaacacacaccaaacccacacaacgaaaaaaagaaaatgaagaagacaagagagaaccagagcagccacaaggaaaagacaaacagaagagagcaaaaacagccgaaaaaacagcagaaagaaagacaacacaaggaaaaacaacacacgagacgcgaagcaaaaggaagaatacaaaaaaagacaaccggcaagcaagacagacacgcaagagaagagcagggggagcgaaagaagagaaggcaagaggaaacaacaaaaacaaggagaaagaggaccgcaagaccgaaagaggccaagagcagacagacagacgaagaaaagaaaccacaaagaacagggagcgagggaaaaaaccgagcaaaaagaagaacaaagagagagagaaggaacaggagagaaaggaggacaaacacaaaaaggaaccgcaactgcgacaaaagagccgaatacaaccatcaccaggacaaacagagccaagcgaacgaagtcaaagcaaagacaggggcaaggacaacacgccgacaggaggaacaaaggaagtaagaaaggagccgaagacgaccgagaaagaaccgaggaggaggacgaggccacgaagcgctagcaggagggcgaacgtagcagaggcgacacgacggaggaccgtc

SEQ ID NO: 618951 - DNA, 225 bp, Homo sapiens
gggggggaaaaaaaaaaggggttttccctgggccctccccccccccctttttttaagggccccccctttttttttttgggggtgcccccccccttttggggggaggggggggggggggggggccttccccggctttttttttctttttggggggggggggggggggggggccccccccccccccccccccccccttttttttttttttaagggggggggggttta

SEQ ID NO: 618952 - DNA, 329 bp, Homo sapiens
ttttttttttttgggagtaagatcagagagaaatttctcctctgggtcctgatgatattacctgatataatggatagtacttgatatggcagacactgtcctcaagagtgtccatacaatcaatgcaacattttattgcttacagcatatgccaatttgagccaagggcacactaccaaagttcaattaagaaaaaacaattatgtaaaggaacaaagtactactgtgcaagtacacaattgtctgacattctgacttaatccagagatgaaatccaaaatatctgcagccataattcttaaaaactatatgtatgtcagaattttatc

SEQ ID NO: 618953 - DNA, 408 bp, Homo sapiens
  misc_feature (10)..(10): n is a, c, g, or t
gctggtgacntacaggatccgcacaggtcacaggattctcctttcttctgaaggtttacgatgcattgttatcagttaaccacgtcttgttactactagatcgtacatggtcaattgaaacaaaccgttctgagaccgttcttccaccactgattacgagtggggtggccggtcttagggatcctattcatctagccttctgagctttctgggcacgacttggtgatcttgccacgctccacgcagccttcttgttccacctgctttgactggccccccgcacctgtctgtctcatactcacgaccacgcacacgcgaccccacggtggatagtctgcgacgctctcaacctccctgggcttgccaggacccactatacacactggcagcatctcccgaccttcaaga

SEQ ID NO: 618954 - DNA, 275 bp, Homo sapiens
  misc_feature (246)..(246): n is a, c, g, or t
  misc_feature (250)..(250): n is a, c, g, or t
ggccaggcgccggtggttcacgcctataatcccaccactttgggaggccgaggcaggcggatcacaagatcaagataccgagaccatcctggccaacatggtgaaatctcgtctctactaaaaatacaaaaattagctggacgtggtgcatgcgcctgtagtcccagctactcagggggctgaggcagcagagtcgcttgaactcacgaggcggaggttgcagtgatgtgtcacgccactgtactncacngtgacggcagagcgagactccatct

SEQ ID NO: 618955 - DNA, 745 bp, Homo sapiens
tggaaaaaggtcagggaggccagggggtgggcttgaaaccagcttgggggggtatcgatcccttcctttttggtgctaaattttatggtatacgggttcttcgaatgtgtggtaggggggggggctatccatatagtcaccccaggttaatgggaggggttcttctactaattaggacttttcggcttcgaacgcaggaagggcttctcaaatcatggaaaatttattaatattactggcgtggttagaagaaatgagaatggacgcctacagatagataggatggttccatggtgggtgggtatggcatcgggggtagcccgagtaaacgtcggggctatcccgggataaggccgaaaaaggtgtcggggggaagcaaagttagatttacgccgatgaatatgatcagggcaaagggatttgggcgtaaggttgggtctaagggggtacgccggagaataggggaaaccagtgaatgaagccccctatgagggcaaatacagcccctaatggatgggacactaggggaagtggagctacaagcgtagctacgtcgtcgcggtaccaacgaaggctctaagggagagagtcggctaaatacaaggccagtcagggccacctacgggtggaacacgaaagatgaatcctaaggggccaaagcatggcgaagactcattcaaattcggcccggggagtgagagagacagcaaaactagagccgggggaaacggaaaaaggaccggga

SEQ ID NO: 618956 - DNA, 120 bp, Homo sapiens
tcatcgagctcggccccactttatatccaccattcaaatactcctttgtgtagttctttgtactaaaaataaaatatcccttgcttgcacaaggccttgttgcagcaagggatatttagt

SEQ ID NO: 618957 - DNA, 688 bp, Homo sapiens
  misc_feature (23)..(23): n is a, c, g, or t
  misc_feature (145)..(145): n is a, c, g, or t
  misc_feature (192)..(192): n is a, c, g, or t
  misc_feature (227)..(227): n is a, c, g, or t
  misc_feature (239)..(239): n is a, c, g, or t
  misc_feature (243)..(243): n is a, c, g, or t
  misc_feature (248)..(248): n is a, c, g, or t
  misc_feature (253)..(254): n is a, c, g, or t
  misc_feature (258)..(259): n is a, c, g, or t
  misc_feature (261)..(261): n is a, c, g, or t
  misc_feature (290)..(290): n is a, c, g, or t
  misc_feature (302)..(302): n is a, c, g, or t
  misc_feature (307)..(307): n is a, c, g, or t
  misc_feature (311)..(311): n is a, c, g, or t
  misc_feature (343)..(343): n is a, c, g, or t
  misc_feature (345)..(346): n is a, c, g, or t
  misc_feature (350)..(350): n is a, c, g, or t
  misc_feature (405)..(405): n is a, c, g, or t
  misc_feature (433)..(433): n is a, c, g, or t
  misc_feature (468)..(468): n is a, c, g, or t
  misc_feature (472)..(472): n is a, c, g, or t
  misc_feature (684)..(684): n is a, c, g, or t
agttaaattagcatatctcggtngtgaaggttgacttttaataaagcaaaataatgagttaggtgaatcaacagaaagagtgaaaagtgttaacagtgacatttaaatggttacatgattttaattattcttttgataataagcnaccttgtgatatctattcaagaaaagccagagcccactatggaattngcagttgaataagagctttgttccctgcttttggnaatgttaaaganacanatggnaatgnnttanngnccttataccactcccccacctagcaaaanactctaaaaggngaggngggnagcattagaaagagagtgagaagggaaatggnanngggngtcacacgcagcattgggtttatttgggagagagggcaagagagaatgaggtgtnggtgagagaaggtgctggtaggtcagcngatgccaatcccttccttatctgttcttggctgcnaggngtttccggctgatctttttcgatttgtcattattcttcttcggtggttctgggttggcctgcatgtgtctgcgcgtagaggtatttgtatgtctcagaacggatatactcaaaaacatgggacacgccaagctggaactggtctgcaatgggggtcacccagggattgttctctgctttgaatacctgcttctggccagttaaatccaagtntcct

SEQ ID NO: 618958 - DNA, 771 bp, Homo sapiens
  misc_feature (771)..(771): n is a, c, g, or t
ctgaacactgtcggggccccggcgacaccagtgacccactgcagacagatctgcaagatcctcaatgcgcacatggactcactgcagtggatcgaccagaactcggccctgctgcagaggaaggtggatggaggtgaccaaggtgtgcgagggccgtgagcaaggagcaggagcgcagcttcctggatcacctttgactgagcgacagcagccctggggcccgcaggtccctaggtgagttcatgaggggaatgcgccctgattgtctgtagtaaggggtttgtggcaagatacttgttgtatacttacttatctattcacatgacatgcccttgaccatgatcgcatgtgtgctattgcagtaaatccatttaggagggtattctgggccttctgcccaggcagcagcctcatgggtgatggcttcatgtggctttcattttgagtatctttggcacccttttcacctactgacgaccaacgcacatcatcctggctcagacctggtgatggagaaggtgctgatggtcttggaacccaggccagggtcaatggttggcggacactcatctccacagcatagtacataggtgtcatgaaaaagtaccaaaatgtaagagcaaccgtccaagtcaggggcgcagtaggctcacgcctgtaatctcagaacttagggtgcacaaggcggacacgatgactatgaggtcaggagatacagagaccaggctaggccaacatggtgaaacaccggctctctaaaacatacacagn

SEQ ID NO: 618959 - DNA, 131 bp, Homo sapiens
  misc_feature (26)..(26): n is a, c, g, or t
  misc_feature (86)..(86): n is a, c, g, or t
tacaacgggaagtaaaatctgtcganatgcaccatgaagctttgaatgaaactcttcctgaggacaatgtgggctacaatgtcaanaaatgtgtctgtcaaggatgttcgtcgtggcaacgttgctggtga

SEQ ID NO: 618960 - DNA, 166 bp, Homo sapiens
atccccccccccaaaaattttttggccttaaacccagggggggtttgggtttttggaccccgtttttaaaaccccgggggcccccccccagggaaaaaaaaaattggggtttttttccccccccttttcccccggggtttggggaaaaaaaaggccccctttggga

SEQ ID NO: 618961 - DNA, 212 bp, Homo sapiens
  misc_feature (158)..(158): n is a, c, g, or t
  misc_feature (168)..(168): n is a, c, g, or t
aggtcctgggccttgatgggctctgagctcgtgctgtttgtgctacttgaccctccaagtgtagcactgatgattagacaatgactagtaccatgctcatctctattcattttttggcatggatatattcaccattgatgtaatcacttattattatngtcactgtgnttctcctccatatcattaattctgatgggcaggactttgttcaa

SEQ ID NO: 618962 - DNA, 115 bp, Homo sapiens
gtccattcttgcatgggggacctggaagagcggacctatatgcttatgcaagctgtgcagtgcatccacagcactcactcctttgtgtcccatcagaattctcttaaaatcactc

SEQ ID NO: 618963 - DNA, 285 bp, Homo sapiens
  misc_feature (14)..(14): n is a, c, g, or t
acccggtctctcgntactctgtctctctctgttctctgtctctctctgttttctgtctctgttctccgtatctctctgtcctttctctgtctctcccctgggcctgggcccctccaccccttcaccccacgtgctgctcatctctgtctctcttgtccttttccgggccctggcctcttccccagctcagcctgcaggaggcccgtctcctgcacccctccccgtcctccatcctttctggtcccccatctcctccagctctctgcatcctccatctgctggtcc

SEQ ID NO: 618964 - DNA, 202 bp, Homo sapiens
ataccctgtgtcgatgacagcgaactcatcgtctcttataggctgaactggtattccatttcgtatatgtactatattttctttattcattcatctctagatggatacttaggtcgattccaaatttgggctatggtgagtagtgctgaaataaacatggagtgcagatatctctctgatatactatgtcctttctttgggt

SEQ ID NO: 618965 - DNA, 208 bp, Homo sapiens
ctgctccacttggtgccaggagtcgagaccagcctgggcacgtggggatataccgtctctgcaaaaatttagaaaggtgggtcgggcatggtggcttgtccctgtggtctcggctgctggggaggctgaggtgggaggatcgcttgagcctgggaatctgaggcaacagtgggctataattgtgccactgaattctagcctgggtgac

SEQ ID NO: 618966 - DNA, 991 bp, Homo sapiens
gctccggtccaggcttgcttctgcaacaggcgtgtctcacgctctcgctcggtctttctgccgccatcttggttccgcgtaccctgtacgaaatgcccggcgaagccataggagaccggtcgccatgttgacagatgtcaggagtttgcccggaggcccaggcctgacgacaggggtctggtcaagacgcagatcgtgacagtgattgatagtcacggtaccagagtattgaagaaagaggattcctgcctcgaggcgaaacacaacgaagcaagcccggttggtgggagcaacatgaaattggatggatggaaccagtcgagttaagatgcaaaaagcagagtcggagtgatctagcaatgcccggagggctgatgtgtcgaaacctgtggttcttgcgactgggcttccctgtgacgtgactagacgtcacgaatccggacactccgaagaatttcctctaggtctatccaggaaggcatgagtgtctacgagaagaccctgaatggagatactttagttagtcctgggggggagagccacgatcgaagtaggttagttccgaggcacagtactggatagacaagtgctgggaaactcaggggtccaggtgaagcgcctgtcggtcggacattgctggataatcctggactccagctgtacactgagcgagacgtgcagacggccagtaaggtcgtgtgcaatgctgtgtcacaacgtctaggacttgcactgggtcatgtctaagcacatgtgtccagagcaggaggtccgaagccttgaaaacacgtatgatctggaacgcgctctggatacacaggtccttgtggaccagcttctgggggtccaaagcgctgcgctgttgaactgtccggtccacgcacacgttggttgttggacgcgaacacaaaattgcgggggcaaaaataaacgggggcgcgcaaaaagatgtcaagccgaaggccacaaacggggggcacgtagatgtcga

SEQ ID NO: 618967 - DNA, 1380 bp, Homo sapiens
  misc_feature (1380)..(1380): n is a, c, g, or t
ctaaaaagcaaagacctgcaggccatgtggtcatgtctcaaaatcttattcatgttgcagatactgaggccttacataagggtttgacataccgtcgagattttgcgtgcacttcagttgttgggcactctcattgatgggagtcatccacttctcgtggtatacacaagatttacgaacatatataagttgttctgagttgtgaaccctagacacacgcagtcgtctacctggagtactatatcgagagaatccttgcaatcacaaacagtccagcccatcgtaggtgattcttagatcatgcgtagtagcacagcatgcaagcatttcaagtagcaccttctcatattacaccgtgtacctgtgcgccgttacccttcaccggcaatacatcgtcgtggtatagtcagtgcttgttaggtctgatcagttcagcacattcactgggaaccactacctgctcgtaaatacagatactcgatcgtcgttcacagcatccatctggtcgttcagtgcgcttgtgaattgtgtacatgttccaatacgtttaacttcgtgtatgtcctgtgaagcggtcatacgcaaccacacacattcacaatttcgaaacaccaaaacctggcgggttccaacccaagaggtagcgcgcgcgcacacggggggcacacggggcagcagcaacatcaattcgtctgggggcgtttataaccatcgtctctgccttaagaggcgagtacaaaactattgcgctagataacaaaattctaccgagggcaactaaacgctcaggcctaatacaagcgcgcgggtgaacacagcagagtatcacagagaagactctaccctagcaggcattttacacaggcggccccttataaacatatgagcgcttctaggtcgccaccctttggcaaccacagtcaaaacgatttaccgtattttggaaacccaagcacggcccagttcacttcgggcgtagtggggttattaaactcttacagcggcttcaaaccctctcaacaaacggcttatctcggccaactttacacggcggaaatttggggtgacaaaacacattcggttccatccggacatgaacggataatttgtcccaaatattcgcccttagaaagggggtgatggagaaaccccacagaatattaagctccgatttatgagcgaacttgctacacaaccaggcggcccaaacacatgcgagactatccgtgcggggacaaggaagcccactcatatagactgcttccccatgtcgctgtgccattggattttaatatcaactgtagcccctgccaagctgtcatacatctccaggagaacacaatacacagctttgtcatcgtatccgcgagaaagacgcgn

SEQ ID NO: 618968 - DNA, 311 bp, Homo sapiens
  misc_feature (24)..(24): n is a, c, g, or t
ggggggttttcccccgggtaaaanggggcagggggggggaaaaatttttttgtcccccaccccctttttcccccgtggggaaaaggaaggggcaatataaaaagggctttttttggaaaaagcggggataaataaaccctgttgggcccccccggttttcccgggaattttggggggggggggggttttttttccccttttggggggggtggggacctttttttttctgttttggtcccggggccccgggaaatttccttttcccttttttgggaaattttttttgaaaaaaaaggggggggggttcccca

SEQ ID NO: 618969 - DNA, 233 bp, Homo sapiens
caaatcatcaacttatttataaggtaaatgatggggcttagcgtctataaactctggaagaagttctatgtgtacagtctaagacacttgtggattgattggctgggaaatcacattctccaataaggggcagccagggcctgcttaacagtgctgggagagggccgccagcataaggaccatcagcaacttcatggtgaggctgctgctatcgatgtagcaggcgtatgaag

SEQ ID NO: 618970 - DNA, 173 bp, Homo sapiens
acccccccccccccccccccaaatttttttggggggttttaggggggacccccgttccccccttgggaagggggggggtttttttttaaaacccccccttttttcccctgccccaaattgggggtaaccccatggctgtgcccccgggggggaatttaacttttttttttcca

SEQ ID NO: 618971 - DNA, 440 bp, Homo sapiens
ctgggctgtggacgacggggcgcttccacttcattgagggctttaatgccgagaacagcaatgtggatgcgctatgtgaatccagcacactctcgccgggagcaaaagctggttgcgtgtccgagacgggatgaacatctacttctacaccattaagcccatcccggccacacaggaacttcttgtgtggtatggtcgggactttgcagaaaggcttcactcaccttgatcccggagaggtgagaatgatgatgtctcagagaaacacagagccagtctatagcaaccgagcacggagaaacatgaactctgcccaaagaaggtcccaaagagagagtcgagtgtgcaagacatcctagacttggactccaacccctccaaaggcacggcactctaccgttctaacattccacccctcagatccgaaccggccctcgatg

SEQ ID NO: 618972 - DNA, 296 bp, Homo sapiens
cctgcagccactgtaggacaccggaggctcctcctctcagtgattggggatgggccgtcctgcgccgggaaccgcccaccttcgggatggtccgggcctgcccagagtctggtctaaacgcaggacctgcatgaattttcagtctgggaggtggggcaggaccacggagaagtctcgaagaagtggaggaagcactcactggcttccgcgggaaaagttcacccagcaactgtatcagctttacattagaccctcctttgctgcatggcaaaaagaaattaaattcccatttctta

SEQ ID NO: 618973 - DNA, 249 bp, Homo sapiens
  misc_feature (22)..(22): n is a, c, g, or t
  misc_feature (24)..(24): n is a, c, g, or t
  misc_feature (149)..(149): n is a, c, g, or t
gagacagggtcatcttgctctntngcccaggctggagtgcagtggtgcaatcatagctcactgtagccttgacattcccagcacaagcaatcctcccacttcagcctcccaagtagctgggaccagaggtgtgtgccaccatgcctggntaatttttttttaaatttgttttaaatataggtaatatagcgtctccctaaattccaaattccaaagtgttgggattacaggcatgagctaccacacctg

SEQ ID NO: 618974 - DNA, 349 bp, Homo sapiens
  misc_feature (2)..(2): n is a, c, g, or t
  misc_feature (4)..(4): n is a, c, g, or t
  misc_feature (98)..(98): n is a, c, g, or t
  misc_feature (275)..(275): n is a, c, g, or t
  misc_feature (299)..(299): n is a, c, g, or t
tncngcagcccggccttcaccatgagcgtcccggccttcatcgatatcagcgaggaagaccaggctgctgaacttcgagcttatctgaaatcaaaagnagctgagctctcagaagaaaactcggaaggtggacttcatgtagatttagctcagattattgaagcctgtgatgtgtgtctgaaggaagatgataaagatgttgaaagtgtgatgaacagtgtggtgtccctccctgttgatcctggaaccagacaagcaaagaagcattgaattgnaaagtctgtgtgaaaagctggtcnaagtttccgggaaaggccgaaccccaatctcctggagacttaaagttgct

SEQ ID NO: 618975 - DNA, 225 bp, Homo sapiens
aatacaaatataaaatatggaacaatgctaacagacgctgaattaatccagactagaaaggaagggtctcgaatgcaacaaggcaacagcactgccacacaccttagggggcaagcacttcactcaggcttaaccaaattcttcagcatcatgccaggcatgacagcaacaatggcagcgaggccaaacagtgccctgcacaaaggcttgcagcttcgcgtgcac

SEQ ID NO: 618976 - DNA, 504 bp, Homo sapiens
tctctctacactgtatcatctatcataattcgacgttgctactgactatctagagaaatcgctcgtcgctcttcctccaagcctacgtaccacatgtactagtaagcctctacctcacgctccctcaccatggaccatatgaaataagaaattataacaaaccctgagaaccaaaatgaacgaaaatctgtatcgcttcattcattgcccccactatcctagagcctacccgactcgaaatactgatcattctatttccccctctattgctccccacctccaaatatctcatcaacaaccgaataatcaccacaccaaaataagactaatcaaactaacctcaaatacaactgatagccatacacaacagtaaaggacaaagctaatcccttacagtattcctcatcacccaactaaaacatattaaacacaaactaccaactacctccctcaacaaagcccataaaaatacaaaactataacaaaccctgagaaccaaaatga

SEQ ID NO: 618977 - DNA, 118 bp, Homo sapiens
  misc_feature (110)..(110): n is a, c, g, or t
atgtgtggtgatctagaggatcgcgggagtgcatggtgatgaggaaggaagaggtatatttataattacttgattttaacttattttaacttttatttgatattacatcntattcatg

SEQ ID NO: 618978 - DNA, 115 bp, Homo sapiens
aggcaggagaactgcttgaacccaggaggcggaggttgtagtgagccgagttggcgcgtcagagtgagactccgtctcaaaaataaaataaaatcaaatataaattagctgggga

SEQ ID NO: 618979 - DNA, 241 bp, Homo sapiens
cgcttcggtaaaatgcattttattctttaagttcacgctaagatacaactttcaaggcatggtctgaaggactggattggccaaacatcagacctgatcttccaaggtagaccaacgtcctcggctacatcccagacctgctggttacagatgcacacagcgccgatgtgagccacatggctgcccagcacagatgcgtcctctcccccaacgagcctcacaaatgggccccatcaacgag

SEQ ID NO: 618980 - DNA, 232 bp, Homo sapiens
  misc_feature (15)..(15): n is a, c, g, or t
  misc_feature (44)..(44): n is a, c, g, or t
  misc_feature (69)..(69): n is a, c, g, or t
  misc_feature (75)..(75): n is a, c, g, or t
  misc_feature (104)..(104): n is a, c, g, or t
  misc_feature (110)..(110): n is a, c, g, or t
  misc_feature (134)..(134): n is a, c, g, or t
  misc_feature (189)..(189): n is a, c, g, or t
  misc_feature (216)..(216): n is a, c, g, or t
cccgtaatatgtacnatggcaaggaacagcaacaaagagggacnattctctgaaggtacaacagtaacnatctcnaaggaggaggaaacttgtccccacccccnacatcnataatcagatgatggatctggtcnaaatggaaaaaaaaaagaaagaggatgacgagaggaggaaaggaatctgtaaccnaagtaacagttcatgaaaaaaagaaanggacatttgctacata

SEQ ID NO: 618981 - DNA, 756 bp, Homo sapiens
ggactctaaactttggttatacctccagtggaaaataaggatttagaaaccaggtggaagagattcactatcaagactattgatatattttatgtaatgttagccactcgcatgttgaccaaccttgaggaaactgagtttatggtagaacacacatcttgtccattgtaagatccatctgaactgtcccacaatgtaatttggcaaagagctgcaagacagtcaaagaatatagccattgttgataggcactgtggtagactaaatgctattatgacttcagttcattcgattgttgtagcatttgcaacaattgttggtggagcttttaatgtacctaatcatcattttgattctgaatggtgtaattgaagtaggacattgattaattttctaaaagtctgcacgacagttgtgatgtacctttaggtgtcgagtgagttttcttttgtacatacgaccatttagtcttatcttgaaaacgcaaggatatggccgtcggtgtcgtgggagtttcaaggtgcccaataagtgcctattccagtcgcccttcacaatccgtataatggtcgtagttggggtgtcatagaatgggtcgcctagtgcactcagtgagccagattattacgcataatggaggttgctcttttgaactacccttaaccagtcattgggcttagtcagttgctcaataaaccgtccagtcgcaacgagaggcccgtaaaggaattggcttggacaccaaccgagtggatg

SEQ ID NO: 618982 - DNA, 115 bp, Homo sapiens
cggcacgagggccctttccacctccgcctccatgtgtgtgagatcaacctttttccgagcataaagctgcaagatctttaagcagatttcctgaatttcttcttcagttgctcca

SEQ ID NO: 618983 - DNA, 800 bp, Homo sapiens
acccgcgagacttgagtgggccacgtgagccacgggcacgggcgcgtaggcaacgcaccggaatgcaccccggcggtcgcggtaatgctggtgtgtcttgcatcaccaccggatcaacttcgacaaataccacccaggctactttgggaaagttggtatgaagcattacctactttatataggaagggtatcctaggtagccttcttgcccaaccttgtcataacgctctgaccaaagtagtggacgtttggtctagctgatacagaacgacgggtggaagtgctcgctaagacaccaagacggtggctggtcccagtcattgatgtggtgcgactcgggctacgtacataacgttctgggacaagggaaatgctcccaaaagcagcctgtcatgcgtgacacggccaaaagtggcttgcagtcgatgatagcagctgatggagaacgattgaatgagtgttgagcggggtgcctgatggtccctgagtagagcctctgcaagccatcgatgggaggggagtattcattaagattgcgtacactacgtatttacacaactaatacgaaaggatacagctattcagcacgccatagagaaacctcacggaccggagcgggaagtactccacgagagaataggcagagataggcgcaccggccgggaggagacgcactagcaaaccgccgtgcaccgggaatgcggatcctcttaaccacggagcacgagggtcccgaccgacagggctcacccggggccaagtgacccggggccaaagtacaccccacccgggcccaaacc

SEQ ID NO: 618984 - DNA, 111 bp, Homo sapiens
tctcaatggcagctaaacacttgagttcaccagcttctacatggtttagagcaggtggtgtgtgtgtgtgtgtagtcgagtatcgtctgtggtgtgttgtgcgctgctggt

SEQ ID NO: 618985 - DNA, 873 bp, Homo sapiens
attctagaggctgaggcgggcggatcatgaagtcaggagatcgagaccatcctggctaacatggtgaaaccccgtctctactaagaatacaaaaaaaaaaatattagccgggcatggtggcaggtgcctgtagtcccagctactggggaggctgaggcaggagaatcgctgtgaattggggaggcggaggttacagtgaacccacagtggcgccactgactccagctgggtgatagagtgagactctatctcaaaaaaaaaaaaaaggaaaggttttttagggaaccaaaattatttggattgatggaaaaggtttcccggggacttggtcacgaggtggtgtaataaatttccttgggtccagacaggtggtttagggaaactctcactcagggcctaaatggctggtcgcaggggctctggcaattggctaaagagggggggaagtgactggtcctggttcccaaggcagatctggctcctaggggggaaacccggacaggtgtccaggtccctccagatggggccctcagaaagagtaacgcctttaggttagtggtttaagaggtgtggttacaaggttggtgtggaagacttcatagggctgcaaaggtcagagatttcacaggttccaacccttttatatataagacttggattggttaaggagacggggtgtaaaggtagggctgggtgttccccttcaccgggggtggtctaaacccacgtgggtgggggggaatggtggaggatagggcttctttttaattaagcggaggtatggtgaagcagttcccaggaattagaatcttacttaaaaggcatttcattggaggggttgtggcgagaataaaaggaggggaaatagagggg

SEQ ID NO: 618986 - DNA, 254 bp, Homo sapiens
agagacatgatacgaatcgagctggtacccccgactagcccgacaggaagctgtctagtctctcctgtaaggccctgtctagtctctcctgtaagccctgtctagtctctcctgtaagccctgtctagtctctcctgtaagccctgtctagtctctcctggaagcccgtgtctagtctctcctgtaagccctgtctagtctctcctgtaagccctgtctagtctctccggtaagccctgtcgagctactcgggg

SEQ ID NO: 618987 - DNA, 551 bp, Homo sapiens
acacaaaggacgtatttgtggtgatggagtagctctgtatttggtttggtgggcttaaatatacatgtcacaaaattgcatagaaccacacacacagatagtcaaatcagtgcatgtaaaactggtggaatctgaatgtggtccgcgaatagtaccaatggcagtttcctggtttggatactgtgctacagttatgtaagatgtcaccactggaagaaactgggtgaagggtacatagaagctctctgcactattttcccaaatctacaattatttcaaaataaaaagttaaaatgacaccaccatagtagcaaagcatgaacaaatgcttcatgttaacagaaaaggtcagtttcagattaaaaaatttacatgtcagctgggcacagtggctcacgcctgtaatcccagcacttagggaggccaaggcaggcggatcacctgaggtcgggaattcaagactagcctgaccaacatggagaagccctgtctctaataacaaatacgaaaattagctgggcgtggtgccgctggctgtaatctcagctact

SEQ ID NO: 618988 - DNA, 105 bp, Homo sapiens
gtacgatggtgcaggtggggataagtgtggtttcgaagaagatataaaatattgattagttctgtggctgtgaactgttatatattcaggagactttgtagcgga

SEQ ID NO: 618989 - DNA, 132 bp, Homo sapiens
agagacatgatacgaatcgagctggtacccccgactagcccgacaggccactagcccgacgtctgtcttcccgagcagcaggcggagaggagatgaataacttaggaagacgccctgtcgggctagtcgggg

SEQ ID NO: 618990 - DNA, 1547 bp, Homo sapiens
  misc_feature (3)..(3): n is a, c, g, or t
  misc_feature (329)..(329): n is a, c, g, or t
  misc_feature (1077)..(1077): n is a, c, g, or t
tcncgtctttttccttttcttcgttgttcggtttgtcgttcttcgctctcggtcgtgtcgtctgtcttctgatcctcgctcgctgtgtgtctgttgcgtgctcgcgactgctcgtcgcagtgtcgagaggtcgagtctctattggttcgtgtgagtcactcgaccgtcgcagccgcctgtgtggtctctcctttgttttgcttgtgccctcctttcgctgtcgtttggcctcgtcgcactgtgttttgttcatgcatcgcgcgtcgtgtctgctctgcctgtaagtctgatgcctgcgggtcgatcgacgctctgaggcgccttcgttngtctcccccgtgctgtgagtggatcctcgtgctctcccccttcttgtgtgtgttactccctgcccgccctaggttgttgtggtacgcgcctcccccttatcttgggcgcgttctgcgtccccgccgacggatggttggtctgacggtggcccccgggtgtattctttggtgcgatggtgatgctcgccgccccacttagatttgttctgtgtttcgccgccgcctcgttcgttggccgaggtttgtatcccgttgttccgcgttgttcctacgaggcaataattgtttcgagccgggtggtctttcgcgcgccccactattatccgccccgcggggggacaacacactttgtctcgccgaaccgtcccgcgtgcctccccccccgacgtcggactacagtggggggtttttgtgcgtcgcggccgcgccccccgtctctccccgccgggggggaaaaatacatcctgtgcgcttctgcttggtgttggttccctgtggtggccgtgtcacgcgctcccccacagcgggggacccctggggcaccccccttttgtgttgtactatgagtgtgtttttgtggactcggcccgcttctgctgacacaaatgggggcgcccctgtagattgtcctatcgtcgcgtctagggcttgtgcgacgcctctttctctattacttgggggcggcgccctcagaatagtacctctctctccctcgtctccgcgattggttctcccccccccttttggnggggcccccacttttatagggcgtgcccctcgcgctgcgccttttcgctgcttgcgagattgttggtctccccccttttttctccgtgcccacgctcgttcttgcgggggggtcccaacacccaccccttgttgctcccatggggggcgccaccaacttggggggagccgcccctaacaggttggcgcccctcccccctttttggccccccgctcccccctgtgtgtccccctggcggcgttctttagacaccctctttgtgccccccgcgtctctctctgtccccaccgcgccttctggggctcgtaacaggggactcgctcctccggctcctcaaaggtgccgcccccgggggcatctcccgcataaccttgccttcttgccccccctctcaatccgtttattattttatcccgcgcgttctctgaagagccctctgtcttttctcgccccacaatatcagaaaacac

SEQ ID NO: 618991 - DNA, 412 bp, Homo sapiens
ccttcggtgtttcactgaagatcctggtgtttccatgggccgccgccccgtccgttgttaccggtattgcaagaacaagccgtacccaaagtctcgcttctgccgaggtgttcctgatgccaagattcgcatttttgacctgtggcgtaaaaaggcatatgtggatgactttccgctttgtgttcacatggcgccagatgaatatgagcagttgacctctgaagccctgctggctgcccgactttgtacccaatttgtacatatccgctgcgtaccacctgcctttcatatcagtacgcgcctctaccacttcaagccatgcgcatcaacaagaccgtttccttccctgctgctgacagcctccaaacatgcccgcaacgtgcttccgtctctcattaccttccccttttcg

SEQ ID NO: 618992 - DNA, 367 bp, Homo sapiens
  misc_feature (6)..(6): n is a, c, g, or t
  misc_feature (74)..(74): n is a, c, g, or t
  misc_feature (94)..(94): n is a, c, g, or t
  misc_feature (96)..(96): n is a, c, g, or t
  misc_feature (107)..(107): n is a, c, g, or t
  misc_feature (134)..(134): n is a, c, g, or t
  misc_feature (137)..(138): n is a, c, g, or t
  misc_feature (161)..(161): n is a, c, g, or t
  misc_feature (163)..(163): n is a, c, g, or t
  misc_feature (196)..(196): n is a, c, g, or t
  misc_feature (199)..(199): n is a, c, g, or t
  misc_feature (203)..(203): n is a, c, g, or t
  misc_feature (218)..(219): n is a, c, g, or t
  misc_feature (222)..(223): n is a, c, g, or t
  misc_feature (345)..(345): n is a, c, g, or t
tgcggnggtgcgggtgggcgctgggagcccggggggtccgcctgccccggcccccgctacctggttcttcgggntttggcccagagcacggttntnggtggggacgncgggctggctgggccacccggtcactnttnntggggggcatttgttccctagtntnggccaaggttttttggagaaggcggcgccgttngcncgtnctcctcgcctctttnnatnnccgtccatcctgccgccctccccaccccgccaagacgctgtggggacccgagtttcatgggtgcagcaaaccggggcttctagcttttccccgggcaggacggggtagcactggctcctgtncttcctgggccccggcccggcc

SEQ ID NO: 618993 - DNA, 254 bp, Homo sapiens
  misc_feature (226)..(226): n is a, c, g, or t
  misc_feature (241)..(241): n is a, c, g, or t
gaaacaaggtaaattagtaaagaataatataagcagatgtaattggatctttaggaggaaattatgacctataatgttacagcagttttctgtagtacattttcaaccataatgtggaaaattagaaaataaatgttattttcaacataaaaattaatcacttggaggatacatctggttctgccaagatagaggacccctattcctccttgatctcccttacagngaaaacacttttggncattatcaaacaa

SEQ ID NO: 618994 - DNA, 428 bp, Homo sapiens
  misc_feature (26)..(26): n is a, c, g, or t
  misc_feature (164)..(164): n is a, c, g, or t
  misc_feature (357)..(357): n is a, c, g, or t
cgggaattacaggtgtgaacccaccntccccggccctgaaatttgttaaaaaacaagttttttggtttttttaattttccttttgagacaatcctcatgctgtcactctggcctagagttcagtggggacagagtgaaagtgccaggttgaggcccgggcgtgngtgtcacgccctgtaatcccagcactttgggaggccaaggcgggtggatcacttgaggtcaggagttcgaaaccagccctggccaacatggcaaaaccccttctctactaaaaatacaaaaattagctgggtgtggtggtgcgcatctgtaatcccagctacttgggaggccaaggcacgagaatcgcttgancctggaggcagaagttgcagtgagctgagatcgcgccactgcactccagcctgggtgatagagcaagaccc

SEQ ID NO: 618995 - DNA, 186 bp, Homo sapiens
cgtcgacgattgagctgcagagagacaagttagtagagacgaaaggaaaggttctgataaaagcggtagggagaagataaccagggcgttgaaggggggaggcccgggaggcagaggttgcagtgagccaagatcgcaccattcactccggcctgggcaacaagagtatgaacattggtctcagaa

SEQ ID NO: 618996 - DNA, 1539 bp, Homo sapiens
taacgtgagcattaactttcttatatattctcgatggtggtcccaggtaaaataatccaggccatattggcacatacatatcaacaccaccagttgtctctatgaatccgtcagtacgcttggtgcagatatgtctggcactatgcactcaacaagtcctggcagagcgcaccttcctgagttctcccatcgatggaaaccactagtggaacagatcaacgacatgaacacaccaccagagacactgtgagcgatccgtggaagatcactaatgggccacctaacagtgggcctccacaccaggtatggcgcttatcatccagcgcatatcccccgctaaaaaggttgcccaagggggacaaccagattacacaatcttgtggcagacaactgaacacacagaaaaagctctcgtgtgctcccacgctatttcaacacccaggaccagacttggcgacgaataaaagacacaacatgaggcgctgttgagcaaatctaactatcccgtccttgtccagtggcgaaagttcttataaacaccgtgcggcggggcgcacacagaacacacataagccccagagatgattcacgcaactttgtgcccccagtgtttacaccggcctatttgtgtctcacaccaacaacaaggtagacaccgttcgtagcccaatgggagggcctaactaccactggatcacaataaccttacacctatctatcataacttatctccctagagggacataaatccacgcatggaggtaccccctctctaaccaccatcacgttagggcaccctcacctgaggctaaaatacacaacctcgcctagggccaccccactgggcccccagcacccatacaacatggcctgtggccagtatccccacccccgggggtcgaccacagcggacgctccagaccaccacgacctccccacggaagaacacggcaagcgcaccatcaaaacgagcaccgcggacagggagccacaacagtggaacagaaataaacaacgcccacgatgggcacacacatgcaggcggcaacataaacaacagaaccccacagcggtgcacacagcggaccagttgacccaacggcctacagcggcaacacaaaagcccccgaaaatagaggcgaccatcatcaaaaacaaagggtccaacgagaggcatactggcgaaccacaccccaaaccaatcccactaaccgcccctaacaagaccgcccacaacaataccacagacaccaacccacatatcaggacctatatgaccccctgtgcaaaagcactaaaaatccccagagggcgaacaactactatgaagggaacaataaagcgccagcattctcaacatcgaatcatttacaaacacacggaaagacaaaacacccgcaacagcagatccacgcaacaagctcggcacactagggactcaactgcccgacacaacacgcggacaaacaacacggactcgtcgagaactttcttctctgctcccgctttctaaaccagcgagcagagatcagtacaaca

SEQ ID NO: 618997 - DNA, 180 bp, Homo sapiens
agttatattatggtgttcaaagattaagctgccttggaaacaatattttcttttgaaaaagaattttttttttcatttgtgatttttaaaaaatgttgccccagttatgcttcatgcatcgttacattttcatcaggttaatgtaatgtttagttcctttgcaataaaaatattgctgca

SEQ ID NO: 618998 - DNA, 322 bp, Homo sapiens
gagatgaagtctcgctctgttgcccagactggagtgtagtggtgcgatctcagctcactgcaacttccacctcccaggttcaagcaattctcgtgcctcagcctcccgagtatctgggattacaggcgcccaccacaatgcctggacaatttttgtatttttagtagagatgggggtttgccatttagccaggctggtcttgaactcctgacctcagatgatctgcccacctcggcctcccaaagtgctgggattacaggcgtcagccaccacacccagcctttatgttttgttttctatgttaacacactaatgtgtttaa

SEQ ID NO: 618999 - DNA, 960 bp, Homo sapiens
  misc_feature (216)..(216): n is a, c, g, or t
  misc_feature (586)..(586): n is a, c, g, or t
tgtctagcttgttctcttctgtctagccccacacgccttctggcacaatgaagtgggtaacctttattatcccttcttctctctctttagctcgggttattcctagggcgtgtagtctcgtcggagatgcgacgacaaagcagtcgtagcgtagctccatcggcttgagacgattaagcgtgcatggaatggaaaatcttcaaaagcctcttggtngttagattgccgtttagcttgcagtatcttcacgcagtcgtcctatttggacagcatcattgtcatagggatctgagttgcatatcgatacgtcaactcgcatatttgccaacagaaaccattgtcgttggctcggatgagatcagcgtgtataaattcgtgagcaaaatccgacttcgagtatccctgtttctggacgacgaagattattgcacgatgcttcgcgaaactccttcagttgaacacgctgatgcgttgcaacaccagtggcctgaagctgcttgtgccataatagatcaatggacacctggagcgagaagacttgacatggcgtgtcgtttggcaaacaactaaatagaattgaactaancgcgaaataggcatctcgcgccgtagtttggttgagcaccccatgatggttgcacttgctgcactgtgtcgagtcttgcttttttcacttgcatcgagatgaacagagtaccattctctgggatacacaacttactctatcattgagacatttgtcgcagaagtactatgtcctctatcttttaattggccccgtgacacttcgcttttatctttttggcgtaaagagcgttatcaaacagcttgcctgtttcacatgaattgtgtgaccacagcatgcttgaattgagagcttggcttgtcttgtttgcctaacatcttcggaatgaaactctttcggggcattgaacggggaaagggcttccgtcctgtcaa

SEQ ID NO: 619000 - DNA, 895 bp, Homo sapiens
agaagagttcagcctcatagatggacgagccatcctctgtgcccgtcagcagtgtctgtgtgtctgcataaaccctcctgtcctggaggtgacttcatcctgaggagccacagcacaggccgtgctggaactttctgcacactggctctgggactggcagagaggtctggtgctgccctgcggatcagtcctcttccagtcacatctgtgccagagggctgtctgtgacctgggcccgtgcttcgaatgccacctgtctgcctgggctccaagtgggcaggaccgaggacagaacctacgaggcacggactgagggggcagtgtggtcccctggctgtcccatccccatgtcctccgtccgcgggttgtggctggctgctgtgcattgtccctgcgatgggagtcttgtcttcccgagccgtgtcgagtttcctccccaggcagagcgtcgccttcctgcggagagtctgggaggcggtgcaggctgtcctggctgcgtctggggaagcctgagggacagcataacacccccgggacagtaggtcttgggcgggccactgggaacgtctggcacttgagtgtgttttgcctctttccgtgggtatgaactgtgtgacgttcacccagagggcctggtcttcctccacagatcggtgtgggttggggtcactgcatggggggggcacacctcctcataggagggggggcccacctttcgcggggtctccaggatggggggtgccgggctgtgcggctgttaccatttgtgggctcgcgtttgtgcgcgccccctcgggggggcccggttgttcaacgggttttgcccctctttgtggccctgttctggagttcttttggaggggccgcgcccggctttgtggggtcgggtcttcgc

SEQ ID NO: 619001 - DNA, 1137 bp, Homo sapiens
gtgcctcgctaagctcattgtggcagtgaaaatattccacggaattttatcaccaaacaaggtgacctgtaaacatatcacgaagctgaaaccttggggccttttagaggttcgtagtggagaagtatgagtggtcgcaggaagaggcagctggcattcacagatttcttactgcccatgtaggagctgatccctgagaagcagagccactgccgccgcagtgtctccggcgacccttggcttaacatcctaagcccctgcccaggcaccacagcagagatcacaacactgacccatccgccctatcccttcaagcattttcctcttcccattttcaggggtgaagctcttcctatcaagagatttctagatctatgtataaggttgttactcccaacatgtaccataaggggttagcattactagacccattgtggagatcccacaaagccatggggccatcctaggtgccttagggcctggcttgggctctgcccacacagactacactggactacacatgtgaaccaggcatcttgcccctgttacccttaccttccacattaggacatccctttaaagttataagcatcctatatgtgaaaaagaagctatgaaggtgtatgagcccatcctttaattcattgagtataagagtcagattttcttagtgcatatctattgggccagaaaagggtgagagggggaaggcgtcaaaatctatgtaccgcagaaacaattcacaccgacggcggtcaggggatgaaacaaccacccgggcacgcggcccagaggaccacaggggaccacatataaacggacacataaaagcaacggacaagcaacaacggaatgaaacaccacaaggggcaccaaaacaggacaaaacacagcaacacgcaacatcaaagagatagcagcagggacacatcaagctaggagaacgcgtgaacaaaccggcacacgacacaataaaacacacctgggggacttaaggaacacatgacataccaccaagagacgaacccacgcagccagacgaagagaagcgacaaaagaaagagacaccaaggaggaaagcagcaacaaagaagcaaaaacagatgatcaacagcatagcacatggcctgtgcgaca

SEQ ID NO: 619002 - DNA, 174 bp, Homo sapiens
  misc_feature (92)..(92): n is a, c, g, or t
gtttcccttttttgggggggggccccctttttccccccctttttttttcccccccaaaaaaaatggggggaaacccccccccaaattttttnccctggggtcccgggtaaaaatttgggggggggtgggtttgccccccaatttcccccccaaaaaaccctttcccccccccca

SEQ ID NO: 619003 - DNA, 110 bp, Homo sapiens
agctcggtaccctgattactgtggggtttgtttttgtttttgtttttgttttgagacggattcttgcatcttgctctgtcatcccagctggagtgcaatggtacagtctc

SEQ ID NO: 619004 - DNA, 356 bp, Homo sapiens
ttcgtgtcccgccaggaaggcgcggtccagcctcagtcactagccgacatcccgctgtcctcctcagacgtgaatctgtcgatcattaccgacgttgcgtggctatctcagactcggttgtgcgtgctgggtcgtgcaatcgacgctggtgtcacgaccccttacgagatcgccgtcgacggatctggcgcgacgtcaatgggtcagctcaccgccactagcatggcggccgtcgtcgcgttgccgaaggaaacgggcaccgaggcagtcgtgttgagcgaggacgggatattgctgcgccacgaggacagtttccgctggcgtcagatcctccaaggtgtcagcgccgttgcggt

SEQ ID NO: 619005 - DNA, 201 bp, Homo sapiens
taacgcattcgacgtgcacaccataccactgtgtagagggctcatcatataaaggaatgactattattgaaaacaacaatagtagcaatcaaagtcctgcggccacatatgtgaactttagggggatagctacgctaccaacctgactagctgtcacctatcaccgtatccagtttttaaaatcctgagatcaagccaaag

SEQ ID NO: 619006 - DNA, 241 bp, Homo sapiens
ggggagggacaagggggtttttttttcccgggtttttccaaccccccgggttgggtttacaaaattccccccccgggtttttcaaccccccgggttgttttttttttgggggggggttaaccccctaaaacgcctttgtttttttcccgccccccggcccccccctttttggggggttgggtttccctttggggggggccccgggtttcccctttccccccccaaaagggaccccctttta

SEQ ID NO: 619007 - DNA, 244 bp, Homo sapiens
cggaggaagagagagtgaacacggaagtgcacacactttaaaatgactagatttcatgacatctcatgatggcgaggatcgtaacgaggggatggtgctctctactgggcaatctgcccccatgatccagtcacctccccacaggctccacctccaccaacttgctctggctactataacatttctaatttatcctccaaacttagtacgacactaactaagacttctatcactgagggctgtc

SEQ ID NO: 619008 - DNA, 509 bp, Homo sapiens
  misc_feature (78)..(78): n is a, c, g, or t
ccaccatgcccggctaattttttatatttttagtaaagatggagtttcaccgtgttggccaggatggtctcgatttcntgacctcgtggtccacccgcctcggcctcccaaagtgctgggattacaggcgcaggccactgcacccggcagaagtcccactcttaataatacaccaaagagagactcagatgcatatgcaccaggacacatgtgcaagaatattcactggacatttttgtaataaccccaaacaagaaacaactgcaatgtccactagtgccagaaaggataaatgaattgtgatgtaatcatacaatggaatactatacagtgatgaaaatgaatgaacaacagctacatgcaatgacatgggtgaatccttaaaatatactgagtaaaacgaatatgaaataatccatatagtacaattgtttttatataaagattaaaaacaaggaaaatttaacagcattgttaaagatacatatttagaaagaagaaaaaaattc

SEQ ID NO: 619009 - DNA, 766 bp, Homo sapiens
  misc_feature (104)..(104): n is a, c, g, or t
  misc_feature (125)..(125): n is a, c, g, or t
  misc_feature (149)..(149): n is a, c, g, or t
  misc_feature (227)..(227): n is a, c, g, or t
  misc_feature (230)..(231): n is a, c, g, or t
  misc_feature (238)..(239): n is a, c, g, or t
  misc_feature (283)..(283): n is a, c, g, or t
  misc_feature (303)..(304): n is a, c, g, or t
  misc_feature (318)..(318): n is a, c, g, or t
  misc_feature (323)..(323): n is a, c, g, or t
  misc_feature (325)..(325): n is a, c, g, or t
  misc_feature (351)..(352): n is a, c, g, or t
  misc_feature (367)..(367): n is a, c, g, or t
  misc_feature (381)..(381): n is a, c, g, or t
  misc_feature (389)..(389): n is a, c, g, or t
  misc_feature (409)..(409): n is a, c, g, or t
  misc_feature (416)..(416): n is a, c, g, or t
  misc_feature (421)..(421): n is a, c, g, or t
  misc_feature (437)..(437): n is a, c, g, or t
  misc_feature (452)..(452): n is a, c, g, or t
gcagccacgccactccctcctgagagcccaccgcgccacagcttggaggaagagcctgcggggaactggctgcaggacgctctcttcttgagtgcaggtctggntctgctgtgaccatgcccgtnacctttgccctcctgctcctcctnggccaggccactgcggacccatgctacgatccacagggccgccccaattctgcctcccgccagtgacacagctggcangcnngtggcgnnctcctgccctcaggcctgtgccctgtccccaggaaaccaccttngcgccagggaaacctgcaannggcagcctgacatntggcncntgggtggccccttcctcctgacatcnngtcagcttgcgcttnctgtaccccagganccccagcncctcatcctgtctgctgccntgggccntcagnggggtccctggaggcntgctgttgcacaggncccgaccatggacctggggaccattaggagggcccatgaaacgggtgaccttccacatccacacacaggtcctaagtgacactgtggcaggcacaagaccaaacttccacgatggtgggaaagatatgggggagaccagtgcccgaggactaagacgaggaaagcataggggagcatgaggaagggcccgagcatggccaagaatcgtcaatgggaccaacagcatggaccggcatgataggaaccggccaccagtgaaccaaggaaccacacacactgaagatgaaaaaactggcaagaacaaaacataaaca

SEQ ID NO: 619010 - DNA, 1107 bp, Homo sapiens
attttaccaaaagactcctaaggttaagaaatgacttctagcgaaagtctcaggatacaacacattgatatacaaaagatgcaatagcattgccttgacaccaagtaacgattcaagctgagaacaaaatcaagaacagttttctttacaatagccataaacaaaaaataatatacttagaaatacatcaaaccagggaggtacaaatagtctctacaagaactagaaaacattactgaaaggtaatcagagacaattcaaataaaaaagctttctatgctcatggatttgaagaatgaatagaaaatgtctatgctgcctagagcagcctacaaaataagtttttgttatcttttatcaaaatgtcgattactttttttttttttttggagacggggttgctctggggcctaggctggagtgcagtggtgcgatctgggctcactggtaacctccgcctccggggtacagggggagtctcctgccttagcctcccaagtagctgggattacgggtgcccaccagcacaccgggctaattagggggtaaaggggggagatcgagtaaaggctgtagtaggccaggcgggtctcaaactcccggagtccaaagtgctgggataacgggtgcgacccgaccatgcctggtcccaacccattataattccgtggtacccaacgcacaggaaccatgaatactcggaaattaggccagggatttcaattttccagacacgaacaggtgactgccctacacagggtgttaaaaacatcccacacaaggagcaacaaaagcacaggaggccccctggggggcccccacaaaacgcgaggctaaatataccgagagggcgcaaaaacccacaaacacacagagcagcagggcagcacacaggcgccgccaataacaccacacaatctgacgaaacaacaaaccgtcgccgctccaccactctgagagacacacaaccaaacaaaaaccaggggggacgcacgagggctgaacacacaccagtgaggcccacaaaaggaaggcgcaccacacacacgatactaaaccaacgaacgaacgcctccctacaatcttcaacgccacacacgcaaagca

SEQ ID NO: 619011 - DNA, 680 bp, Homo sapiens
  misc_feature (104)..(104): n is a, c, g, or t
  misc_feature (125)..(125): n is a, c, g, or t
  misc_feature (149)..(149): n is a, c, g, or t
  misc_feature (227)..(227): n is a, c, g, or t
  misc_feature (230)..(231): n is a, c, g, or t
  misc_feature (238)..(239): n is a, c, g, or t
  misc_feature (283)..(283): n is a, c, g, or t
  misc_feature (303)..(304): n is a, c, g, or t
  misc_feature (318)..(318): n is a, c, g, or t
  misc_feature (323)..(323): n is a, c, g, or t
  misc_feature (325)..(325): n is a, c, g, or t
  misc_feature (351)..(352): n is a, c, g, or t
  misc_feature (367)..(367): n is a, c, g, or t
  misc_feature (381)..(381): n is a, c, g, or t
  misc_feature (389)..(389): n is a, c, g, or t
  misc_feature (409)..(409): n is a, c, g, or t
  misc_feature (416)..(416): n is a, c, g, or t
  misc_feature (421)..(421): n is a, c, g, or t
  misc_feature (437)..(437): n is a, c, g, or t
  misc_feature (452)..(452): n is a, c, g, or t
gcagccacgccactccctcctgagagcccaccgcgccacagcttggaggaagagcctgcggggaactggctgcaggacgctctcttcttgagtgcaggtctggntctgctgtgaccatgcccgtnacctttgccctcctgctcctcctnggccaggccactgcggacccatgctacgatccacagggccgccccaattctgcctcccgccagtgacacagctggcangcnngtggcgnnctcctgccctcaggcctgtgccctgtccccaggaaaccaccttngcgccagggaaacctgcaannggcagcctgacatntggcncntgggtggccccttcctcctgacatcnngtcagcttgcgcttnctgtaccccagganccccagcncctcatcctgtctgctgccntgggccntcagnggggtccctggaggcntgctgttgcacaggncccgcctttgcctgtgggccttcgtggttgccctgacaacgtggttgaccttccactccacaccagtgtcctaaaggccacttgtctggcgtgccagcctacctaccgtattggagttttggggtgcccatgcctggtcttagcgtgcagctaggttcagcgcaggccgctttcctagttcttcggccacgcttgccgctttgccgcccgtgccggcccccgcttcca

SEQ ID NO: 619012 - DNA, 468 bp, Homo sapiens
  misc_feature (111)..(111): n is a, c, g, or t
  misc_feature (174)..(174): n is a, c, g, or t
  misc_feature (190)..(190): n is a, c, g, or t
  misc_feature (195)..(195): n is a, c, g, or t
  misc_feature (198)..(198): n is a, c, g, or t
  misc_feature (201)..(201): n is a, c, g, or t
  misc_feature (204)..(204): n is a, c, g, or t
  misc_feature (207)..(207): n is a, c, g, or t
  misc_feature (221)..(221): n is a, c, g, or t
  misc_feature (227)..(227): n is a, c, g, or t
  misc_feature (231)..(231): n is a, c, g, or t
  misc_feature (234)..(235): n is a, c, g, or t
  misc_feature (238)..(238): n is a, c, g, or t
  misc_feature (243)..(243): n is a, c, g, or t
  misc_feature (246)..(246): n is a, c, g, or t
  misc_feature (249)..(249): n is a, c, g, or t
  misc_feature (252)..(252): n is a, c, g, or t
  misc_feature (255)..(255): n is a, c, g, or t
  misc_feature (261)..(261): n is a, c, g, or t
  misc_feature (263)..(263): n is a, c, g, or t
  misc_feature (268)..(269): n is a, c, g, or t
  misc_feature (271)..(272): n is a, c, g, or t
  misc_feature (274)..(274): n is a, c, g, or t
  misc_feature (276)..(276): n is a, c, g, or t
  misc_feature (278)..(279): n is a, c, g, or t
  misc_feature (281)..(281): n is a, c, g, or t
  misc_feature (286)..(286): n is a, c, g, or t
  misc_feature (288)..(289): n is a, c, g, or t
  misc_feature (292)..(292): n is a, c, g, or t
  misc_feature (294)..(294): n is a, c, g, or t
  misc_feature (296)..(296): n is a, c, g, or t
  misc_feature (299)..(299): n is a, c, g, or t
  misc_feature (303)..(304): n is a, c, g, or t
  misc_feature (307)..(309): n is a, c, g, or t
  misc_feature (316)..(316): n is a, c, g, or t
  misc_feature (320)..(321): n is a, c, g, or t
  misc_feature (325)..(325): n is a, c, g, or t
  misc_feature (328)..(329): n is a, c, g, or t
  misc_feature (331)..(333): n is a, c, g, or t
  misc_feature (338)..(338): n is a, c, g, or t
  misc_feature (340)..(340): n is a, c, g, or t
  misc_feature (342)..(343): n is a, c, g, or t
  misc_feature (345)..(345): n is a, c, g, or t
  misc_feature (348)..(348): n is a, c, g, or t
  misc_feature (350)..(352): n is a, c, g, or t
  misc_feature (354)..(355): n is a, c, g, or t
  misc_feature (358)..(361): n is a, c, g, or t
  misc_feature (363)..(363): n is a, c, g, or t
  misc_feature (369)..(371): n is a, c, g, or t
  misc_feature (373)..(373): n is a, c, g, or t
  misc_feature (375)..(376): n is a, c, g, or t
  misc_feature (379)..(379): n is a, c, g, or t
  misc_feature (386)..(386): n is a, c, g, or t
  misc_feature (391)..(394): n is a, c, g, or t
  misc_feature (398)..(398): n is a, c, g, or t
  misc_feature (400)..(401): n is a, c, g, or t
  misc_feature (414)..(418): n is a, c, g, or t
  misc_feature (420)..(421): n is a, c, g, or t
  misc_feature (423)..(423): n is a, c, g, or t
  misc_feature (429)..(429): n is a, c, g, or t
  misc_feature (435)..(435): n is a, c, g, or t
  misc_feature (438)..(439): n is a, c, g, or t
  misc_feature (451)..(451): n is a, c, g, or t
  misc_feature (455)..(457): n is a, c, g, or t
  misc_feature (460)..(460): n is a, c, g, or t
  misc_feature (462)..(462): n is a, c, g, or t
  misc_feature (464)..(467): n is a, c, g, or t
ttagtttcttgaacctatttatagcgtcaaaagttagacgcaggtgcaggcctccattccatctattggctggctctcgactgctgagactggcctgccaacctgtgtttnaggagggcacgcgtctgcggctgaaccgcggaagggccggtgaggaaccgggcctggggaganggccctgagggccccncactnctnccnctnctnctgctactactgcngctccngccnccnnctncccancanctnccnctnctacancnccacnntnnantntnncnccctncnnttncncntcntcannctnnnaataagnggannaacncanntnnngaggntntnnanctncnnnannagnnnntngaggannnanannaanagggggngaagnnnntaangnntttattttttttnnnnntnnanaaaatnttaatnaannaaaaaaaaatgngtgnnntanangnnnna

SEQ ID NO: 619013 - DNA, 548 bp, Homo sapiens
aattctccttcatcttatgtacatttctacctctgacagtatgcatactttgtagttactgtccgtcgcccccaatgagacacaaactctgagagagcaggagctttgttttcttatgtcttaatccctagttcccataacagtagctggcacatgggaagcattcaaccaacaatggttgaatgaaaaaatgtgtagaatgttccctctgcctggaatgtcctcccctgactcatcaccctgaaaaactcttattcatccacctagtcttggctcagatacaacctctgccatgcagccttccctgactgtcccactgaaactcaggtgcactttatccgagctccagcgtactgtgctggcatctccactgcagctgccagattactgactagaccgtttgcctgtctctcactcacaactagaactttacctctttgaggacaggactctctctacatatgtgtgtccccagctagtccagagtaggtgttaaacaaatgcttatggaatgaatacatcaatctttaccagagccctctgcaaaa

SEQ ID NO: 619014 - DNA, 423 bp, Homo sapiens
tgtggctgtctagaggatccctcataggttcgcaggaggatcactagtggccaggagttgagactagcctgggcagcacagggaaaccttgtctctacaagaggaaaaaaaaaaaaaaaaaagaggtaaaagcaacataaacaatttttcccccaataatatggtctaagttcattttcggtggctatgacagaatccctgaaagggggtaatatataaagaaaagacatggatttctaaataagctggtgaagtcggggaaggtcaaagggtaggaggagccatatctggatggaggggccttttgggcctcatatggatgggagggcgacctcagggggagagacgcaaggagggccacgctcagggtcaggtctacccacttctaaaaacgcccatatccccatcaggggggaccccacc

SEQ ID NO: 619015 - DNA, 88 bp, Homo sapiens
  misc_feature (1)..(1): n is a, c, g, or t
  misc_feature (72)..(72): n is a, c, g, or t
ncttttgcgggtggcggcgaaacgcggaagagcacgccatgaaatgcctcgggcacgctacgagagtacaangtagtgggtcgctgcc

SEQ ID NO: 619016 - DNA, 1101 bp, Homo sapiens
  misc_feature (267)..(267): n is a, c, g, or t
  misc_feature (321)..(321): n is a, c, g, or t
  misc_feature (379)..(379): n is a, c, g, or t
  misc_feature (419)..(419): n is a, c, g, or t
  misc_feature (427)..(427): n is a, c, g, or t
  misc_feature (433)..(433): n is a, c, g, or t
  misc_feature (439)..(439): n is a, c, g, or t
  misc_feature (484)..(484): n is a, c, g, or t
  misc_feature (513)..(513): n is a, c, g, or t
  misc_feature (608)..(609): n is a, c, g, or t
  misc_feature (612)..(612): n is a, c, g, or t
  misc_feature (622)..(622): n is a, c, g, or t
  misc_feature (633)..(633): n is a, c, g, or t
  misc_feature (636)..(636): n is a, c, g, or t
  misc_feature (642)..(642): n is a, c, g, or t
  misc_feature (648)..(648): n is a, c, g, or t
  misc_feature (714)..(714): n is a, c, g, or t
  misc_feature (723)..(723): n is a, c, g, or t
  misc_feature (753)..(753): n is a, c, g, or t
  misc_feature (765)..(765): n is a, c, g, or t
  misc_feature (770)..(770): n is a, c, g, or t
  misc_feature (804)..(804): n is a, c, g, or t
  misc_feature (1040)..(1040): n is a, c, g, or t
atgtgcctcaccgggtctcactgtcatgcaaaggtagatggaacgcagctgagaggtctgacaagatgtaccaggtcccactaccactggatcggagatgggaccctggtacggctccgctatcagcatggtggccctggtcacggtctgctgtccatcttgtccgccttcgctcttcatgcatccatctggtcccttgctcgttccacttcgagagggacgacagacggcgcacagcagcttgtggggtgccgcaattacctgccnctcggtgagctcagccatcggcggggaggtgccccagcgctacgtgtggcgttnctgcatcggcctgcactcggcgcctcgcttcttggtggccttcgcctactggaaccantacctcagctgcacctccccgtgttcctgctatcgcccgntctgccgnctcaanttcggnctcaatgtcgtggagaacgtcgcgttgctagtgctcacttatgtntcctcctccgaggacttcatgctttcatngtgttcattgcctcatccctcgggcacatgctcctcagctgcattctctggcggttgaccaagaagcacacagtaagtcaggaggatcgcaagtnntanagctggaaanagcggctcttnatnatcaanttcatntccttcttctcggcgctggctgtctactttcggcacaacatgtattgtgaggctggagtgtacacnatctttgcnatcctggagtacactgttgtcttaaccaanatggcgttccanatganggcctggtgggacttcgggaacaaggagctgctnataacctctcagcctgaggaaaagcgattctgaacccttcagtcctgcttgggaggacgcagcccactgcccagaaacaagaaacacgataccattctggccttccccaccccacatcctctcttggccttactgaagatgggggaagggtaagaaggaagggtgtaggccaaggctcaccccagtgctgctggcttctcctctccacccctcatatgggcgtggggtcctcaaanatcacctttacctgagaggccccaagaagctgagctggcagagagctcaccatttggtgct

SEQ ID NO: 619017 - DNA, 657 bp, Homo sapiens
tccacacatgaagcgcgcggcgggtggacatggaagaacttatcttcgaactctccgcttcttcgtcgaagaagaagagagtagtgcacaattcctcatcacaccgcccccctcttcatgagatataataccccgcccttccctggggtggcccacatcaagttcgtcgggcgagagaggtgtgacgatatagcccccacaccacatcacctccttgtcgggggcgcgcggtatatttgtggaccccctcttctccttcacacattttacatatcccccatcatcttctaccgcgcgtatacatgtggcgtaaatacacacgcctccctgtttatacactctcacgccacgcgcgttcaaaataggtttttctctcctacgcgtatagtatctcctcccccaccattatatatatatatggtaagtactctaccctctccccgttgcgtgcaatggtaatactatatacaacaatactatgtattttttatgggcaatatgtgtaaattattctctcgccgcgcgccacattgttgtgcatacgaggccaacaaaatgtgttcccgcccaaatggcaatatcttcttcctctttttgggcccgacaattctgccccatacgtcccccgttggaaaacagctccgccatataccaaga

SEQ ID NO: 619018 - DNA, 826 bp, Homo sapiens
  misc_feature (267)..(267): n is a, c, g, or t
  misc_feature (321)..(321): n is a, c, g, or t
  misc_feature (379)..(379): n is a, c, g, or t
  misc_feature (419)..(419): n is a, c, g, or t
  misc_feature (427)..(427): n is a, c, g, or t
  misc_feature (433)..(433): n is a, c, g, or t
  misc_feature (439)..(439): n is a, c, g, or t
  misc_feature (484)..(484): n is a, c, g, or t
  misc_feature (678)..(678): n is a, c, g, or t
atgtgcctcaccgggtctcactgtcatgcaaaggtagatggaacgcagctgagaggtctgacaagatgtaccaggtcccactaccactggatcggagatgggaccctggtacggctccgctatcagcatggtggccctggtcacggtctgctgtccatcttgtccgccttcgctcttcatgcatccatctggtcccttgctcgttccacttcgagagggacgacagacggcgcacagcagcttgtggggtgccgcaattacctgccnctcggtgagctcagccatcggcggggaggtgccccagcgctacgtgtggcgttnctgcatcggcctgcactcggcgcctcgcttcttggtggccttcgcctactggaaccantacctcagctgcacctccccgtgttcctgctatcgcccgntctgccgnctcaanttcggnctcaatgtcgtggagaacgtcgcgttgctagtgctcacttatgtntcctcctccgaggacttccgtgggtgcctggcatgcacgggaggacgtgcgggaacgtgttccctgcaggggacgggcctgtccctagccacattctggaccttcctacttcgtggtgtgggcactccgctgtcgatgtggctcccgaatcctcttttcccttccagcctatccgactgactgatgctttcatngtgttcattgcctcatccctcgggcacatgctcctcagctgcattctctggcggttgaccaagaagcacacagtaagtcaggaggtacggtctatccctagcgggggctccaaggcagaccagaagagaatcaggacatctgtcctca

SEQ ID NO: 619019 - DNA, 834 bp, Homo sapiens
  misc_feature (30)..(30): n is a, c, g, or t
  misc_feature (83)..(83): n is a, c, g, or t
  misc_feature (87)..(87): n is a, c, g, or t
  misc_feature (94)..(94): n is a, c, g, or t
  misc_feature (97)..(97): n is a, c, g, or t
  misc_feature (115)..(115): n is a, c, g, or t
  misc_feature (119)..(120): n is a, c, g, or t
  misc_feature (128)..(128): n is a, c, g, or t
  misc_feature (130)..(132): n is a, c, g, or t
  misc_feature (134)..(134): n is a, c, g, or t
  misc_feature (141)..(141): n is a, c, g, or t
  misc_feature (144)..(145): n is a, c, g, or t
  misc_feature (150)..(150): n is a, c, g, or t
  misc_feature (158)..(158): n is a, c, g, or t
  misc_feature (173)..(176): n is a, c, g, or t
  misc_feature (180)..(180): n is a, c, g, or t
  misc_feature (186)..(186): n is a, c, g, or t
  misc_feature (191)..(192): n is a, c, g, or t
  misc_feature (201)..(201): n is a, c, g, or t
  misc_feature (207)..(207): n is a, c, g, or t
  misc_feature (213)..(213): n is a, c, g, or t
  misc_feature (224)..(224): n is a, c, g, or t
  misc_feature (232)..(232): n is a, c, g, or t
  misc_feature (238)..(239): n is a, c, g, or t
  misc_feature (264)..(266): n is a, c, g, or t
  misc_feature (268)..(268): n is a, c, g, or t
  misc_feature (279)..(280): n is a, c, g, or t
  misc_feature (285)..(287): n is a, c, g, or t
  misc_feature (289)..(289): n is a, c, g, or t
  misc_feature (292)..(293): n is a, c, g, or t
  misc_feature (419)..(419): n is a, c, g, or t
  misc_feature (423)..(423): n is a, c, g, or t
  misc_feature (518)..(518): n is a, c, g, or t
  misc_feature (539)..(539): n is a, c, g, or t
  misc_feature (547)..(547): n is a, c, g, or t
  misc_feature (570)..(570): n is a, c, g, or t
  misc_feature (593)..(593): n is a, c, g, or t
  misc_feature (601)..(601): n is a, c, g, or t
  misc_feature (636)..(636): n is a, c, g, or t
  misc_feature (640)..(640): n is a, c, g, or t
  misc_feature (734)..(734): n is a, c, g, or t
  misc_feature (756)..(756): n is a, c, g, or t
  misc_feature (763)..(763): n is a, c, g, or t
  misc_feature (786)..(786): n is a, c, g, or t
  misc_feature (788)..(788): n is a, c, g, or t
  misc_feature (797)..(797): n is a, c, g, or t
  misc_feature (809)..(809): n is a, c, g, or t
  misc_feature (816)..(816): n is a, c, g, or t
aaccaccagtgtcggaggtgttcaatacantgcccaagagtactgcagagaagcgacgaggaggccaggctctacgggggatnagcntgtgctnatnacaatgggcccggagagnaggnnaaaatgtnannnanataggtnaannaaatnatgggggntgtggggaagacacnnnntgcntgggcnatggnnagctctagnggattntgattnactgtaaatgntgggttgntaaaannaaataagatgttaatggaagttggnnncntttatgaaaannaattnnnanagnnagtgggaactgccagaggaagatctggcgtcacatggtcccaggaaagtgctgtgccctatccccactgataccatctgattccccgatgcctgtgcctgttccacctggacggtggccccctcangccnggcagcctctggacagagaggaaggaaggattggaaaagtccccgcagcacagcgacggtgggaagatgccttacgtctgatcttgatgggggcnctggcctggagcctgggcccncctgcttntggggggttggggagcaggccanatggaggtggtggtgccaggaanaaatggancgatgactgactgtggggtgggcccaggatttccncatnttggtgaagttgcccctgggaagggcagctgggggcagtggcgccagttcccttccatggtctcccggctggcaatgtggtgaagctgagtttntgtccaatgagcaggaagattntgagacntttcgcctgagatataagttggncnggggatgcngtttttcccccnaaaattnaattgcttttgccaatca

SEQ ID NO: 619020 - DNA, 534 bp, Homo sapiens
tcggcagtcctacggaaagtccattttacaaaagttatagtataaataatttttctgaaccagaaccggttggcgggatctcagttaagtccacttggcagtttccagacacaaggactcatattcaacttttctcttaaaggatccaggggctggatcccggacatttcctcttaaagaggaatcttatgtcatcttcggaaatcatgtatatgggtaataatataagtgtcttctcttcggaagaggtgatcctttaaaggccaggttctcttccctcgtgtgaccgtgacttagatggtagcagcactagaagctataaggggattgggggcagttgaggaagccttaggtaatggtcaagagtagaagtatttttaaaaagcggtggagaggggttggggaggggatttggtcccgggctgaagcgggtccaggccggggtaacctttacttataaaagaatcccaggaacacacaaaatattcttctcctcttactttggcaatccagttgtggaggcaaaaaataatc

SEQ ID NO: 619021 - DNA, 186 bp, Homo sapiens
tgctgtgtgctgggctgtctgcttcggagggtccttgtttttatttatttattattatttttttgagatggagttttgctcttgttgcccagggtggagtgcaatggtgcaatctcggctcactgcaaccaccgcctcctgggttcaagcgattctcctgcctcagcctaccaaatgaggtgagat

SEQ ID NO: 619022 - DNA, 102 bp, Homo sapiens
actgctgctgactattgttgctgcgaagcaagatgactcccatctccagtcctctccaaggttctgcttgctcacaccctggatacctgtggaggaaggaag

SEQ ID NO: 619023 - DNA, 403 bp, Homo sapiens
acagtatgtgccctagaaaaccctctaatgtttataccaaaggcacagtatagggccaacagcttagggtacacagggactcaaaagttgttacatagcagagagcatctcacaagaccgagcttgggacctctattggctcaaggtcctccggaacaggtgctaagagcacacacaaagaaaaatgtggttgttctcccatgtcaggctcagttgagccaaagtcatggtccaggaattagagcctcttcatgtccgtgcgcagattatcaaaccccatgcgcattcacaagctgttccagttccagagcacatatgaggtgtctgcacagttgagtcacagaagagcgagctctagagatatctctagtgatcacatattgataatattatcaccccatca

SEQ ID NO: 619024 - DNA, 615 bp, Homo sapiens
tcatttgttaccccggagtaaggatatcgtcgacccaggcctcgcaccctggagcccgccaccagacttctggtggtgacagaaggtcccggaagagcccatcacagagagccaccacacgtctccactaccatggctaccacatgctgccacaatgcacaggggacccgactgtggccacagtgcctgccacagatggccaccgacacccccagcaccccatgcagcacccccgttttacggcatacacactgctgattataaggaccacatggcgtacggaggcttctgcctctcccactgaccacagtggctacggcacgggccactacccccgaggacgccctccaccgcccaaacacggcaggaatgtacttggacaccgaggccaccaacaaccagagctggtcaagacacagactaacatcacggacaaagagcaacttacacaggaacggaccaccaacccaaggagaccatgacaatcacatgaagagggagcaccgctgacacctgggggaccaactagacccatggaacccacaagagggtgggcacacgacacccaactccagagaccttccagaacacaaaccggatgagccagaaagtccg

SEQ ID NO: 619025 - DNA, 280 bp, Homo sapiens
gcaggagaatcgcttgaacccgggaggtggaggttgtggtgaaccaagatcgtgccattgcactccagcctgggaaacaagagtgaaactcggtctcaaaaaaaaaaaaaaaaaatttaataaggttggaggaaggtttccaattttgtgtgggccttatttaaaggttgcattgggttgaatcccccttacagccgggggttggcacaagcttgttttggggggttgttcaccttttggatccccttaaatcgtgacttaacttaaataaacacctttg

SEQ ID NO: 619026 - DNA, 158 bp, Homo sapiens
tacaggcatgagatggtctagtaaggataaactatgttaggaaaaacaagacactctctgctgcatctaaatcaacgtgcagtgcaccaactcttggaacacaactacagaattccactgttcagtcccatcaatattataatacccagaagatttcc

SEQ ID NO: 619027 - DNA, 517 bp, Homo sapiens
ctttctttgaggcatccccgccgaagaatgctgtcctctactgcttgggtgtgttgaggatagctgaatgtcatcgactggcgccggtaagcctgtttagtacaagcctggagactgctttctatctgggccttcagtaatgctctgtttgcacccttcatgtcttgtctcagagtagtcattagtagaacgatacatgctggtggacttcttagactcaggagttccagggccctggtggggctctagggagacccgtatgcgctgctgccgggtggtgatgccagtgccctcggctatctggattggctgcatgctggctcggcgcagggtctcttgggggtctccagttttcatctcctcatctgtgatggtgcccaggctcagggaaggcctggactccaggggatagcaggtcttcagatgtggggggcacactcgattgcgctgctgcagctctgcaaggaacccacgggcagaggaggaagaattccatcctggagttcaattactgtga

SEQ ID NO: 619028 - DNA, 320 bp, Homo sapiens
actgctgtcactccacccagttcctctccatgtgagatgtatcaggccctgtgcctggcggctgtgctgtgaacttcaccaggcggagtgggcttcgctggatatttcgcagaggaaactctacagggaagtgatgctggacacttacaggaacctgacctctatagggaaaaagtggaaagaccagaacattgcatatgagcaccaaaaccccaggcgaaacttcaggagtctcatagaagggaatgtcactgcacttcaagaagacagtcattgtggagaaacttttacccaggttccagatgacaggctgaacttcc

SEQ ID NO: 619029 - DNA, 936 bp, Homo sapiens
gggtatttagagcgcagcggatgacgggccggatctgcttcgccggcgccggccgtaaatcttcgtgcccggtgctgtgtcgctggcgtgagttcttatggcttctttgaaagtacagtggatgcatcaaaggactgtcgaaaatctccctatcccagaatgctgacggatgtcacatggaaagctggcacttggccaaactttgtggccctaagaatcgaagtgttaggcatcttgcctgtgaccagatgcgcttcatacggacttggtgctacgtgggaggatcccgacagtacgagattccatgggacccatggacccttgactacatgctcaccccccgagggcgaccattcaccaaagtaaagcagtgcgtgctagtacaaagcggtcatctccataactgggcaatgaacactggaagatcgtgcttcaatgtgtgctcaagcaaggggatcctctaccagtagccggagcgcgagcgaggtcatccctctggtctcggtgaacatggggggggagcaagttgcggggcttagggggcacaaggaaccgaatactgtgtgtgcattgatcttggatgtcaattttctacccgacagtgctctgcctggtaatgaataatcgataggaaggatgcaaatgcgcaacgtgagatgcctctaacgaatgccacagagtggtgaataattatttatagaccaggcgtagttactaaagaatgaataaactgattatatatccatgagcatgatccccagttaatgggcatgagattgcagagtcaatagtccgtaatggtccgacacggggagaaatagagcagtataataaagggagagactgcttgtagattaaagaaagaatcttacacggtgtattctaaataattataagaagagtatatagaatataaataaaatgatagcagagaaa

SEQ ID NO: 619030 - DNA, 351 bp, Homo sapiens
gagtgcaagatctggaaaaggacagatgctggtatgactgacctcacttctgtgcaagagcttggagcactgtctttcaagcctgagtctctctctctctctctcttttttttttttttaaacagagtcttgctctgtcacccaggctggagtgcaggggtacaatctcggctcactgcaacctccgcctcccgggttcaagcaattcttctgcctcagaatcctgagtagctgggattacaggtgcccaccaccatgcctggctaattttggtattttttaagtaaagatggggtttcaccgtgtgggtcaggctggtcttgaactcctgaccgcaggtaatccacccgc

SEQ ID NO: 619031 - DNA, 306 bp, Homo sapiens
acgctgcacgcgttcaaattgctttgtactccatctgccgtcgcagaactgcccaccctgctgcaaaatacgtgcgttgagctgggcttagcggattgctgccggtggggtcatcaatcgcaatccgtaagtcttcaagacagacaaccgcttgtgtctcgataagcgctcggttcagttaatgcatggcatcgtacacaaatccgcacaaggcgcgcttgtactttggcaagcctagttttggcccgttgccgtctgcgcaaacccagttgtttacgagacatacaccgttgcaagtaacgcagg

SEQ ID NO: 619032 - DNA, 353 bp, Homo sapiens
  misc_feature (163)..(163): n is a, c, g, or t
  misc_feature (198)..(198): n is a, c, g, or t
tctagatgatcccggctatcacatatcatcagtgttctctattcaacttgttataccttatgaagcttctctcttcaagataagcaaagtattagaatccacttggaatcccaattcaatttgtgcctcaaattctgcagatggataccttcggactcccaanaaatccaactacatacaaaaacttaatgcagcctntgtactacatttaaggcactatgtgagaacaagttaaaaaggtgtaggtcactttcccacttgtttaactttgatgcttaatttttactgggaggtcattaaacagaaataatggataaatgttgataagccggggtaccgaagctcgagatttc

SEQ ID NO: 619033 - DNA, 256 bp, Homo sapiens
caacctcagccttacaagtagctgggattacaggtgcccaccaccatgcctggctaatttttgtatttatagttgaggtggggtttagccagattggccaggctggtctcgaactcctaacctcaggtgatccacccgcctcggactcccaaagtgctgtgattacaggtgtgagccactgtgcccggccagcacctaatgtgtatcttcactaattttcccctactagaatgtcagctccaaagcctgttaggcc

SEQ ID NO: 619034 - DNA, 265 bp, Homo sapiens
gacagaggggaacaagatggcggcgccgaaggggagcctcttggttgaggacccaacttggggcttccggcgcttctgctgctgaccatggcctttgcccgaggttcggggaccccttcggctgaagcatttgactcggtcttgggtgatacggcgtcttggccaccccggcctgtcagttgacctaccccttgcacacactaccctcaagggagaggagttgtacgcatgtcagagagagttgcagactgttttcaaattgtca

SEQ ID NO: 619035 - DNA, 291 bp, Homo sapiens
caaggtctctggaaaagggtgtaatgttagacagtgaggattgttaaaggcacgagccatactcctactcggagtagcttgacagatgtccctactggtgttggaaatgagttccttagctccatcaccacagaggacagagtacgacagcgacgccggtcaaagggcaggccacaagataagttgcaggtggtcactgtggaaacactctgtagcaacccttccctggccctgacccttggacctggttccatgtcccccccaggcctggctgggtggccccagtgcagg

SEQ ID NO: 619036 - DNA, 175 bp, Homo sapiens
taggctcatggcgtctactatgacactttgacgcatcgttcttaggaatatcccgcgtcatacacctagtcacgatgttgttggttgcattgtttacgcgaaaagcacgcgatgagatggagaatgtcgcgcacgtctcatcgttgcgcaagcgtgggtaccgcacgctcgatac

SEQ ID NO: 619037 - DNA, 671 bp, Homo sapiens
  misc_feature (327)..(327): n is a, c, g, or t
  misc_feature (477)..(477): n is a, c, g, or t
aggatgactattttcccacacagtactagcagctgcttgggaagcatagtgttaggtatttgacctgacctggcctgtaggccccaaacgatgatcgcctgcacagggctgcatgcataataaagtcctacttttcttgcctcgctcgtgatcggtggaactgcacctgagaacaggtgctgcagaccagtgacgctggtacatgggacttatatttttacttactaactacaagaaaggaaaggagccagctcaaacttgatttggagcctgatgactgtgcatgctatggctgcgataatatattatataatgaaactgcatgtngcaaccgggacgaagatgagatgggaaacgccaaacgctttggttattagatggtcataagcatgctctgtttcactaggtggttgagttccagaatgttcttttgttttctaggccttgaagaaacacgtgcctgagcctagatgagtngactacaatttactgcacttaatacctcacacgttgaactatctatacgcctttgttacccacggcaatgctgttggagatatgtgatgttacacagcatactgcatagctgtttcggcccgagtggctataaccatatagggaatgcatgatggtttattgagagacccgttatttcatggcaatgcttcttc

SEQ ID NO: 619038 - DNA, 276 bp, Homo sapiens
cggacttgtgaagaatggacctgtgcaataaagcatgacagtctgagactaggtccctgccctcatggagcacatgaaccataatcatttccatttgcacctttttcacttcccctcattcagaaaattgcacacagaatcacagtaggagagctctatccgtggtcatcataaaacttacaaatacgcaaacatggaacaactgctaagcagaaagtttctctatgttctgtacactccatattctccctcttatgggtgcatcctggtatctgg

SEQ ID NO: 619039 - DNA, 1040 bp, Homo sapiens
gatgactgcctgtgtgcatgcgtgtggtgtgtgccctggtggtgcccgtgtgtgtgccctgtgtgatggggaacctgctgtgtgtgcattcctgctgtgatgtgtttctgtgcatgtgtgcatcctgtgtggcctggggtctgctggcctgtgtgactgtgtgtgcctgtgtgtgcctgatgtgcctgctgtgatgcatctgctgtgatgtgcaatggcctgaggataatgtgagttggatgccctgacaccaatgtttggtgcctgcttgtgtcaatggacatgaagatcaatgtccctggatgtgagatctatctcttctccctgcccattaatggaatcagagatcattgatttcttcctgggggcctctctcaaggatgaggtttcgaagattatgccagtgcagaagcagagccgtgcctggcagcgcaccaggttcaaggcatttgtatgctatctggggactacaatggccacgtcggtctgggtgttaagtgctccaatggcagtgttggcaacgccatcctgtggtggccatcatcctggccaagctctccatcgtccccgtgctgcagaggctactgggggaacacggatcggcaagccccacactgtcccttgcaagggtgacaggccgctgccggctctgtgctggtacggctcatcccttgcacccaggggcactggcatcggtctccgcacctgtgcctaaggaagctgctcatgatggctggtatcgactgccttgctacacctcaggcccggggctgccttgccacccgtggccacttcggccaagtgcccttttgatgccatttctaagacctacatgtaccttgcccccgactctggaacgggcagacgtggaattctccaactgtttccgtatcagggaagtcactggcgagcttggtaagaacccaagcaagagtctgcggacagggacctcaggtcccaatgttgctaaacatagggtttattccgtaacatctgtgactatcgtgaacaaacaagtcgcgccagaatcgtaggtccct

SEQ ID NO: 619040 - DNA, 360 bp, Homo sapiens
gagccctgtgattgtgtggtgtatgaaagaggagatcaagttgctcgcgaaaaatgatacatgggaactcacttctctaccgcccaacaaaagtctcataggcgtgaaagtgggtgtacaaaataaaaaaccaatccagatggttctatcaccataaacaaagctcgattggttgcgaaagggtataaacaaaaggaatgagaagatttcgacgaacagcgttgccgaattgggaatacgaagcaaattaagtttacgggaggcattcttgaagtaaactaaatttaattaacagccttttagtattcttactttaaataaatgtctagaaataaattagggacataacaccacacaatt

SEQ ID NO: 619041 - DNA, 154 bp, Homo sapiens
gccccccccccccccccccccccgcccgaacaacaggggcaaaacagccttcctttaaagtttttccaagtcccctttttaccctttttttggggcccaccctggtttgggtttcttttttttagtttcagtaaaactttacccttttttccca

SEQ ID NO: 619042 - DNA, 459 bp, Homo sapiens
ctgtcgctctcgcggccgcctcattctgccgtgggcgcttctgcgcctgctgcgccggtgccgcttccgggggtttggctgcgcctggctgtccctccgcgggctctgtggctgcttgccgcgtctgccctgcgcgcttttcggtctgtttgtcgtcggccgctggcgcttgctctccttctgcctccatcaggcatcatcaccaggccggggtcagctcatgtgttttgtccaggggttgcacactgcagtgtgcaggcgtcattcatcaccatcaccgcctcagttttccagcagtcactgcggcccagtcatcattgcaccccagcgcatggggggacttctgcaccatggagctttcaaggcagtccatcacagtggcagtcctgtccacgcaggtcatctttcatcataccacgctcattgtgtccagctcgtcctcttccagttgttggctcc

SEQ ID NO: 619043 - DNA, 237 bp, Homo sapiens
  misc_feature (194)..(194): n is a, c, g, or t
  misc_feature (202)..(202): n is a, c, g, or t
tttccgtgtaagtttggaaggtgatccttggaaacaccaattatttactccataccaacatccaaaagatcacttgacattttcattggtttgacttcagaattagaaactctactttttataaaataaacattataaactataaattgtgcctacccagtcaacagtcattgccgaagcttttcatgactttntgattgantaatctgaattagagattttttcaataatgttaca

SEQ ID NO: 619044 - DNA, 612 bp, Homo sapiens
tgttctagaggatcctccaacgctgctgcacagacaaccctatgaagcaggtacactgtggtttccatttgaagatgaaagatagtgaccagggacagtggctcatgctcagcactttgggcggacaaggcaggtgggtcacgggaggtaaggagtttgagaccagcctgatccgaacatggcgaaatccatgtctctacgaaaaatacaaaaaaagattgggcgggtgtggtagatacgtgcctgtggtcccggctatttgggaggctgaggcaggagaattgcttgagcaccagaggtggaggtccaatgagtcgagatcatgccactccagcctgggcgacagagtgagactgtctcaaaaatttttttttttagagtttaagatgagaaagcaaagggaaccttttcctctatgtggaaatacttcctgggaatcattgggtagattctcatagaagggtagtcagagtcttccaccagtagtcaggaaattcaagtttcacaatccttttcataaacccctctgatcttctaggtgaggacactgaggtccagtgagtgcaagtgattacttctgggcagagccaggcccgtgccagggcctctggt

SEQ ID NO: 619045 - DNA, 386 bp, Homo sapiens
caaggaaggctctcaatcactgaaacttattaatattactggtgttagagaaatgaatgagcctacaaaatgataggactgttcctgtggtgtatgcctcggggtaatccgagtaacgtcggggcgtatccggataggccgagaaagtgttgtgggaagaacgttagatttacgccgattaatattgatagtgaaatggattttggcgtaggtttggtctagggtttagcctaagaataagggaaatccagtgactgaagcctcctatgatggccaattccactcctaattgataggaccatagtggaattgggctacaacgtagtaacgtgtcgggtaagtccgatgtctagtgaatggacgtttagctagtgccattgccaggt

SEQ ID NO: 619046 - DNA, 1063 bp, Homo sapiens
cgggcgtgttcgctggtggcgtcgggaagccgagccggactggttacaggatgatcacggacgtgcacgctcgccatcttcgtcctaacatgctgggcgtgtcgctcttcttgtcttgtactgttctctatcactacgtggccgtcaacaatcccaagaagcaggaatgagaagtggcgcttgtctccgccgccagggttccaggacatagtctgaggcaagatggagggtatgaggggccttcagcacttcacttcatcccttctaccgcatctacaagcatacagaagcaattacgcctggattatccaaacaacttttagttgtccgtcgagagtcttgccttaatccgtatggaacgaaggaagcgtgcctagctggaataggggcccagatatagggggcttgctattgacgtactcggcgtccccgcactaatatcaaagacgtatagacgttttgaacaatgaagcaatgaatagggaattctcccaggtcagacttaccacactacaaagagtagagaggaaggggacttagaaaaaatgccccgggggtgaggcggcccataaaccagggtacagcaccacaaaggcagctctgaaaagaaggaggagcacacaacactagaagtcgatgtggataaaggcgacgaactacaagggggcacgcgggacagaaacaggagcacatgacatcggacacacgcgcaggaaagagcagtgaagcaacccctggtcaagcgaagcacgcacaaactgggcgcgggggacgaaccacaaaaatgtggttacctcaaatacaccccctacgaagaaaccagacccaaagaggccacacctaaaacactggaacaactgatatagctgaaagctactcaacaagacctagtatattgccagctaccggtacacaccagtattttagaataatggaaaagattgatcaaacctctattatacacgagacagacagtaaagaaagaaagaaacgcagtaaccgtgacgccgtcccccagtggtccaaacagcgtcacattgacgcttagtgccaagacgatccg

SEQ ID NO: 619047 - DNA, 1028 bp, Homo sapiens
  misc_feature (94)..(94): n is a, c, g, or t
  misc_feature (157)..(157): n is a, c, g, or t
  misc_feature (232)..(232): n is a, c, g, or t
  misc_feature (248)..(248): n is a, c, g, or t
  misc_feature (334)..(334): n is a, c, g, or t
  misc_feature (364)..(364): n is a, c, g, or t
gctggagtctggggctgcggcttcccagaggcgcgagtcgcttttccagtgagcctgaggcccaaacggtggcctgggcctgaagggtcccccngccatgccctgctggcctgcgccatcaatctgcctgcctgcctcgtccctgcttctctgtgcntgagtgctgcctgctgctggccatggcagctggtgtccatgtgcctcatgcctgctgctgcccagggtgcctccngtgggccctccctggngtcagcatgcccggggtgaaactgaccacccaggcctactgcaagatggtgctgcacggcgccaagtacccgcactgcgccgtcanacgggctcctggtggcctgagaagcagaangccgcgtaaggagcaacatacacctgggacggcccggcagcccaccacacccatctatcagtggactgcatccccctcttccacggacaccctggcccatcagcccccatgctggaggtggctctcaccctgatcgattcatggtgcaaaccgatcatagctacgtgatgctggtcattatcaagctactgagcgaataacacaggatgccagtccaaaccaggaagccaagcacgtggcctccagaatcgccagaggctacaagcgagaaatgagaccatcaaggacgagaacagcacagaaacgatggacaggaagcgactacgagccacgagaacgagcacaagagaacagatgggaggagcagaagacccaacccagcacaaagagcagaatgccaaaagacaaaagagaaccagcacgccctggaaggccgcctcacaaaccacggagccgcacaccccgcgctacaacggcaagccgaaaaacagaagaaatagagggggcatagcgttgtggacggcggacgcgtggactgctccggactacctacttagccggacctagtaacgagaaaaactggaaggtggaggggcagacgaagagagaagcaagaaatagagagcggtcagaggagacagtacaggaagcagaggcggatcag

SEQ ID NO: 619048 - DNA, 392 bp, Homo sapiens
cctgacgaccatccaccccaacacggccgtttctttctttcttttatttttttgagatggagtctcgctctgtcgacccaggctggagtgcaatggtgcgatctcggctcactgcaatctctccctcccggtgagaggtgaagccagctggacttcctgggtctagtggggacttggagaacttttctgtctagctaaagatttgtaaatgcaccaatcagtgctgtgtctagctaaagtttgtaaacgtaccaatcagcactctgtaaaaatgggccaatcagcactctgtaaaatggaccaatcagcactctgtaaaatggaccagtcagcaggatgtgggcggggtcaaataaaggaataaaaagctggttaccgagccggcagtggca

SEQ ID NO: 619049 - DNA, 653 bp, Homo sapiens
  misc_feature (28)..(28): n is a, c, g, or t
  misc_feature (146)..(146): n is a, c, g, or t
  misc_feature (174)..(174): n is a, c, g, or t
atgtatctgtatgttggtccttctttgngaatgtttttcgaggatgagaagcttgccttcttatcctagatagatgcagaatttgagaaggtagaatttctatacatgacacaatctgttagtggacttgagaatctcattaagantacactgttgggtgtagtggtgtatgcntgtagtcccagttactcaggagcttgaggaaggaggattggttaagtgcagatgttttgggctgtagtgtgctatgccagttgggtgtccacactaagttcagcattagtattgtgacctcccaggagctgagaccaccagttgcccaaggagaggtgaactggcccagatcagaaacagagcaggtcggccaggtgcagtggttcatgcctgtagttccagcgctttgggaggccaaggcgggaggaccccctgagcccaggagtttaagaccagcctgggcaacaaaatgagaccttctctacaaaaaaataatcaaaaaattagccaggcatagtggcacatgcctgtggtcccagctacacaggaggccaaggtgggaggatcacctgagcctaggaggttgaggctccagtgagccatgtttgtaccactgtactcaagcctaggccacacagagagaccttttctcaaaagaa

SEQ ID NO: 619050 - DNA, 244 bp, Homo sapiens
tactaactctgtgaagttgggcatttaatttttctaaacatctctgaaccccattttccccatctgaaaagtgggaatgctaatactttgcaagactgttgtagagatgcaaccaaatagtgtgcaggcctggcatggtgcccaaagcagagtgggcacacgcagtgttggctgcacccaccttccttatacattgattgcagaacatagaaatgaacctgagaagaacgtgaaagtgaacctg

SEQ ID NO: 619051 - DNA, 1545 bp, Homo sapiens
gctgccacctcacccaccgcaattcatttatgtagcatgtgcacatgtggtgcatgctccgtgccacgtgctttctcagtgcctatgcctgtgagcctcgaggtgcttggatgagctgtggaaggacatggctagttgctcggggcagttgcatgcagtgacatcaccatggagggcgaacgcggccacgcggacaggcggtggccccgtggacattgcagcagcacagggaggctgcaggggcgctcaggcctgcggtgcagcgcggtcccacgagggcacctggcggcccaaggggtctgggtgctgggagagcggccccacagtgtggactatgggtggactgctggtaatgcccttcaacctgctcaaggccccttgggggcttggccttttggcgcagacgaggtacagcaatccgatggtggacgtccaaggtgcaattggagtgcaaaggacccaagaacataggggcgaatggcggggaccgggtgcctggaggtgaagtgacgctcttcagggaacgggagggattgcgtggcagggcacgggatgtgacaccgaagcgcaaggctagggccgcgcgaagccgggccgaggggcacctgggcgccttcacgagaaagccccaggtgggcacaaagggcgcggaggccatcagccaggatgccgggaagacgaggaagccccggaggaatccgcgagagccctaacaaagcgcggtacacgggggcctgtggcgaggcacgaaagcggtccgaggagtcctacccaaagcttggggaggagtggcgaccagcgttagccccaaaaccaaacagtagtaggccccaagaagagggccaccagagggaacaggccaatgggtcacccagggagtgggcaacctcgtttgaactaaaacgccacgaggagcatattggcacactgggggaccccggaggtatgattggacacgggccagagagcgcaccccggcgagcagacagggcccacgaagtatccagcgagctcttcccgcgtgagtaacccgaacccgctataatgaggtccactgtgggctgtgcggtggacctatgtgcggtgtagacagaacatagcgcgaggaggaatacgtgtgattctctcgttatgacactatttccactgacgccaagcggcgggcattagcgcgaagcacactatattgtgtcgtgtgtccaccttcttggtgactcccccccagaaagccgcgaactcatattgtttagtacaaacaggtggtgggtaaacccacgcagattaacgacctgtgtggcgccgctgtatcattctcgggacacaagatacaaccccgctcttttgtcgtgtgacgcgaggtaagcataagtcgtccgcccagtcctacaacctcactagttgttcagcttcgtagatggaatacaactatcttcataacatgaatgaggatggaaagtcacccgtcttttgagtcatattaattatcaacatggatggtgacctggcgtagcaagccacatgctgaggtatctttgtacaacgctg

SEQ ID NO: 619052 - DNA, 198 bp, Homo sapiens
cactcactaatagctccaaatgaaccacagttatatcccaatggaggatttatatcttaagttcttgtactaaaaaaaaaaaatccataccaaaatatttatacaaattaagattgcatgtaggttttaaaaaacggcatttgtatgattgtaagacatacattatggggctcaggtaattatcattagcttacaaaa

SEQ ID NO: 619053 - DNA, 107 bp, Homo sapiens
acccgtcttcgaatcagcttcacgaagtcgggttgtgacttcgatccgaactgagagaggataaagggattagcatacggtcacccgctagctgccttctgtacccc

SEQ ID NO: 619054 - DNA, 302 bp, Homo sapiens
tgaggtcccgaagatcactcatcggtgcttgggagagacagagtgtgagggtggagagttcagcatatcaaagcaccatattcccaggtatcattttctgagccccaacaatacacacacacacacacacacacacacacacacacacacaaaaatatagtgtgtctttttttttgtgacgcgggggatatcttgggtgagacagagacgagtgagtgggggggggggccccagcgagtggctacagaatgagggggctgctccccagaagacgcccaggtgcgaggtgcacttgtgcaacg

SEQ ID NO: 619055 - DNA, 364 bp, Homo sapiens
caaagtgggaatgaaggaccattaagaaatcatctctgtgccatgcgcggtggctcaagcctgtaatcccagcactttgggaggccgaggcgggtggatcacctgagctcgggagttcgaggccagcctggccaatatggtgaaaccctgtctctactaaaaatacaaaaaaaaaaaaaaaaaaaaaaaatagctggatgtgatggcatgtacctgtagtcccagctactcaggaggctgaggcagaagaatcgcttgaacccaggaggcagaggttgcagtgagctgagattgctccattgcactccagcctgagaaacaaaagcaaaactctgtccccaccccccccaaaaaaaaggaagga

SEQ ID NO: 619056 - DNA, 1393 bp, Homo sapiens
  misc_feature (691)..(691): n is a, c, g, or t
  misc_feature (828)..(828): n is a, c, g, or t
  misc_feature (1272)..(1272): n is a, c, g, or t
gaggagaagcaggagctgtcgggccataggatcaataatccagtcgtggatgaccagacgcgatccttatctccaagcaagtgcagctgaatctgcccgagtggcttgggccggcgccctggggccccgtcaacggagccaatgctgcacgaaccgttgcgcaggccgcgtgctgacacacggcttgttgtaaccactcgcgtaggatgaagctctgcatcacttcgtcgtggacacaggcgcatccaacggactaacttccgtgtaacccaagctagtagcgtggtcagtgcatggtcaaacagcttgaacagatctagcttctcaggaatcgcataggcaaaggcatgaggaagaagaaccatagcagaccaattgacatgttgtttgctctccaaatgtcgcttgcggcactagatgtcacttagcttgaaaggaccaaaagggactgccgacgaattggaccaccacacgcgcggtcgttggcataggaaatagggctatgtggtcgtcgtagccactctagtagttggtagggcccccataggggctcccaagggaggccctcgaatttgtccaggaaacttggcactgcgcagaaggtaaatggagcggacaattgagcctatgcaggagcatgcaatgtctcggagtggctaataccggtagctgtccctatgtgagaatgtcnttggacccacccctggacacggggtgggtacctcccagtccctaaccatgcataggagcggtcgcaagacgtttcgcccggtgaaaggtatccctccgatggatgaatcaatccttttaatgaataactaactcatntggtacagaacacccatattaagaaccatcgggaaaaggggtccttttctggacggaagcttggtgtatttggccagacccgaatttggtgaccttccccttggtttttgggacacattgaaaggccaaggggccaatctttcacctttgggggcacgccatgagagatggcctcccaatcgttggaagccggcctccccaaacccctgaaaaaaggacagttccaccttgggaacacctggggcagggggaacaccccggttctttcgtgagaggccattgcgagattgtttgagcacagaaaaggccaatgaggaacatccttggggggaccccccaaagagtccccccccaaagtttgattcgaaaggaaggacaaggcaagaagaggggcggggggtcactatttacaaaaaacaaatttcctgttgtggcaccaagganccccacaaaagcgaacgagagggtttaccaaaggcttatttcattttgggcatccccactttttacaagggaccgccgacacgaggtacgccctataccccatccaagtttttttccccaa

SEQ ID NO: 619057 - DNA, 167 bp, Homo sapiens
gacccagatgatgtggtacacgtggccaaagaagagcctggtgctggtgcatgtgcttggactagcatttatgctggacgggtgttattctacggaggagcatacttgtacaaaatatttggcacttcaaccacgatgacgtgtactacctgtggacataaacgtac

SEQ ID NO: 619058 - DNA, 273 bp, Homo sapiens
  misc_feature (51)..(51): n is a, c, g, or t
  misc_feature (121)..(121): n is a, c, g, or t
gccactcatgcactagtactctcctggtccggaaaatcctcagactcctgnccataaacacccatgctactggggtggtcctgtcggaatgaactctgctgcccgtagctgctgctctgtnggctatattgacttggagcttggctgtaggatccagttaggggagggtacctagtgggaggctgctagccatagctgcattgttgaccatagctactctgctgtccatagctgctctgttgtccatatgtgttctgctgacagtcactgctc

SEQ ID NO: 619059 - DNA, 627 bp, Homo sapiens
  misc_feature (1)..(1): n is a, c, g, or t
  misc_feature (24)..(24): n is a, c, g, or t
ncttgtgtcccgaggcaagccagncagtgcctggaggtggtggcaatgagcggtgctataatatccctagaattatggccttatttcactcaggtttctatatatgattcctttgttgctgttaaatacaaattggttctgcttctcactccagcctctggtccaagtgctgtcccacctccaccctgagtctggtcacctcacagctgtgtaaggtcagcagcgacagtcggctgaaatttccacatggaacaatgcattgggagagcattatttgctgggaataagtcagttattactcaattttttaaaaatggttcaattaattgctaaagtcaaaaaatagcatgttttcaagttgacaatttaccgtagaaaagaaaaaagaataatatgtaataaatctgattttgaacattaagaggtactcagtttttatcaactaaataaatgttgcagaaatatttagagaaccctagcttggaagggtgccaaacttattctgctggggcattcccagtgttctagacggccttccggactgtgcagaaggaagagcggcacagttgctctgcatctgtggatttggtgtgaagaagtaacaacagacaatgctcatctgctgtg

SEQ ID NO: 619060 - DNA, 115 bp, Homo sapiens
catcttccccactgctgcaccactttgcactgtgcctgctgtctgctggtgccctgcaccctgctctctgttggtgcacagcaccatgcagtctgatggtgcacagcacactgtg

SEQ ID NO: 619061 - DNA, 614 bp, Homo sapiens
  misc_feature (21)..(21): n is a, c, g, or t
  misc_feature (29)..(29): n is a, c, g, or t
  misc_feature (53)..(53): n is a, c, g, or t
  misc_feature (59)..(59): n is a, c, g, or t
  misc_feature (65)..(65): n is a, c, g, or t
  misc_feature (76)..(76): n is a, c, g, or t
  misc_feature (96)..(96): n is a, c, g, or t
  misc_feature (108)..(108): n is a, c, g, or t
  misc_feature (154)..(154): n is a, c, g, or t
  misc_feature (193)..(193): n is a, c, g, or t
  misc_feature (197)..(197): n is a, c, g, or t
  misc_feature (205)..(205): n is a, c, g, or t
  misc_feature (211)..(211): n is a, c, g, or t
  misc_feature (219)..(220): n is a, c, g, or t
  misc_feature (226)..(226): n is a, c, g, or t
  misc_feature (232)..(232): n is a, c, g, or t
  misc_feature (235)..(235): n is a, c, g, or t
  misc_feature (261)..(261): n is a, c, g, or t
  misc_feature (266)..(266): n is a, c, g, or t
  misc_feature (273)..(273): n is a, c, g, or t
  misc_feature (279)..(279): n is a, c, g, or t
  misc_feature (283)..(283): n is a, c, g, or t
  misc_feature (295)..(295): n is a, c, g, or t
  misc_feature (309)..(309): n is a, c, g, or t
  misc_feature (312)..(312): n is a, c, g, or t
  misc_feature (342)..(342): n is a, c, g, or t
  misc_feature (359)..(359): n is a, c, g, or t
  misc_feature (370)..(370): n is a, c, g, or t
  misc_feature (372)..(373): n is a, c, g, or t
  misc_feature (382)..(382): n is a, c, g, or t
  misc_feature (411)..(411): n is a, c, g, or t
  misc_feature (422)..(422): n is a, c, g, or t
  misc_feature (429)..(429): n is a, c, g, or t
  misc_feature (446)..(446): n is a, c, g, or t
  misc_feature (453)..(453): n is a, c, g, or t
  misc_feature (460)..(460): n is a, c, g, or t
  misc_feature (491)..(491): n is a, c, g, or t
  misc_feature (495)..(495): n is a, c, g, or t
  misc_feature (498)..(498): n is a, c, g, or t
  misc_feature (504)..(504): n is a, c, g, or t
  misc_feature (594)..(594): n is a, c, g, or t
tccaaagtcagtcccctttantaaaacantttcacagaccagaaaaacaaaangaaagnagaaanaggccccaggnaggagccacaggcctggccncacatgaccccngccccagcaacttgaacaggacaagcagcagccacatccttaaggncgggaaagtaagatgaggatttggatcctgcattgcccngccncccacccnatctcnccccaaannaaaaanagccanccntgggaagcagcagagttaagacgtcnccccnctgcccnagtganaaanacaccaacaggngagcatgttcaganggnacagaatccagggactgcatttcatgaggngaaactgggaccaaaanatggggggggngnnggggggggngagaaggcaagcgcaaagagaaccttccnccgtttctacncatcggntcctgacgctgagtccnctgagcnggggggngtactggctagttcttcttcttcagagtccncgcnccncccccncttctttttgctcttgttctctcccgaagagctctcatcactagacacaaactctttgctcttgaagctctcgcttagctgccttgaggncgacttggatgatgagcccc

SEQ ID NO: 619062 - DNA, 613 bp, Homo sapiens
  misc_feature (589)..(589): n is a, c, g, or t
caagaggaccccgctcccaccggagtgagggggcaagaggaagagccgcgggcgggggagaaggagcgtaccggcactgagtactgcatggggagaagtgagaatcagctatggataagggccagagatatccacagctgggaggagcccagagacggttggctttatacccacacagcaacgggtccacggctttacggtcggtcggataagggcggtaaacatgtttaaaaacaaaacaaaacaaaaaagaggcactagtctatctgcaatcactcaaggaggcatttccataggaaacagactatgatcactccatttattcttcccacacacttacctaactaagtcttggctttaataaatgagcaacccggggtatagtcttaaaattctgcacaataaatttggagaaagaatggtccctctgggaaggtatcggggggtggcaatcattctcaaccggggaggtgatctggccccttgactccagccgggggacattcaaaatggtcgggggacagtttgcattgtcatgacgtgggggtgcaactagaagccaggaatgctgtcaaacattctaccatgnacagaacaatctacaagagcaaag

SEQ ID NO: 619063 - DNA, 765 bp, Homo sapiens
gcttcccactcgggtttgacctacagccgcccgggagaagatggctgccccagcagtgtccgggctctcccggcaggtgcgatgcttcagtacctctgtggtcagaccatttgccaagcttgtgaggcctcctgttcaggtatacggtattgaaggtcgctatgccacagctctttattctgctgcatcaaaacagaataagctggagcaagtagaaaaggagttgttgagagtagcacaaatcctgaaggaacccaaagtggctgcttctgttttgaatccctatgtgaagcgttccattaaagtgaaaagcctaaatgacatcacagcaaaagagaggttctctcccctcactaccaacctgatcagtttgcttgctgaaaatggtcgattaagcaatacccaaggagtcgtttctgccttttctaccatgatgagtgtccatcgcggagaggtaccttgcacagtgacctctgcatctcctttagaagaagccacactctctgaattaaaaactgtcctcaagagcttcctaagtcaaggccaagtattgaaattggaggctaagactgatccgtcaatcttgggtggaatgattgtgcgcattggcgagaaatatgttgacatgtctgtcaaggaccaagattcagaagctgggcagggctatgcgggagattgtctaaaagtgttggtttcctgccatcagtgaaaattctttaacttggagcaaccctttatagcttccagaaccgtttgcatatcgcc

SEQ ID NO: 619064 - DNA, 277 bp, Homo sapiens
  misc_feature (51)..(51): n is a, c, g, or t
gggcttttttaaaaaaaaaaaagtcccccaatcaggaaaaaccctcaaaanctttttcctagtggggggggtaatcctaaccccccgggtggccgccaggtgggccctgcctttttccagaaggcccctggtcccagctttttgtccaactgttgattatgtgatttttttgaaacgccccttttcaaaagcccgggggtttccatttttcctttggccagccccttttgttttttaagcttttggggccccataaaataggacgtgctgtttccca

SEQ ID NO: 619065 - DNA, 413 bp, Homo sapiens
ttaatgttttctctggacagagatgaccttgatatctatgacccagtggcctgttcttaggcaccacagtcagtccataaacatgggcgcaggtctgctatgagtcaggtctgtgcccgcccctgggtgctgcctacttgatagcactctgtctctcttttttttttttgagatgaagtttcactccagcctgggcgacagagcaagactccgtctcaaaaaaaaaaaaaaaaagagaaaagaaaaaagaaatgcagtttgaaaccctgtctctactaaaaatacaaaaataagccgggcatggtggtagtctcctataatcccagctactcgggaggctgaggcaggagaattggttgaacccgggaggcggaggttgcagtgagccaagactgagccactgcactccagcc

SEQ ID NO: 619066 - DNA, 158 bp, Homo sapiens
aatatggcaccagcgccgggctcctggttgagggcctcaagaagcttacaagtcagtggcgaaaggcagaggggcaggcatatcacagtggcaagagcaggagcaagggggagggaggtagcagattctttaaacaaccagctctcagcacaaactcg

SEQ ID NO: 619067 - DNA, 89 bp, Homo sapiens
aattcaagcttctaacgatgtacggggacatgggtaaaattattaaatagttgtataataaaaataattttttcccttgtttgcgaaaa

SEQ ID NO: 619068 - DNA, 529 bp, Homo sapiens
  misc_feature (280)..(280): n is a, c, g, or t
  misc_feature (300)..(300): n is a, c, g, or t
  misc_feature (384)..(384): n is a, c, g, or t
  misc_feature (413)..(413): n is a, c, g, or t
ttagcatcaatcccgtttgtagaatttggatcaggtataggactgaatgcctcagtactgacttaatgtttagagatcaaagagcgaccctgtgcagcagacatcggattgctaagaagatcattaatcatttttaaaatgtgatcactccagatttactattcaatggtcattggctatttgcctgtgtgttaattacggtgaggaaactttctatctgttgctttcaacaaagcttatacactgaagaagagcacacagactgttctgtcacctcacnattcacacactctccgcctnctctaggtttgagctccatgttctgcgtttcacgtcttgcttagtgatgggcagagagcaaagtcgttaaaagtatactgtccnttaccacgattctcgtaaacacaacaccnatacaccctggtacttcaacgcagagtcacagtgtggggccagatagcttctgtaggtaagtaggactgagagagaaagtcctggttacctaattccttttcagaggcctcatttg

SEQ ID NO: 619069 - DNA, 325 bp, Homo sapiens
  misc_feature (16)..(16): n is a, c, g, or t
  misc_feature (21)..(21): n is a, c, g, or t
aaaaaaacttttcctncacangtttttgggggggggtttggcctccccccccggtttggggccccttttcgggaaaagcccccaccccccccttattttttttttggggggggggccgggggccttttttttgggggcggccccccccaataaggggttggggcccccccccgggttttttttttgaaaagggccccccttgttaaaatggggccgggggggggggtgggggggtttttccaaccccccggggtgggccctgggccccccggggccccccccccccggaggggggccccaaataatttttttttttgtgttttta

SEQ ID NO: 619070 - DNA, 276 bp, Homo sapiens
ctaagaacagcagagtgtatgctgagacttgaatatgtccggagacttgtaatacagctgaggtctcaggcgacaacatgcaaacgactgaccgcactcagcacggataacacagttatacgtgcagttttcagcctgactaacgcgttaaaccatcaggatgcacgactgatccgatctgagcaactgctgtgtcttccagaatgccttggcggattgacaagtggactatccacagtctgcacccatctgtgcacgtcgagtctatccgtgctg

SEQ ID NO: 619071 - DNA, 600 bp, Homo sapiens
tctgcacatgtatcccctacatctaaaataaaagttggaaaaaatggaaaaaaaaaaaaaaaaaaaaaaaaaaaaaaaaaaaaaaaaaaaaaaaaaaaaaaaaaaaaaaaaaaaaaaaaaaaaaaaaaaaaaaaaaaaaaaaaaaaaaaaaaaaaaaaaaaaaaaaaaaaatcaaaaacaataacaccccaaattcccctaaaatggggctatataacacaaaaggccccatattttaaaaccttcaagacttgaaaaaacttgtgttaaacccaaattaaacggtttgcactaaaaccccccttttacaaaatgggataaaaccaaaaagccccgcacaaatggcttttcaaaaatttcccatcacaagggcctatgaaaattcaaccccttaatatttgaaaaaaatccccgaaaattttttaaaactcagcaattttaaaaccaaagggcaaaacctaaaaattctttcaaaatcaaaaaaattccccaaatttagttcatagggaacccaatttcgaaaaaggcccctcttttaaaaaatgggcacccaacgtacactgcgccctctttaaagcttaagcccctctttcctaccct

SEQ ID NO: 619072 - DNA, 259 bp, Homo sapiens
cctagtaccggggaccacaggtgtgcaccagtacaccgggctgatttttaaaactttttggtagagacagaatctggcggtcatgttcaggcgggtcgtgaattcccggcctcaagcaatcctccggcctcagccttctaaagtcaaagggcggggactacagatgtgaaccacggtgccgggcaatacgtgggtttaagtttaagcttcatcactggcctttcttaactctgaaaccctctgacctctgtgtgttcat

SEQ ID NO: 619073 - DNA, 110 bp, Homo sapiens
tagtgtacataatttacttcatggtctgcagttaggctcagtgacttacgacataattcctgcttgagtgatatgaaattgatagaagcctgaatggcagtaggtgagtg

SEQ ID NO: 619074 - DNA, 269 bp, Homo sapiens
ctgtctagaggatccaccctaatcgcaatagctcagacatagtataacccaaatgcccaccagtgatagactggataaagaaaatgtggtacataaacaccatggaatactacgcagccataaaaaagaacgagatcgtatcctttgcagggacatggaaggagctgggggccattatccttagcaaactaacacaagaacagaaaaccaaatatctcatgttcttacttataagtggaagctacaatgatgaggcgattagggttagt

SEQ ID NO: 619075 - DNA, 243 bp, Homo sapiens
atctacaggatcctttgaattctcctgcgtgttcaggcttctcccaagtgaactcacactcttggttgacccctataaagtgtcctacagaattggagaggatggctccatctgtgtgctagtatgaagcctcaaccacaggaggtagcactcaaaacagcaccaacctgcaaatggtagaacagccgaatcagctgtaagggaggaacttctccttgggcagaacgagcccttccaaaaact

SEQ ID NO: 619076 - DNA, 769 bp, Homo sapiens
gacctttccccaaatcatgcacgtattgagttattgacttgttaaatctattcccatgccataactcttatcaatacatacatgaacatttcaggaagattcaggttgccaaaatactcctagcacaatactttgtatatttttaggtacgctatacagaagtaaaagtcccatggaagctatgaacatctagaccttgatgtggtttattccttcgaatcatttcatagacagttgaaagtagggcctacatggttatttgcctgctcacgtttatcgtttactatctcccactattcataccaatatacgtcaggtttgcttaaccagttgattgattatttttatgtacccattcttagggggcataattgaaacgttgtcttccatgtttctctcctaactttgtgcggtaattgcaagaaaagtctcctattctgggacatattgctaggttagtcccaagaagcagctatgttcttggaatggtctgaccgaactggaagagtcttacgtgaaaatttgaacctggtggccctctcgaggtgcctctctttcaggggagaggccctggtcataacgaaactgggaaggaaggccctcagcacacgctattcttgttagccaacatagttgtttgcccttgtgctcttgttgccacacttttctgtacaaatatgccaccttaatattggatctaaaccaataatttttttaagaaagggttacacaaaattgccttggggaactttagtgacattccttaaag

SEQ ID NO: 619077 - DNA, 324 bp, Homo sapiens
gatgatggtggtggtggttgtagtgtgacaggtcccttttaggttatttaagggtgcatgtcccctgcttgaaccctgaaggccgggtaatgagccatttccatggtgcccagctgaggaccaggtgtctctgagaatccaaacatcctggagagtatctgagaaccaaccaagtaaaagtctcgttgctcatatatagtagacaaagagccagaaaattaactgaaaagcagtttagacattgggggaggccggatctctcgagctgtcttgctgagtgccctgtgtgtaagtcctaataaacttagctactcgcctaaaaaa

SEQ ID NO: 619078 - DNA, 366 bp, Homo sapiens
  misc_feature (41)..(41): n is a, c, g, or t
  misc_feature (46)..(46): n is a, c, g, or t
aaaatattacaaaataatttaactcatactacatattctanattgngaagtttcatagtgtaaaataaaagtaagggtatgctgggcatggtggctcatgcctgtaatcccatcattttgggaggctgaatcatttgaggtcaagagtttgagaccagcctggccaacatggtgaaatcccacctctaacaaaaaatgcagaaattagccaggcgtggtggtggcggtggcagtggtggcgcacacctgtagtcccagctacttgggaggctgaggcaggagaatcgcttgtacctaggaggcagaggttgtggtgagctgagatcgtgccactgtactccagcctgggtgacagagtgagaacct

SEQ ID NO: 619079 - DNA, 127 bp, Homo sapiens
  misc_feature (98)..(98): n is a, c, g, or t
  misc_feature (115)..(115): n is a, c, g, or t
tccctcctgctgctgctggtgtccctgctcctgtgccagagcgtggccccttgcccatctgtcccggcggggctgcccgatgccaggtgacccttttnagacctgtttgcccgcnccgtcgcctgtc

SEQ ID NO: 619080 - DNA, 161 bp, Homo sapiens
  misc_feature (69)..(69): n is a, c, g, or t
  misc_feature (86)..(86): n is a, c, g, or t
  misc_feature (89)..(89): n is a, c, g, or t
  misc_feature (100)..(100): n is a, c, g, or t
  misc_feature (105)..(106): n is a, c, g, or t
  misc_feature (108)..(108): n is a, c, g, or t
  misc_feature (115)..(115): n is a, c, g, or t
  misc_feature (138)..(138): n is a, c, g, or t
tagttgtaggtcgcagcggggaaattttttgcgactgtacacatagctgcagcattaaaaacttaaaanaattgttaaaaaaaaanttnggaaaacattncatanntnttttttngataaacagttacaccttgtttncaatgtgtggctgagtgcctcga

SEQ ID NO: 619081 - DNA, 226 bp, Homo sapiens
ctctctctctttctttttctttctctctctctctccccgtgtgtgtgtgtgtgtgtgtgtgcgcgtgcgcgcgcacacgcgcgcgtcatgtggaaacacagcacaaaggcagcctttgcaagccaggaagagggttcacgagaacccaatcaagttggcaccccaatttcaaacttcccccctccgaaactgtgagaaaataaatttctgttgtttatgctcccta

SEQ ID NO: 619082 - DNA, 725 bp, Homo sapiens
  misc_feature (319)..(319): n is a, c, g, or t
agcgggcttgcgctttcccctccgcggttcctccccgagccgcccccagtgcccacgcttccgcggctccgccgtcccagggccgtgccgactgggaactctgctcaggggcgtagtcccctgctaaggtcctgggggtccgtgctgagtgccgcattagtgcgggatgggcctgagtcccgggcgccgagggggagtacgcgctccgcctccctatgattcccccaggcgttcccaaaccctgcctcgcgaaccgttcgtgtaccgggcccatgggaccatgccaggctgggcatctagatcgtccagcttgtggccnccagctcaggagagaagtccagatgggcactacagccaagcgttgaggtttcacgtttcaccgagccccatagacagtttctcacgcccgaagacaatggtttaagaaaccagtggacaagaaagctgttcccaagcatatagtgctgaaccccaattaaatggaagctgtggtcaaaccaataatctgttcccgagtaaaattaatccaatttcggcgccccgtgtgggagtgaaaaattaagcaggtctggtcctggaaggaattggtgtccagaactgcgcctgtgtgtccatgctaagaccgccatttgagctaataggccgtagaacattgtaacaggtgagacatggacacctttggcccagggatgagtagaaaggagtccaattcccgggggactcaa

SEQ ID NO: 619083 - DNA, 150 bp, Homo sapiens
aaatgagccggtccacttatttaagccctgtggtcaggttttcttactctacacacagtgatatgctacccccggctctattcattgttgctgtataggaatgctggctcggtgtcacaagattttctgatttttcaagagaagatataa

SEQ ID NO: 619084 - DNA, 166 bp, Homo sapiens
tgtgcgaggtgatctagaggatccctaagggtctttctaatagaaaaggtctctacagactatctgagtaaaggaggtgggcaaaatcaagttcagggaagatgctcaacatgcacacgcttactggtagtcttaaaaatatctgggatagaaatacaaaaacatc

SEQ ID NO: 619085 - DNA, 966 bp, Homo sapiens
gctttcgtgaacaagcacacctgtagataaactgagaccggtggaggtcacggaaactggaaacccagattctgcatgatggggtgtaccgtaggtgcctgcatcatggaggctccctgtgagggctactttttaggtgcctctctgtgctactaggaacttacgtgtccgtagacacccggatggctgatgaaacacgaaggtcgttgaatgtcatccgttatgacctaaaggagctcatgcaagatggaagggcttggagagaatgccaataagcctgatggccgatcatagacgatagtcagacgtgtgatcctgcaaatcgtacgatcgtacagaggatgatggtcatcgaaacctctctcaccagagtaacacgtagccgtgagacgtgaggggcgtgcccttggagcaccaactcgacatgtgcgcaggaagactatctttgactctgtcttgggcgcctcacagtgggaccaccgtaccatcagcgaaaccatgtccctgtaccccccgtggctgtaagtgtcgatggtccgtctatggggcaccttggtgactgcatgcgcccaggcaaagggtcgcgagcctggcgaaacctcaagcaaggacgtacgggtgagaaaaagcttgtaaacagtctacggcgaaacaggggacgacaacttcaggttccagtaggtatagacttccaaagaggcggcgggacgttgacccccccatttctcccgtacccgccagggtctgccttgggggagaatcccagaaagcccgtaaagacatacttgaacaggcgggtagggagaagaccggggtatggatgccccccttttgcgcccgcgagtggacgcatggggctcccagggagtcacaacgcaccaccccactgaacatggtggaggggaaaacacaagcccatgtaccggcggcaaatcaaacagacagattcccccaggcgaaaggaac

SEQ ID NO: 619086 - DNA, 1117 bp, Homo sapiens
  misc_feature (537)..(537): n is a, c, g, or t
ccccccatgcactgcccaaccgcaacggcagcctgttctatgacagcctgctcaatcctgggctcgcctggtggccacgcctgccctgtcgccacccagacaggttgagcgtggccggatatccattcaccctactctgcatcctggggcagacgggcgaaccgtcacggtccctacccctgcagcttcagccccgtgcatgtggaccaccggccgcgcggagccctcggcctgtgcggctacgactaaccttgtcctaggaaccatcatggctatccatccacggagctgcaaggacaagggaggcagcgtgagtcgcctgctgcgcttcccaggccagagtcactcattcggcgactcaggcgtctatgacgctcccaggttcccttacagcctgctagcagggccagtgtgctgcccgatggtcccccgaggtcccgcgctgcgtctatggctccagagacgaccttgtgggctggagcccggtcttcggtggcgcccggcaaccctgcccctgcgagacggtcacgtggtccntccgcttgtccaagctcccgttgagcccggtgctaccgccggcaccgtcggtcgctccgtccttgcggcggcttggatcggggccaggcaagcaagcgcccccggggcccacggggcccagtcagttgggtctcacacaggcgtcacccttgtgagctcccaagagggccttgcgcctctccctgaccagggatttccccaaatgtcgagcaatccttaacggtgggcctcaaaaagttgtcccccttcatacacacacgggactcccaagagaccaacggccctctttttgacccgcctgcgcaagctttgtcgtcccgcaggatctcgtcagcgcgcctcctcggccacagcgctcgtggtcccgccgcgcgttctggaggggcccccccctgtggttgtgcggcacccttcgttggtcccccggggcgcgcgttattccccgggggcgcgccgcagtgcggctgcttctccccgccctctcgacgcgcgtgttcaggtgtggcgcgccccacgagctgcgcccccctgctacgcgctgcctagtccgtctcaccgccgcccttttcgttgcgcccgt

SEQ ID NO: 619087 - DNA, 720 bp, Homo sapiens
ggctgtaccggccggaagtagggatcggcgacgttaagctgagcgaccagtgccactggagacggtcagcttctcactcaggctcctccagccgagccagaagaccccctccccccgaattctgggggccgatggaagggagccgagtcagatcgcgaggtacccagagccgatgacggagcgacagtgtagttgccagaagcccctgccctagagtgatcggaaagcctcacccatcgggtgaggaacccggatggaccgctccgggcggagcccgccgacatggctagcccctggtggcgggtcccgtcagctctacgcttcgccggcgcggtctagcgtggcaggttgtgcgcggacgctgcttggtaacattttccgcgatgtactggagtttctgcgatctctgcgctgctgttgcccctgtcttggttcgtaccgtgcacccacgaacgccttgtatgggcctaacggcctacggtggtggtggagcttggatcctgcaggtccgggcttgggctccaagtcctgagagccctgaatcatcactttccagagtctggacctatagtgcgggatcccaaggttacaaaagcgggatctgaggacgattttggtgtgcacaggaacactttttaccagctggttaagccagctgtcagaggctcctgtggaattttggcctctaagctgcaggaacttgaacaagaggttgggtaa

SEQ ID NO: 619088 - DNA, 629 bp, Homo sapiens
  misc_feature (1)..(1): n is a, c, g, or t
  misc_feature (24)..(24): n is a, c, g, or t
ncgggtctgaagcaaattggatanattacgcaaaatggcctatatggtttagaaaaagttaataataaaagggctggcctgaaaaattgggtcgaagaaagaagaagtaaaacttagggtttacctcacatcttatctagcaacttttctgggtcttgatttggctttaagggccataaatacccaaatatctttaaattcctacattccaagtatatatgatgtaagaatttccacccatttggtctgaatcttctatatttggcacttctcatcaggcacctagccaacggttaagggctgatcttctgacttggctttcctggttgaccagtgctggttctataacccaattaactatcagaattccaagcaatgaactaagcttgctggtttcatcctggcagaaatgaacataatcttgagctaaaattgtacagttgtagtccaacaataatggcagatacaaaggctatgttcccggtacaaagacaagcatttcacctgcataatctcatttagcccttaacaattctgtacgggagatattatctataaacccttttacagacgagtaaccaaacccagctagattacaaagtgagaaagcgatggaagccacatctaaa

SEQ ID NO: 619089 - DNA, 860 bp, Homo sapiens
gaaaggcgagagtgcgaagggcaggtgtcgggcgctgtttctcgttacatcatatagacaaaacagccctggtgcaaagatggtcaacgtacctaaaaccccgaagaaaccttctgtaagaagttgtggccagaatcagactcacacaagaagacacaagtctacagaagggcaacggatcctatcgatatgcccagggaaggcggccgctcaatgattcggacaccacgagatggcatactgggtggggcacgacaaacagacaaaattctacccgcggacccaaacgggcctttaaagaactcaacaatagagaaaccgcattgtggtgccctaacaggagccttgacaacaagtggatggttagaagccccttatacactttgccatagaattcccactaagcgaagacaactgcccgtgcgtccccaactcttaacggccacgcactggccacagcccagtttcttgttgtcaaacaggtgttgcgacagcggcatgacacttacgagcaacagacagtgaacaaatcggtgtcccccaactcgttttgcatattccacaacgtgttactattgtaaaaacaccatttatagggcggcaacaattacattatctcacagcattcatccacaactttacttctgtcgaacacagcgcactgttaacacacctacttgacgtttcttacgatcgcccccctaactacgcaaccaccaacatgtattttacccccctcggcatactgtgaacctatcaactaattcacaacaccttaccacacgtttgacattacatatccctattgtaagccccccatattactatcatcaatacagtatactctatcatacataact

SEQ ID NO: 619090 - DNA, 858 bp, Homo sapiens
  misc_feature (351)..(351): n is a, c, g, or t
atgaccagagtcatgcaatagttccacgagtcacaagtttgaaatttgaatactttacagatgagtgatgtgtggaccactgggttgctaaaaaagccagccactagaacacctattcccatgaatcgagctcaaattattatcactagttccagaaaggtgattctctatcacgtgtaacgcatagtatgtcgaaagccattgcacagagtcaatccttcaaacacggcctagggattacacagctattcggtgcagctctgcaagtacaatcaattagaacataacggagattttgtaggtaaaaacgtactttttgcctagttctcattaaagtctaatctagaagtnagagatgaataccatgtccgaattaccttagacattcatagtcgatgcgtagatttcgagtctacatgttctctcacatgaacaccaagtggttcacatcgagtcccattagagacagagtctcatcgtgttatcaagatcctaaagtattcttctaaagaacaattgcaaaccaatggtgttacattgcatagtaggtttctaaagagagtcaacgtaccttggcagcaaatgactatgcgataagacagactaggagcgaccaagctttcgcgttatgtatctcttgattattagtattctactcatgtgtgaacgacggtggttttcccaaggtgtaaggtgatggcgatactaacttgtttgagtatttgcatatctaaaagaattgtccgaaagaattggtattctagtgtcgtgcctagttgatcgtttggtcagactacagcaactttatgttcagaatgccattttgcttcagaagttgtgaaggcatggtcctattat

SEQ ID NO: 619091 - DNA, 115 bp, Homo sapiens
gttcgttcgaccaagatccccctcgcgttgtcttcggttttgaagcatcaggatcctttatcttcttaggctgcgagagttcccgaactcaatcttccctggtaaccgtgactcc

SEQ ID NO: 619092 - DNA, 130 bp, Homo sapiens
ccttgtttttaaaaaaaatgattttttttgccccttttgccctataaaatagggaaacttttgatatgggcggtttgatcccgattggttcctaaagggtaaatataataaagaccccttttttgcttta

SEQ ID NO: 619093 - DNA, 369 bp, Homo sapiens
cttcccgtttctctgagaactttcttcaaacccatggattaaaggatccaatagccatgtatctactacatgaggtattgcaagctcctgaaaacagttcttggctgtggaggtgaccatgtagcccaattcaggattactgagaggcagtctggagctgtggcagccattcttgccccccgtgaggggaagagcctgcttgagaatggagccaatatggaggaaggcagagagagagagaacgatggcggaagatgcagaccctgcctacgggatccagctacttgtctggccttctcagttccagaaaccaatgcatttcctgtgggatttctgtctcttataccctcaatgatcctctagagtcga

SEQ ID NO: 619094 - DNA, 347 bp, Homo sapiens
tcttgtgtatcccccgctgtacagttgcgggctattgcgtcctattcctcccacgcgctcaccccaccggtctgaccctgctgccacctctctccgaggagcctagaacctgggaggtgacagggccctgatgtcaaatggcatcaacaatcatgatgaaaatgccaggcatggtggagttatagggtttcaatatgccaaagtaaaaccgcacatgcttattcatgactactctctgcaggcttgggatcacagtgccactgactttgtaacacatgcaggtgtcagttctcgaatgtgcctgccagcaggccaacttgctggaaaccccaaaagccccaggataa

SEQ ID NO: 619095 - DNA, 468 bp, Homo sapiens
cttgaatccaggaggcagaggttgcagtgagccaagatcacagcacagcactctagcctgggcaacacagcgagactccgtctcagaaacaaacaaaaacccccaaaacaaacacattgtacagccgtacaaaaatattttctatcttcatatgcctattctataagcttaaaaaaatttgttttaaaaaaaaactttcccagcactttgggaggccaaggcaggtggatcacaaggacaggagttcgacaccagcctggccaacatggtgaaactcatctctactaaaaatacaaaaaattaaccggacgtggtggcaggcgctctaattccagctactcaggagactgaggttgcagtgagctgagatcgtgccattgcactccagcctgggcgacaagagcaagaccccgtctcaaaaaaaaaccaaaaactttaaaaacattttttttcttaaaagctaagaca

SEQ ID NO: 619096 - DNA, 693 bp, Homo sapiens
  misc_feature (49)..(49): n is a, c, g, or t
  misc_feature (93)..(93): n is a, c, g, or t
  misc_feature (254)..(254): n is a, c, g, or t
  misc_feature (268)..(268): n is a, c, g, or t
  misc_feature (305)..(305): n is a, c, g, or t
  misc_feature (340)..(340): n is a, c, g, or t
  misc_feature (346)..(346): n is a, c, g, or t
  misc_feature (409)..(409): n is a, c, g, or t
  misc_feature (443)..(443): n is a, c, g, or t
  misc_feature (477)..(477): n is a, c, g, or t
  misc_feature (487)..(487): n is a, c, g, or t
  misc_feature (503)..(503): n is a, c, g, or t
  misc_feature (506)..(506): n is a, c, g, or t
  misc_feature (529)..(529): n is a, c, g, or t
  misc_feature (539)..(539): n is a, c, g, or t
  misc_feature (559)..(559): n is a, c, g, or t
  misc_feature (606)..(606): n is a, c, g, or t
  misc_feature (684)..(684): n is a, c, g, or t
gttggggagggtggttggggcatggtgttgcccgtatgactttcctgtnccatcggaaaccagagtttccccaggggggcgctttctatgtgnggttgcatgatttagctaatttaacaagaagagagttattcctttgatttttatcaacatgggcttggctatgtgtctattagggtgaacactgatttttttttttctttttagaaacaaaaaccatcccctttttattccaaactacggcgttgcttttncaacaatcatcgcntaaactggacatacggggttaccacctcagggggatnacagaagagcgttgcacaatgtatcttcggggtangcgggngcgaacaatgtgggcgcggcaacttcactctacacactctgaccatcgcttcagtttgttctngggacaggtgcgggggctgtgtggggcctcggcncggttgttcttgggggcagcgccacagtgagganagcggcactncaatgggatgcgagtnacnctagcctacggccgggtgcagcncatggctctnaaagagcctggacgccacantcctcggagctgaacacgatctaaggaaatgttcatgccatcctaanagtgggtttttccccggtgagaactggccaacagttattgcctcgcctctttagtatgttgtttgaccagagaggganagggcgggg

SEQ ID NO: 619097 - DNA, 1099 bp, Homo sapiens
gatcattactctgctcatgctgtcccatgctcgcttaattggggcttattgggtatggtctgctgaactggctcgataatcgcaatacgcgcggtcaaatagtgcccataccagggagagatcaatacttatcgttcgctcccgtgatgggcatatatcgtgagtaccgcctgcgattaccgcacggtctcttccttgtccagctcagtattcagttggtcttactatggctcacttaaagtatctcatgtgtcgcctggcgtcgctaaggcgagggacgtgggacttgaggcgccacgtaaagtgaggtaacctctcagtgctaccgagcgacgaatgctagcacacgtgtagcaggtcactgttaggataaacacctcatacatcgatactacgcaactgctaaacaactgaatcgagtcctcggatacatatctattatctgacctaacagttgatcgaatcggatcgtcttcgcaagaaatacgacgatcaccttgtagaaatcctacactaggaaagaaacgcccaacaagaagcgtacaatgcgaatgatcctggtggtctattctttccggaatagacgagcagctttaattcctcacacccatgtggcgtaattcgattcggcacgcagactgaagtgctaacgcgagggctagaaccgactcgtgaaacgacgggtcccctgtagctttctcgtaatgtgctaatcacccctagttatgggctcccatatcctctgactacattcgcagctgagtagaggcctacggaaaacaggccctagggatcacctaatcccattcgtactactccactctacactctgtcgaaggacgtattcaagactgcgctgcagcctcaacaattctaacttatggactagctttatcaccgatatgcttccaataagctcagaggaatagcctctttgaacgggacctgccacgtgattgaactcctcgaaaggcccatgtgtcgaacgaccccacataagttgggttctaatagcaaccttggccgggagtacttcttcacaactacagcgggtcacgggaaaaataacggccccaacactccttctccaccccttgag

SEQ ID NO: 619098 - DNA, 104 bp, Homo sapiens
tctagaggatctcattttttttttttcccccaattactttttaattttggcaatttccatctcaaccccccttcttctcttctcttgattgtgtgggccccaac

SEQ ID NO: 619099 - DNA, 614 bp, Homo sapiens
gcttgccgtaggtctgggctttaatttaagtcgtcttttctctaatccagactcctgccacagtgggtcaccgacgtcctggccccgtcaggagtccgcacccacggtggagcgtggaggtgactttttgcggtcacagtaatgggatctcagcgccgacaacagctctgtgccggcgagcgacagggacccgtccgaaatccgagttataccaggttcgtgtgcaacgcggtatcatgtctaggagcccacgcgtaagagggatgtgaaggaccaaattgacgaaagtatccgagacagatataacttatgcatgatgagccatggtcgtcatcaggaaattcagctcgctcgttcatgtcacactcttagaggacatggtggttggcccgctccatgggagacgcggcgtccaatcgttgtgctgtcgtgtccagtggtcttcgacgagacggccgtcccatttccctgggacgtccacgattcctgcaggagttagaaacctggggaccgtcttgacctacaacgctcgtactaactagattacggcattttaggtattgtcgtcagggtccttacgcggtacttggacgtcttgaatttaatcttataac

SEQ ID NO: 619100 - DNA, 696 bp, Homo sapiens
  misc_feature (272)..(272): n is a, c, g, or t
  misc_feature (302)..(302): n is a, c, g, or t
  misc_feature (306)..(307): n is a, c, g, or t
  misc_feature (311)..(311): n is a, c, g, or t
  misc_feature (314)..(314): n is a, c, g, or t
  misc_feature (352)..(352): n is a, c, g, or t
  misc_feature (368)..(369): n is a, c, g, or t
  misc_feature (421)..(421): n is a, c, g, or t
  misc_feature (429)..(429): n is a, c, g, or t
  misc_feature (448)..(448): n is a, c, g, or t
  misc_feature (454)..(454): n is a, c, g, or t
  misc_feature (459)..(459): n is a, c, g, or t
  misc_feature (486)..(486): n is a, c, g, or t
  misc_feature (497)..(498): n is a, c, g, or t
  misc_feature (502)..(502): n is a, c, g, or t
  misc_feature (511)..(511): n is a, c, g, or t
  misc_feature (518)..(518): n is a, c, g, or t
  misc_feature (543)..(544): n is a, c, g, or t
  misc_feature (547)..(548): n is a, c, g, or t
  misc_feature (556)..(556): n is a, c, g, or t
  misc_feature (628)..(628): n is a, c, g, or t
ggcagaactgggaggaggagttggaggccggagggagcccgcgctcggggcggcggctggaggcagcgcaccgagttcccgcgaggatccatgacctgacggggccccgtgagcctgcgctgcctctcgggtgtcctgggtcggtgtgggatgcccagtgctcgcagtgcctggctgtggctgtggcctggagggctgcagtctccctcgcggtgagaggaagtgcggaggagcgggaacctgcggcggcgctctgcgcggcgcctgcgggngggaagggcagttcctgggcctgggccgcncctnnagcnggncggcggctcccagcgcagtctcagggcccgggttggcngcggcgactggagaanntcaagttgtgcggtcggtgatgcccgagttgagcggggggcctgggcctctngcccttanggaggcaattcccacgcanggccgncaaangcgctctcgcggccgagaggcttcgtnacggtttcgcnngcgngcggcggcngttgttnggctgagggggacccgggacacctnnatnncccccggncccgggctcctccgacgcgatggggaaggtgctatccaaaatcttcgggaacaggaaatgcggatcctcatnttgggcctggaccgcgggcgggcaagacaacaatcctgttcaagttgagctgggcagtcggtgaccac

SEQ ID NO: 619101 - DNA, 172 bp, Homo sapiens
  misc_feature (34)..(34): n is a, c, g, or t
acaggcagagcagaggaacgctaagctcttgatngtctcttctatccatatggacgtaatcccattcatgagcgactctacccctcatgacattacatcacgctctgaaaaggccccaccctcgtaattaccatctacacttgtggatagtgagcctttcaagcacaataac

SEQ ID NO: 619102 - DNA, 1305 bp, Homo sapiens
ggcagaactgggaggaggagttggaggccggagggagcccgcgctcggggcggcggctggaggcagcgcaccgagttcccgcgaggatccatgacctgacggggccccgtgagcctgcgctgcctctcgggtgtcctgggtcggtgtgggatgcccagtgctcgcagtgcctggctgtggctgtggcctggagggctgcagtctccctcgcggtgagaggaagtgcggaggagcgggaacctgcggcggcgctctgctgctgtgctgcccttgctgtgtgtgtgtgaatgtgtgcatgttcctgtgtgcctgtggcctgctgccatcaggcatgtggctgtgctgtggctccacaagctgccaagtcgtcatgtggcccctgtgtgttgtgctgtgacttgtgcagaaccttgggagaaacgtcaagagatttggttgcatggtacagtgtggattgcccctgaaagttgaggctgtgggtgtgggcccttggagtgcctccattggccacttattaggcgaggtgcaaagcgatacccaacaggcgagaggcccaggcaacaatatgggcttcccatccatacaggctgtgccctgaatggactgtggcttttcacgtatatcacgggtatatcaaggcagtggctagatggtagtgacaagagaacagatatgctttcgtagctttgaacgtagggtggaaccccactgggggggaacaaccgctattgaaaattgtgcacgccactggggcgcccctggggcattcccgttctcggagccaggccgaatcgcggggggaaaagtggttcgcttcattccccgagaaaagtcatattcagggggaaaccaacattgggagacattaggcggtggaattcgctttccaatttgttttggtgtgccccatatgggaagcaggcagaggccccggggccaagacgagaccaagagccaaagtcccctatagttaccacagcggtttaggaaagtgctttggggggccccaagagtcagcggataggaaccgcaccgcaaagatccccccaagcgtggaatggggagatttattcccaaagcacgggcttgtccgaagcacaccggcggcgtcgaaccttttaacccgaaacaagcaattggtcttccaaagggttctccaacgaccggtatatcttggggcacactgtctgatgtgtggaccagcgaccccaaggggaaacacaaacggaaatccacggggcgccggacgacttcatgtggactgtgacaattatagcgataacacacagttgcgtgaacgcacca

SEQ ID NO: 619103 - DNA, 766 bp, Homo sapiens
  misc_feature (762)..(762): n is a, c, g, or t
ccatggatttgactggtaagcattagcactgtgaattcgtaacaatctactaatgtgtacagattatgcaacgtactactttagaccagtaggacaaagatgaagtcgcaggtaatattgggaaatacctttcgacagattataagggaaacggtacttcataacttattagatgcttcgattgcagcacttggagaagttgatagctgtcagcgtgtacattacagcagacgatctaccatcaacaacctaactttacatcgtaggatactatatggagatgaacaagctatatgcattgatacgctacgataatgactattagatcacagagaaattatagaacggaaccgcagtgtgatatattcaacagaactataatgagctctgtgaaaggatcaatagaattgacaacccttagctgattaacgtattacgcgagagaccactgaaatgtctacatatacatgatagtagagatggtgcaattaatgccgaagagatacaatgagactcgataggtgcatactatgaacaattggacagcaacatattagctgatctagaaggaatgcatgaattctagaaactactacccatcagaattggatcacgatgagctagaaatctgtgctgaccatgaccagtccgacgattgtgcaataagtagaaccttctacaggactagccatgacagatgactcactggagaatctaccgacatgtaaggacctagtacattattttcctcaaggcgttcangtgg

SEQ ID NO: 619104 - DNA, 660 bp, Homo sapiens
  misc_feature (517)..(517): n is a, c, g, or t
tggacaagtcttacaggttagttcaggatctgcgccttatcaaccaaattgtcttgcctatctaccccgtggtgccaaacccatagactctcctatcctcagtacctccctccacaacccattctgttctagataaacctagctgaccccataaatcctaaattctttccccactcccctttccatttcttaaaaaacagccctaaaagctgctcccacactagctctccctaactcatcccagcctttttcattacacatagctgaagtgcagggctgtgcagtcaaaattcttacacaaggactgggaccgtgccctgtggcctttttatccaaacaacttgaccttactgttttagcctagccctcatgtctgtgtgcggcagctgccactgccttaatacttttagaggccctcaaaatcacaaactatgctcaactcactctctacagttctcataacttccaaaatctattttcttcctcatacctgatgcatatactttctgcccttctncactacctctcagcaagtcaaactcattgccttaactcaagccctcaccccttgcaaggggcctcgtgtcaattttatacctgctttaaaattgcttcattaccggccaccatactgttttgggctgaagaagttcctacttc

SEQ ID NO: 619105 - DNA, 107 bp, Homo sapiens
ggttgacttagaggatcccccggctagaattcgcttcactctcaatgtgactctccctcatcacctgttgcccttgtgttgcagacgtggttccaggcccgagagta

SEQ ID NO: 619106 - DNA, 1380 bp, Homo sapiens
  misc_feature (718)..(718): n is a, c, g, or t
  misc_feature (1246)..(1246): n is a, c, g, or t
ggaaaatagaaaaaaaaaaaaaaaaaccatttccaccttctctccctccttttcatccacccttcccccccatttttttaccagggctgaaactttggctgggtggggtggtcaagctggccgatactggccgccctaacgggctacttaaacgggggaaattattgcattcaaccaaaactcaggggaagaaactgtacattgcttgcaaaagagccaaattttccagccaagagtatcggaatggcgcatgagaccgggacacccccttcgggcacaggggtgggaggcagggggacgccggcctgcgagatggccacgccggggctctcccaagagacaccctgggccaattgcaaagggggtctccaatctcaaaggcaaggaaattacaactccaccatttatagacagaagcctcggaagtggcgcatatgagggggcatatgagcggtgcgcgcacaagaagcacgcgcgagacacggagagccacgaccggagaggacccgaccatcaagagagggaactccagcgccaagggcccgagagccaagaacaagacccgcctacaaatgcgcacacgaatgtgggcggactgatggacgaccccagcacgaattaggagttctccatatcctgtggcgcggaaccggacgaaaaatctgctccgaggaacaaaaatataaagacgcgctgcgcattctatacgccagaaggncgcgcactattgtggaactatcttatggagggcacgcccgacagaggcgtactactccccgagtggcaaaagggggggaccgagactcatcaccaaacctattccctctttccaaagagccacaacggtggggaccgctgttgtgatccgctcgcttacatcgcatgcaggatttaagcacgagaaggaaaaaccctttctgaggcggatctgttaaacaccgccccgattcccacgaagtgggttcttcaccgaacccaccttttgtgttgtagtgtccccacagaaccacccgagaggagtagtacttcgcatgttggagtgtccacaagcgacgcgaagcatgaggagtaaacacccggcggcttatcaaaaaacaacagcgaggagaactatcgaaacttccactggggagggctacccccccgacggaccatttggggggggccactgcgatgagagtcgaggcaccccccatgggggagaaacacgccttctactgaggtgtaggggagtatgatgcgaccnccgagaaagaggcggcagtctggattgagacgaccccacaagagagggagtaacgataggaaagaactgccgccccctcatcagtggagcgccccaagagcatcgacccttgatcggacgagggggacaaccag

SEQ ID NO: 619107 - DNA, 285 bp, Homo sapiens
ggtcactctttagatcccaatcgccacgacaagatcagctgcgcttgcgtcttggcatcacacaggacctgtgtgtgctggagtggtgggacttgaaggattgccccgttactgtctctttggggatacagtcaacacagcctcaagaatggagtctaatggggaagccctgaagatccacttgtcttctgagaccaaggctgtcctggaggagtttggtggtttcgagctggagcttcgaggggatgtagaaatgaagggcaaaggcaaggttcggacctactg

SEQ ID NO: 619108 - DNA, 291 bp, Homo sapiens
cgagtgccagagagaatgtgaaccagtgcatataggaatgctgatcgcagctcctgacaccatagtttgtctctttgtatcttcatgctatttctcattgctaagcaccctaatgttgaagaggcaataatcaaggaaatccagactgttattggtacgaatttttccaataaattatacatcttagaaagaatttcttctgaatgtccatttcttatgtcctaagaatctgatatctaacataaagagtttttatgattagctccatacaataaagcaagacattctgtc

SEQ ID NO: 619109 - DNA, 357 bp, Homo sapiens
aattcgcacgagaggctgtacgagaccacgagccaggtgggcacgcagagcacaccgcggatgtgcacgaaacacacgctacacgatgttcaaggacaagtatagacgaagagcgaccaggccctgaactgtggtgggacatggctcgactgtgcaagcgggaaacgtcaaactctaggaaagtgcagataacatactcttcattggtaaacaaagaacaggatcttttggggatcgtgctgcaagacactaatcttttagaacaagtgttaaatcaaggaacaggtatttcagcaagttttggagccaagacaacagcagtttccaggaacattaatgtgagggaacttaccaagc

SEQ ID NO: 619110 - DNA, 345 bp, Homo sapiens
tgttcgcgataagcccaaggcatccacagattcatgcaaaacctaacaaattactaacgatgtttttcacagtactagaacaaattatattagaatgtgtatggagacacaaaagaccctgaatagccaaagcaatcttgagaaagaaagacagagctggaggaattaggctacctgactacccaaagctatccacagggtcaatgcagtccctatcaaattaccaatggcatttttaacagaaaagagaacaaaatatttcacgatttgtatggaaacacaagaccccaaagagctaaagcgatcttgagaaagaaaaatggagatagcggagtcatgctcccc

SEQ ID NO: 619111 - DNA, 174 bp, Homo sapiens
cttgcgctggttcctttcttgccccgcactcgtatcttgccccgcctcgtttcttgccccgcactcgtttcttgcccgacgactcggtaccctgtgtagggacgcgcacgggagatctggatgcccaggaacgccgagcgaggcaggtgcacgtattcacgcgtcgtgggctag

SEQ ID NO: 619112 - DNA, 87 bp, Homo sapiens
acatctgtgtacttctgtgccagcagttatgaagggatttcttcacgagaccagtacttcgggccaggcacgcggctcactgttctc

SEQ ID NO: 619113 - DNA, 949 bp, Homo sapiens
  misc_feature (5)..(5): n is a, c, g, or t
  misc_feature (156)..(156): n is a, c, g, or t
  misc_feature (183)..(183): n is a, c, g, or t
  misc_feature (213)..(213): n is a, c, g, or t
  misc_feature (216)..(216): n is a, c, g, or t
  misc_feature (220)..(221): n is a, c, g, or t
  misc_feature (225)..(226): n is a, c, g, or t
  misc_feature (228)..(228): n is a, c, g, or t
  misc_feature (231)..(231): n is a, c, g, or t
  misc_feature (234)..(234): n is a, c, g, or t
  misc_feature (343)..(343): n is a, c, g, or t
  misc_feature (346)..(346): n is a, c, g, or t
  misc_feature (358)..(358): n is a, c, g, or t
  misc_feature (378)..(378): n is a, c, g, or t
  misc_feature (384)..(384): n is a, c, g, or t
  misc_feature (399)..(399): n is a, c, g, or t
  misc_feature (442)..(442): n is a, c, g, or t
  misc_feature (450)..(450): n is a, c, g, or t
  misc_feature (454)..(454): n is a, c, g, or t
  misc_feature (457)..(457): n is a, c, g, or t
  misc_feature (475)..(475): n is a, c, g, or t
  misc_feature (527)..(527): n is a, c, g, or t
  misc_feature (558)..(558): n is a, c, g, or t
  misc_feature (594)..(594): n is a, c, g, or t
  misc_feature (610)..(610): n is a, c, g, or t
  misc_feature (696)..(696): n is a, c, g, or t
  misc_feature (707)..(707): n is a, c, g, or t
  misc_feature (759)..(759): n is a, c, g, or t
  misc_feature (853)..(853): n is a, c, g, or t
  misc_feature (946)..(946): n is a, c, g, or t
tatanacaattttctacaaaaaatcaccctcctccgctcccgaattccccccatctcccccccattccgcatctcattcccaccccccccccaccacccccccacttccattccccattccttttgtttccaattccaatatggcaactctaaacnatcacctgatttataatcttctaaacnaagaacagaccccccacaataacattacanttnttgnngttnntnctnttngcatggcctgtcccatcagtatcttaatgaaggacttggcacatgaacttcctctttttgatttcatccaagacaaattgaagggagacatgatggatctccaacatgncanccttttccttanaacaccaaaaattgtctctngcaaanactataatgtaactncaaactccaagctggtcattatcacggctggggcacgtcaccnagaggganaaanccntcttaatttggtccaccntaacgtgaacatctttaaattcatcattcctaatgttgtaaaatacagcccnaactgcaagttgcttattgtttcaaatccantggatatcttgacctacgtggcttggaagataagtngttttcccaaaaaccntgttattggaagtggttgcaatctggattcagcccgattccgttacctgatgggggaaaggctgggagttcacccattaagctgtnatgggtgggtncttggggaacatggagattccagtgtgcctgtatggagtggaatgaatgttngctggtgtctctctgaagactctgcacccagatttagggactgataaagataaggaacagtggaaagaggttcacaagcaggtggttgagagtncttatgaggtgatcaaactcaaaggctacacatcctgggctattggactctctgtagcagatttggcagagagtataatgaagaatcttaggnggg

SEQ ID NO: 619114 - DNA, 129 bp, Homo sapiens
acagcagaacatttgtggtaattacaacatgtgtgacattgtgccaatagctgtacagaatcaactggggaagattggcacagtctcatgaatatatagcaacttggaagtatggaacatggacagagt

SEQ ID NO: 619115 - DNA, 1040 bp, Homo sapiens
caaccctcctactcctcatgtacccatgctaatcgcgatggcattccgtaactgcttaccgaacgaagaaatatctaggctatatacaactacgcgaaaggccccagacggttgtgggcccctacgggctactacaacgccttcgcatgacgccataaaactcttcacgcaaagagccgccgtaaaacccgccactagtctaccatgctacgcctctacatcaccgccccgacctgtagctgcgttcaccatgcgctcttctactatggaaccccctcgtaccgcgaatacccaaagccacgtggtcaatcaatcaaattaggagctgccatgatatagtactaagaccagctgcagagcactaagggcgtcgtggcaagaagggctctgctgaatcgaggggtgagctctgaacactcgaaaggtagcacctgaatcgtgacggactgacgtacgcggcttggcacaccactaactactagcatatgcccagttcatgccctgattcgcaatgcatttactagcgtgaataccagaccatgttactgaaattacagggggttccacatatttgatcgtcgtccaacgctttaatggactaagagcaagagagcaccttctgaagtaagtgcctgcctttcagtgaaggccggcgtgccataatgatggatgaaatcttccagactgggcggaaaaaccgggcgcgaccacgcgtacgaaccatggccgaaaggggtaggtccggaacaaggtctcgggcacgggacatcggagtacgccaggagcgcaccctcgatgcagacactcgcgtagccgagaaccgggaagcacttatcatggtaagagaaccgcgccacgtaacagagcttctggggccaatgaggacgcaccgcccggaggcaaaggagcatgtggggtgccaagagcacaagacaagggggcgagcccaggaatcgggcaatgacccgctccggcggaaacacgaaaactccagaaaagcagcggcgccccagagtaaagtgcaacagagaacagaccaa

SEQ ID NO: 619116 - DNA, 1038 bp, Homo sapiens
  misc_feature (771)..(771): n is a, c, g, or t
acgatgcttggtcgaggccggtgttaatcggacgaggaattttgctgggaggctatgctgaatctccttaggcactctctaatcagatgtcctgagtcgtcccaattcttagacgtggtatacctgtttttctccttctcttattccatttagtttttcaattcatacaaaaccatatccaggccatcaccaataattctacacaacaaatgtttcttctaacaaccccacaatatcaccccttaccacaaaatcttcgttcagcttaatctctcccactctaggttcccacgccacccctaatcccgctcgaagcagccctgagaaacatcgcccattctctctccacaccaacccccacaaattttcaccgccccaagacttcaacactatttgttttatttttcttattaatataagaaggcaggaatgtcaggcctctgagcccaagccaagccatcgcatcccctgtgacttgcacgtatacatccacgtggcctgaagtaactgaagatccacaaaagaagtaaacatagccttaactgatgacattccaccattgtgatttgttcccgccccaccctaactaatcaatgtactttgtaatctcccccacccttaagaaggttctttgtaattctccccacccttgagaatgtactttgtgagatccaccctggccacaaaaattgctcttaattcactgcttaacccaaaaaacctataaagaactaaataaataaatccacactcttggtgactctcctttgnactcaggcccaacctgacccaagttgaaaataaaacagcatgttgctccacaaaaaaaaaaaacaacaaaaacaacaaaaaaaaaaaaaaaaaaaaacggcgccttttttttcgggccgggaaaacagtaataaaagactcgcaactgtctccgcccccctttgaaaggaaaaaccgcgccctctaggggtctatctcacccctatctctctctccacatgaaacacacacaatacaaaaacacctacaacaaaaaaaaaaacaaaa

SEQ ID NO: 619117 - DNA, 1304 bp, Homo sapiens
tggggattcaatcatctttattaacctatcatcagggttacatttttattacattaattatcttggatattctcaaggggcctctacttttagttacattcagtgttaatagtacaaaagccaagtaagagtggctaaacctcaccctagacatttaaatatccctcgcggacagagggaagcttagaaagagtctcaagtctcaactaacttatatacattggtaagaagttaggtgtctccaagagttaactaagaaagcgtgcatacattttttaagccaggggaggaaaaacacttctcattgtggggctcttgtgggtgttccccaggacaaatttaatacctttctcaattattaaacacccaaaacaatgggatttctcatataaaagagagtggcctcgtggccttgataaaatttctcgtgaaactctcctctcaattacccaaattttaacaattagggtccgggggacgctctttttgggggaggggcccaatataggctatagcacgctataacatttttaatgttggggggttaaggaggagagcgcctctcctttatactcggattaacccgagggctcccaggggcggggggatatatacgccccgtgaacccaaaagagggcggaaggcaacggggttaaacgccgcatataaaagggtatttgagcgcccccacttggggaaggggaaggggggtccaaggggtcacattccaagggaagtggaaaagttaaaaaaccctgggggcctggggttggaatgaaggcccccaaggggttggggcttggggaacgcacaatttcccaggggttgtgacgaagcgccagggaacgccccacaaggtaaataaaataaaccaaagggcgtagaaaacaagtttgggcgcgccacgcggataaacgttgtggggcacgggcaaaattgtggctccgaccagtgggcacacagaactgggaggcgagctgtaatacaagggcacaattgtgtttataatagcttgtaccccagaaacaggaggacggaaccgtgagtccatagaggaaaattggggtatcgtggcacaaatccccgtgaaccggctgcgaagtgtggttgggggcccacaactgagcggaacaaaaccgtccgaaaaacggaataaccaaacgtggaaggagggcgaagggtaaacccaagcgacgtgccacaaaacgcgcaggcagagcagagggcgacatacaggtgaactaaccgtatatgttatatgtgtcacaccagcctacagatgaccgagacacaatatgtgatag

SEQ ID NO: 619118 - DNA, 258 bp, Homo sapiens
  misc_feature (33)..(33): n is a, c, g, or t
ccccccttttttttttttaaaaaaaatggggancaaaatgggggggttttggcccccaaagggggggggggggggcccctttggggttttttttcccccctttgggggggagggggggcccccccctccccccaaaagggggggcctttcccccccccccctccccccccccgggggggggggggggggttttttttggggggggggggggcccctttttggggggggggaaaaaaaaaccaatggggggccctttta

SEQ ID NO: 619119 - DNA, 193 bp, Homo sapiens
atactaaactatctttttagcaatgtgttccatcttcttaccacaaactatattgatattttcccatcttttagaatacaaatttgttacaacagggtttatgccagggtattcttagatctaggtgattcacagaatccccagtaaatcttttggacaaacttccatgaatcaagcaaaatctacattttgc

SEQ ID NO: 619120 - DNA, 360 bp, Homo sapiens
tagaggatcccgaaaatgacatagaggcaggtcagatcatcgctccagtgtggctgagtctggggcttttataggcacaggataagggagtgcatgctaattggtttgtgagtatgcaaacatggttaaaacaaaggcaccagtcgaaagtggacatggtgtaaaaacagggaagggtatatgtaaaataggtgaaaggtggggatcaatcaaaggaaagcacaccaaatgggaagacaggttctcagtctcatccatggatttgacttgtagcttggacttcaggctttaagctgtttttggcttgaaggtaaggtcgcaccagggacccacctatgtctgcctaggatttctctgtct

SEQ ID NO: 619121 - DNA, 186 bp, Homo sapiens
gggtttttttttttaaaaaacccccttttttccccccccgggtttttaatttttttttggggtaaaaccccggggggggggggggaaaattttttttgggttcccttttttttggggggcccctggtaaaaaccccaaagggcccccgggggggggggccgaaaaaaaaggtgggaggttttttta

SEQ ID NO: 619122 - DNA, 120 bp, Homo sapiens
ccccgcccttgtgtggctcgtcgggggcccgtcgggggctctttgcgaggctcatcgcgggctcctggggaaacttcgggggaaccagctactagaggttcgattagtctttcgggaccg

SEQ ID NO: 619123 - DNA, 202 bp, Homo sapiens
agcagctttacctacttgtttcttttgctctctcttcctggcacactcacttttttcagcagcactcaaccagctctctgccaaatggcgctgtggcctccaccttagccctctgcacttcctaatgctggcggctggctcaccaggcaattctcctggccccttaaaggccatgcggcactcatcctagcccaccccccat

SEQ ID NO: 619124 - DNA, 1096 bp, Homo sapiens
gactagttctagatcgcgagcggcacgccttttattatatttttgtaaatggggtttagattttgtattattttctcatagcatcaaacacttccacacacatcgtgcccaccatttgtgtccatgcgcttccataaagagggaggtggtcgaacattgagggcttactcagtgccgtctcttcagcacagcttcatacacataactcgatgcctcaacagggtggttgtgtatcactaatatttctatgtcatcacgggggtcacatctctcctcacactcaccttcacctgtcacttatacaaatattttgcagggttcacacatacaattatcctccaggtcatctccagagattcacacataagaatataaatatctagcttccaccagtagagaggaatacactactcgcacctatccgtgtagtaggtgttcacgagaaaacgtgtgacatgttaacgatgatattcatctcatcagatgtggtcatcaccacataattatttccacagaccaatagcaacacatctgttctacgcgctgtcatctcgtcttagacaatcgtgtggatcacgcgcagaccctagaacaaattctggtacgaaaagttgtggggaccttaaatcttctgttgtgagcgcacagaggagtgtgagaaaccacagctgttgagacaaacaacaatggtgcgtggaggcatatgatgtacaactttgtactaataaacaacccaatttttgaatatattataccgatgctcatagactcccctcggataacgcggtgggcagacacccaggtgtaccaccttcagttactgtcctattacacatccatactacgaggaaacaacataataaaacgatggccacaacaaagcaggggaaatataaggatgcagtgaagacgatgagacaaagcagcgacacagaacgaccaagccgcgtagagccggaacgaagaatagacgaacaaactgacagacaaacgacgtagatggcagtacagcacactgaggaacacagctcggcggaacacaacgcagatcaacaggggggcaccaggaaaccagtgagacagaccaaacgcacgc

SEQ ID NO: 619125 - DNA, 1269 bp, Homo sapiens
  misc_feature (699)..(699): n is a, c, g, or t
  misc_feature (701)..(701): n is a, c, g, or t
acttttagggggcccctgttgtggggaaccagcgtgttggacccgaagaagcgcggggtcgggttgcccgttccccggatttttctccggggaatgtttccttcgggcctccaagggcggtgtcgcgaagtgccccttctgcaattgtatgggtgtaagacctgccgctgcccctcttgcggccccctctttagaaccaggggggccccgcttttcttcagcgccgctgctcgttgaatgttggaccccgtccccggggccctttagcccccaattgtggaagttgttccaaggcgtgttcgccactgttcgccaatgtcaacgcccttgtctccgttctagtgaacttaagggcccctatccgtagtcccccgcagccacgcccccgttgtgcgcgcatgtaggtgccgccgcaagtggagttggggcccccccgaagatgttaaacaccgcgagggtaatggccaccagtgtaccccacaaggggccccaccgcaagcacgcaaccacgacgcgtgtccccacgaaaagggccctttgcgatatccggggattatatttcctcagtgtgtatgtacccctccacgaagatttttttgtttcttttcgccacggactttttgtgctggagcggctctttagacccacacttcccacgcctctatggcccccctatgtccccccccccatttatggagngnggccacactgggcccccccacacacacgggcactccacaccccgcgctataatttcccccctcagaagtgtccccacactcctctcaaaaacacacactccgcgctattaactgtcgcgcactccacggaaggtatatcacaatcaccctcgagggcttcacccacatatggttctatatatagagaaaccacacccgcagaagccccaaataaattcacagccacctggcgttatttacccaatgtttaactgggttctcctaattttaaccctcctaacacagcctcacgaggtaacttcgaggtctcccttcacccactttccgaccggcactttatcgggtcacaacacattttttgtaagccacacacggcttccaccggagcttcaccgtcacttattggctcaactttcctcacctattctgcttcatcccccacactaatatttcacctttacactcccaacactcacctttggcttcgaaacccccgccctgatactggcacttttgtagatgtggtttgactatttctgtatgtctccatctattgatgagggtttta

SEQ ID NO: 619126 - DNA, 262 bp, Homo sapiens
tgggttttgggggggggggtttataaccccccccccccagggcgggcccccccttttgggttttcccgggggggggggcccccccccgggggggccccccccttcccccctttgggccccccccgggggggggggggggttcccccccaaaattggggtttttttttttggggggggggttttttttccccccgggggcctttccgggggtttttttgggcccccgggctttttttggaaaaaatttttcccccccccccca

SEQ ID NO: 619127 - DNA, 532 bp, Homo sapiens
agtggctcatagataggtgaggagggaggggtggccgtggcgtcatcggcatcaggcgcgagactggagggtgtgtgatgtggagtggcacgggtaaggctgactacaggagaatcgtccccatcgcctgctgtgaagggagagtcttcaaccagacccaccttcatcacgccaatgaagggaataaacttctgataggagtcttcatcagggaacttgatgtgggcatgtcagcgtggtgtcgggcacgggatgctgaatgtgtcgtggctgccccgttgacgtactgcatcacccgccctgccacgtccagttgctctgacactggtggctccgagcgactgaacagatctctccaaccagaatccaggaaggaactactgtatttactgtcgactgaccccaagtatttggccacagggtgagaaccgagggggatgatgaggaagcgcatgtagccaagccagtcggaggtcttgttggccagggacttgacaaagaacctgaggatggagctcaggtagctctggcc

SEQ ID NO: 619128 - DNA, 218 bp, Homo sapiens
  misc_feature (8)..(8): n is a, c, g, or t
  misc_feature (55)..(55): n is a, c, g, or t
  misc_feature (57)..(57): n is a, c, g, or t
  misc_feature (102)..(102): n is a, c, g, or t
  misc_feature (104)..(104): n is a, c, g, or t
  misc_feature (194)..(194): n is a, c, g, or t
  misc_feature (202)..(202): n is a, c, g, or t
  misc_feature (205)..(205): n is a, c, g, or t
tagcagtnaatatctgtcaacttctcttctacacaacaagagcctgacgcatctngntctaggatcaaactggctacaagacaatggagtgaagcttctgtntnatgtctttcggcatccaagctgtaatcttcaggacttggaattgatgggctgtgttcttactaatgcatgttgtctgggtctggcttctnttattttngantaacccaaacctg

SEQ ID NO: 619129 - DNA, 353 bp, Homo sapiens
aacaggatatgaaaacaacgtagtgttgggatcgtttgggactgggatgggaacagttcaatttaattaggggtcagagagtctcgacagaggaggcattccagtctatcaggacttcagagacaggtgcatgcctggtgaaatgaaagccaagcaggagccttgggtcctgagcaatccccccaagtgtaacggtagaagccttgcgatccttttcttgtgtaaagtatatactttttgtcaacattgcggggaacatcaggcaccacagtgcatgaaaaatctttcacaagctagaaatttgaaagggcccttgggtataagaagagcaggctcacgaaagtcatacccag

SEQ ID NO: 619130 - DNA, 238 bp, Homo sapiens
tagaatcgaggaccgatctcagggatctcccacctcagccactcaaggctaataatggtataattatatatatatttttttggtagagaggtagagtaggggttttgccatgttgtccagactcgtctggaactcctgggctcaaggaatctaccagccttgacctcccaaagtgctgggattacaggcgtgagccagcgtgcccagcctcagattcttcttcttcttcttcttcttc

SEQ ID NO: 619131 - DNA, 529 bp, Homo sapiens
  misc_feature (503)..(503): n is a, c, g, or t
actcatggcggtaaatatgcaactagcatacaaccgagcaatttgcattcctgagcatttatcccaaagacatgaaaaaccatgttcccataaaaccagtgcatgaatgtttacagcaactttatttatagtaataaaaaactggaagcaacacagatgtccttcaaagggtgaaaggttaaactgtggtccatccacaccatggaatactaattggtaataaaaaaaaaactagggataagggcaacaacctggataaatctctggagagttattatcctaagtgaaaaaaaaccccagaaggttacacactgcattttctatttatacaactttcttgaaatggcaacattagagaaatggagtacagattagtagctctacaggttaaagagcggttgggatgtaaggaaagtgaatgtatctataaaagggcaacgtgaggaattcttgtggtgatagagatgccctgtttcttgaccatatcaaatgtcaaaacgtcnatgttctggccgggtgctggctcaca

SEQ ID NO: 619132 - DNA, 714 bp, Homo sapiens
  misc_feature (1)..(1): n is a, c, g, or t
  misc_feature (48)..(48): n is a, c, g, or t
  misc_feature (51)..(51): n is a, c, g, or t
  misc_feature (53)..(53): n is a, c, g, or t
  misc_feature (56)..(57): n is a, c, g, or t
  misc_feature (59)..(59): n is a, c, g, or t
  misc_feature (61)..(61): n is a, c, g, or t
  misc_feature (64)..(64): n is a, c, g, or t
  misc_feature (67)..(67): n is a, c, g, or t
  misc_feature (71)..(71): n is a, c, g, or t
  misc_feature (73)..(73): n is a, c, g, or t
  misc_feature (79)..(79): n is a, c, g, or t
  misc_feature (108)..(108): n is a, c, g, or t
  misc_feature (135)..(135): n is a, c, g, or t
  misc_feature (144)..(144): n is a, c, g, or t
  misc_feature (149)..(149): n is a, c, g, or t
  misc_feature (224)..(224): n is a, c, g, or t
  misc_feature (237)..(237): n is a, c, g, or t
  misc_feature (355)..(355): n is a, c, g, or t
  misc_feature (357)..(358): n is a, c, g, or t
  misc_feature (367)..(367): n is a, c, g, or t
  misc_feature (372)..(372): n is a, c, g, or t
  misc_feature (407)..(407): n is a, c, g, or t
  misc_feature (411)..(411): n is a, c, g, or t
  misc_feature (447)..(447): n is a, c, g, or t
  misc_feature (482)..(482): n is a, c, g, or t
  misc_feature (504)..(505): n is a, c, g, or t
  misc_feature (524)..(524): n is a, c, g, or t
  misc_feature (546)..(546): n is a, c, g, or t
ntatgaagaccaagtgataaatctggtttcattgttacactaggcttntcncnatnnananttngcngggntnaatatncctgaggaagattttagttacaatgtatnccaatcccatcgatctgatctgagcanagctgacanatgangctggtcaaaaataaagggagattactcaggatggagtcagtcttaaacaaacttgtttctaacggcccatggtnggcattacaacancaggtgaggaaagagtagcatcttcttctttccactgagaagtaatggtctttaactgagtgtagaattggatgccctgtttgccatagaaattggtgtctcccctgaaggaggttcnanngccggtgantgagnacattggcaaaggcactggaatggggacattcacncccncctgtccaacatccaccaagtgggcatatttccgancagtggctccattggtggtgaagatggcagttccntttccatatgggttgttttttnntatctggatggctttttcntttttttttttttttattttcncaagaactggaccaaaaatctcctctttgtaacaggacatatttggcgtgacattcgagatgatggttggtccaacaaagttgccattttcatagcctttcactttaatttttcgtccatcaagaaggatggaagctccctcctttgttccactatcaatcagattac

SEQ ID NO: 619133 - DNA, 2396 bp, Homo sapiens
  misc_feature (1039)..(1039): n is a, c, g, or t
gcgcctgtgtcgtctctgtcgccgtccccgtctcctgccaggctgctggagccctgcgagcctgctgtggtggtgccccatgtgctgcgcagaccatgtggcttgctcctgccaaatgctgcgcatgggcatgcctgggtgcgcatgtggcagatacgcgcgcgcgctacttgctgctgctagtggctgcgtgcagcttgctccatgcactcggctgcattgcgctgtcctgttctgctctcactcacatgccacgccacagagataccctatcaacgaaacctgatgcctgcaaatcagaccccacacaggataacgcctatagataccctattcatatccactatgattgcgcacacgcgcacgccactcccgccagtaagttcacagcacgatatccgttaagtgcgtaccgtactcagaatccgataaccgttttccatattctcgctacccgtgatccaaatgcgtaacaccgcgcaacaaagtccggcacgtcaactacacaattgtcataccgcggtgtctagcacggcaaatacggccccctgtgctaccgtgacttggccacgggtcgccacctgccccgtcaccggcagtagctgcacccactaatatacccacgcactatgcgcttacacaacacagcctggcgacaacatcgctactatattcacaacggtacgggctaccaacacataacatcacacacactggccatacgaacaccgacacattacaaaacccacaattaattacgacataatctgctaaaacacgtcacacacatgccgtctcaactgtccaataccacctcaggccacatactggctctactccaccagctatactatagcatacacaagctcacacgcacaaacagccctatcaacaacctcaccccgggatcagcgatcacacactcctccacattattacttactcaccccgacacatcgctctacatctcacttctaccaccactaatggtcgaccacacacacaacacattattcacctcccatacacatcacgatgnccttattcacaccacaccctaaaatccctcgatcctcgtaccccctcactattccctgagtaccgacgcaactcctcacaaaaccagtcacccgtgatatacatcactattcacactacaacatcctataatcacggacgacagtcaccacactcgatctataggtgcccgcaccactctaccacacatgtaacatactcctccgataacgtattaatccctcgcccatatgttgagcaggtgcaacatcagtccactattacatagagcagtcgcgagccgacccatgtactgcgtctccacgttagtacgatcatcaactctcgctcagtgcctcatcttccgtacaaacaaacattacgtgcccaacacctatttagtcgaccgtcacaaccagtcgcaaatacacacagcctatattactacacactagctggcatctcacccatcctcagcaaacacatatctagtcacacaactactctccctccgcctctcttcttgttcgcaacacgcacctcgtcgcactgacgttcttatccacaatcattcatatatccacgaaccatttctacgtaatcaaatcaccgactcactattgagttgctgctacacccaccaaactattccttcaacactactccatccctccctacacactcgtctcctcaccataatatcaccaacgtgtgtactaccccccggcctaaaccacaaccccccatcgtctaccctttacgtccccaacaacctatttaaatacccacaaaccctagatcggcaaaatcaaatagtccccaccagagctaccaccacactacaaccaacttatggtactaactctactccgcaacacacccactcattacgtacactatactgcccaacatcttctccacacaacacaatcatataagtacttcatatgcgacagtcacttagctcacccttatacttacccatcctcaccatactacaatatgagtactaaacaaaacaaactcaccgaccacgccacgcaccaaccactatatattgacgacctccctacatccacaaaccacaacaatcactctcaccacatactaaccccacaccactctctcacccacaacccacccccgaccacccaacgcatcaacctcaaccacacttacatccctaataccaccaacaaaccactaccctaccacaaactccttcaccacatctctaacaccaccaccaccccccgctaatacatcaactctcaccacaccatcctgctcacaacaccacaccacctactcacccacactcatctccctgctcctatcacccatctctcctcatccctaaccaaccaccactacccacc

SEQ ID NO: 619134 - DNA, 144 bp, Homo sapiens
gcaatagatatagtacgcaggaaagatgaaaattataccagcatatatagcaaggctaccctatactctgcatatgattaactagaatactttgcagagggcaagctagacccgaaccagacggctactagacagtaaagggca

SEQ ID NO: 619135 - DNA, 397 bp, Homo sapiens
aggaggaggattaaaacgaggtgagcatgaagggacgcccgccccccacgcccctttttggagatgatgatgatgacgatgacattgactgggtgggatgaagacccaggaaactggggcaaaggtttttttgcaacccttccctaagcatgattttgcccagccaaccctgggtttaggcgagccccagggtgaggtcaactgtgccccggcaacaaaacctggggtgaggtctccctggtaaaactaagggagattaccccctttaaatcccagggcagtcaacagcctggcctatagtcctgggacatggatttttttttttgccttaaatttgaaacaaaagggcaatgactttgaaaataaaactaaaataaatgtttataatgaaacttga

SEQ ID NO: 619136 - DNA, 939 bp, Homo sapiens
cttcaaggcgttacggagaacgccattaggattctttaatggtcctcctaggtgtactaccaaggattatagagattgtgatacctaaatgtccttctgtacgattccattgccttgttaataagtggagttggtggaatggacgcgtgatgctcctccgtttctgagatatatccatttcagtgttcgtgaaagactaggacgtattttcgcaatttgtacttagtgagtacttacatttgtagtgacgctcctacatcttccgataaataaacgagttaggaaaactgttcattcatagaacaccggtataggtctccgacgggtctcgttgtaggcgacctcgggccctatgagtcattagcgcgtttggccttagaaaagtactcgaagatttagaccgttgtcgtccacatcatgatatacggatatgatatatgcccgattggtaccgcattctcggcttttgttagaaccaatttcgtcgccatatgggggggggtcagagcagctttcttgttgagtagttaaatatgaccttcatgcttgccttcgccaggctctaaccaagaggccctctcccacatgtatacagaaattagtgtgctgcatggccctgtgtgaaccacgttgaatccccccacgaagtagatggttggcgcgcgatatcgaagtgcgaatttagtgaacggagtctcccagtgtagggggcatacgtgtggaccgatgtctggagcaacgaatatattctgcgtgtgcgggttttgtttgaaagactgaactgtaatggcatggtcacttggcttttaaagtttacttccacagccttgaggaagtgacagtgggggaacatgaagctcgttgtgactatcaacaccggaacgtaattagtcgcgtttttgttccaataaagtttccaggaccaggcgtgaaatcagg

SEQ ID NO: 619137 - DNA, 132 bp, Homo sapiens
tctgtgtctctgtaggttcagtccccattggtggccgcattgcatttgcatggtacagggcagggcatccgtgtgcactcgtctcgttcatgttccaggcatgcgtcatggcatcggcagggcgcatgcagg

SEQ ID NO: 619138 - DNA, 222 bp, Homo sapiens
agttcatcacatgagtatgattgattaagtcaattgacttcatgattaagctcaatatctagccctcgtgcccgtccccataagttgggtggttgaaagtcccagctcttccgtcatgtacttggtcctactgtgaccagcctctgtgctgaagcttcctagggtcccaccatgagttatttcattagcatactagagacgttcacttaatgccgctagcgc

SEQ ID NO: 619139 - DNA, 1314 bp, Homo sapiens
  misc_feature (32)..(33): n is a, c, g, or t
  misc_feature (677)..(677): n is a, c, g, or t
tttaaagatggcacagaatatatataatatgnnccattagtgaattttgggttataaagacccaaaatgcgctataatgtattatgtactgtaattttaatcccttgaactatatggtacggcatgattttacagtggacatcttgatatggtatacacattaaactattatgtggaattaaatagtagctcttcaagtgaagtaagtataaatgtcaacgaccatcttttaaggaattttggatcaccgtaacacattttacacattgttaatcgctacccctgggattgtttaaactgtttcgtcatggagccacaaaagtttgaaatcctcctagtaagatactttgcatcttgtttgcagtctgttcagggagaactagtgaaaggctgtagtatatttggactagaaagtaactgaatctcaaaccaggtagtgtggagataccccctccatgaattacattcttcattccagggtaggtaatacacagaaacatgttactttacctgttgccaaggcctttgaaaaatctacttttacaaaattggaaaacgtcacttgtagtcaaagccattgccagtcattgattttaatgttgtaagattgcttataggacatttaatttaggaagaaatgatcatacgtctatgagagggtactaggaaaagcttanaaatttcaagggctctgtttattctgttacaggtggaagtgctgcatcagtaaatgctaattttgctcattttgataacttccccaaatcctccagtgctgattttggaaccttcaatacttcccagagtcatcaaacagcatcagctgttagtaaagtttcaacgaacaaagctggtttacagactgcagacaaatatgcagcacttgctaatttagacaatatcttcagtgccgggcaaggtatcaagctttaagcaaaacaaatacaaatttgtgttaaacagtgctcttaatttggttgtatttattaaaatctgaacatgctacacttttctcagttgttgtatagaaattttgtctgcactgtcattttgagtaaaatgttcacttgacacattttagacctgaaatatcaactacaaaactgaagacatagggactgatttgtaaactttcagtcttactagttgagaaaaattttattttgtcctagaaggcgtgctttacttttctttggctataaagagccaagaaaccccattggcagagctgaatggaggattatttggtggtttctgtaatatatttacttcgaacaattttccgttaacatcttggtgggttttttatattta

SEQ ID NO: 619140 - DNA, 860 bp, Homo sapiens
  misc_feature (860)..(860): n is a, c, g, or t
tagctcctccaaatatgccccgtcttactaccatgtgatgccaaagcaaaattccactctgtgtgggtgataaaagatcagacccagagcagaatgaaagagctaaagacaccgagtactccttgtggcttgcagcaactccgtgctcagttgaagagcgaaaattcgcaacaagagtcaacactggtcacttaggcaccataaaaaagcgacaggacagatttcacaggcaccggctgatagccagaatgccatagatcacaaaattgcagcagtgatacagaggaacactcaagacacaaccgtgcaccgactcactaactggaccgacccggacaaccacccgcgacagacgctctcccgcccggaacggacaaccgtgaaccaacaccacgtcacacacactgcctcctgaaaacgcacacaccggcacactcgacgcaaaactacctctcaccactacctcggtaacctactaccgaccgacactgagccctctgaacaggaactcctacgcgacaggaccctaccaggcacgtggttaccccggacactctgacgcaggaaccaaccgatgtgctctgtcaaaaatcggacggatgccttcttaagccttctcgacgcataaattacactatctcctgactgacaccactgccggcggacaccgcacacgtggtggtggcttcgtgcgaacactgaactcgaagccaaagaacgttccccagcggtaagaaacaagccagccagctcaactcactgttggaacccagggccttcggccactcccttatctcaagcctaacaaccctccacttggttggcggcccactgcaccgcggactccaccacacccctgn

SEQ ID NO: 619141 - DNA, 5026 bp, Homo sapiens
tggcggcggcggcggcggttgtcccggctgtgccggttggtgtggcccgtcagcccgcgtaccacagcgcccgggccgcgtcgagcccagtacagccaagccgctgcggccgggtccggcgcgggcggcgcgcgcagacggagggcggcggccgcggccagggcggcccgtgggaccgcgggcccccggcgcagcgctgcccggctcccggccctgccggcctcctcccttggcgccgcggccatggcggccagcgcgaagcggaagcaggaggagaagcacctgaagatgctgcgggacatgaccggcctcccgcacaaccgaaagtgcttcgactgcgaccagcgcggccccacctacgttaacatgacggtcggctccttcgtgtgtacctcctgctccggcagcctgcgaggattaaatccaccacacagggtgaaatctatctccatgacaacattcacacaacaggaaattgaattcttacaaaaacatggaaatgaagtctgtaaacagatttggctaggattatttgatgatagatcttcagcaattccagacttcagggatccacaaaaagtgaaagagtttctacaagaaaagtatgaaaagaaaagatggtatgtcccgccagaacaagccaaagtcgtggcatcagttcatgcatctatttcagggtcctctgccagtagcacaagcagcacacctgaggtcaaaccactgaaatctcttttaggggattctgcaccaacactgcacttaaataagggcacacctagtcagtccccagttgtaggtcgttctcaagggcagcagcaggagaagaagcaatttgaccttttaagtgatctcggctcagacatctttgctgctccagctcctcagtcaacagctacagccaattttgctaactttgcacatttcaacagtcatgcagctcagaattctgcaaatgcagattttgcaaactttgatgcatttggacagtctagtggttcgagtaattttggaggtttccccacagcaagtcactctccttttcagccccaaactacaggtggaagtgctgcatcagtaaatgctaattttgctcattttgataacttccccaaatcctccagtgctgattttggaaccttcaatacttcccagagtcatcaaacagcatcagctgttagtaaagtttcaacgaacaaagctggtttacagactgcagacaaatatgcagcacttgctaatttagacaatatcttcagtgccgggcaaggtggtgatcagggaagtggctttgggaccacaggtaaagctcctgttggttctgtggtttcagttcccagtcagtcaagtgcatcttcagacaagtatgcagctctggcagaactagacagcgttttcagttctgcagccacctccagtaatgcgtatacttccacaagtaatgctagcagcaatgtttttggaacagtgccagtggttgcttctgcacagacacagcctgcttcatcaagtgtgcctgctccatttggagctacgccttccacaaatccatttgttgctgctgctggtccttctgtggcatcttctacaaacccatttcagaccaatgccagaggagcaacagcggcaacctttggcactgcatccatgagcatgcccacgggattcggcactcctgctccctacagtcttcccaccagctttagtggcagctttcagcagcctgcctttccagcccaagcagctttccctcaacagacagctttttctcaacagcccaatggtgcaggttttgcagcatttggacaaacaaagccagtagtaaccccttttggtcaagttgcagctgctggagtatctagtaatccttttatgactggtgcaccaacaggacaatttccaacaggaagctcatcaaccaatcctttcttatagccttatatagacaatttactggaacgaacttttatgtggtcacattacatctctccacctcttgcactgttgtcttgtttcactgatcttagctttaaacacaagagaagtctttaaaaagcctgcattgtgtattaaacaccaggtaatatgtgcaaaaccgagggctccagtaacaccttctaacctgtgaattggcagaaaagggtagcggtatcatgtatattaaaattggctaatattaagttattgcagataccacattcattatgctgcagtactgtacatatttttcttagaaattagctatttgtgcatatcagtatttgtaactttaacacattgttatgtgagaaatgttactggggaaatagatcagccacttttaaggtgctgtcatatatcttggaatgaatgacctaaaatcattttaaccattgctactggaaagtaacagagtcaaaattggaaggttttattcattcttgaatttttcctttctaaagagctcttctatttatacatgcctaaattcttttaaaatgtagagggatacctgtctgcataataaagctgatcatgttttgctacagtttgcaggtgaaaaaaaataaatattataaaatatgctattgtttttgtgttcttgctgcaatgcctttaccaaagtggccttaaatatgagtagtgaattgagaacatcttgaattcttaaaagacttcttagtgactttttataaaaaggccatgtagaaaatttattaaaactactatgactgctacattcaggaatatgccagtggtaaagcatttaaatgtagcttgtcagatttaccataatcctactaatttctttgcagcttattaattttgtgaaatttgtatatatgaagaatttgcatgtatgtgtatttacaaatttttctaagtatcttgaattctcagactgcaaaaggcctattttaactattgattttttttaaaaaaaattgtctttgaatgtattggaagtagacatgcattaactgtgacattattgcacctcagtttttttctttctttttttgggcaaactgatattatctataggatatttgtttatgtttgttttttgggggaaagaaactggaactcagtgttaccttaaagttacggaatactttgttttaaaggaaaagataataagtttagttatatctttttgttaatattcaaatgaacttgtttaagtatctatgtacagtaatgcctcattcatctagaggtaatctggcagtcttgtgaaaaccgaacacaactcagaaacttggaatcgttttttttaaaaatgcctctgagcaacccatataagtcacaaagtctgtgtgttagagcttatgcatttgtttttatgagagattttaataaatttaattatttgcttgtccagactatagcatattagctgtttagaagggatggcttgaaaggaaggagactgaaaaacactctgagagcatacactgtccaaggccattagtgtaaggaccgctacccagcctagaggacatcactatactacatcatctgatgattattctttattatgcctctaggtaattaagtaaaggtgaaattgcatacacagatatgtagtacatattttaaaagttttatcttaaattgattaaaactttttaaaaagctttggtattaaaagaggtaaacatcagtttcctcaaacattttattcatgttgaatgcctttttgcaatgatgactgagttgttatcatagtattttaaaacctgtatagtgttttagacttgttaaaacattgctgtctagtgtacatctagctaaaagtgtggtttatctaaaccgttttaataagcaagatgactgggaaatctctgccccttttctgagcagtatgcctcttcttttagaattaaatgaatgctgcacaggtccagatgtgtgttgatgtagacttgaaatgtctccacattttggaggacttcctcagcccttttcattgagggaaaatatatttgaatttctgttttagattgtatcgggtcccagttgattcatgtgtacaaagttatgctacctaattacagaccattacccaaatatcctaccaggctttccatctgaatagtaaattaaacagttgttatcaaaatgattttaaagactatttctttttctgggtaactattgaagtttgtaattaaatgggggctcttactgactttaaattagcgcttataaaataaaaatgtttagttcaagaagagacccaagctgggtatggtggtgtgagagcctgtgagtcctagctacctggaggtgaggtgggaacatcacttgagcccaggagttggaggctgcagtgcgctacgatcacaccactgcacaccagcctggggatagagtgagatcccatctctaaaaaatgaaaaaaagaagagaggtagctttaaagtggtttttctcatgatattcactgtttattattaaagaaaatcagctttcgttagacttttacatttagatttattcttagttttatatagaccatcaaaattatgttgagtactaaaaaggagaaaaaatcctggaaggtaacaaggctgaagaccttcaaatttcctggcttactggtttagtcacatcatttttcctgttcaggtatctgcagatatccctgttcaggaaagatcttttttcaggatggcaaacttttgacatagtttaaagacattttttccccattttttgaaatagagaatattttattatttttgtgaaaatagagttttggtaatcactttcttcctcaaaataagtccttctgttaatttgtaaaagcacattagtgctttacctgtgaaattccccgcccccctgcacacacacccactttagtacagttcctgtcaattggcaacatggagagggtgacctggctgctggtttaccactgtaccaacatctctggagcattttagtttcagaaccttaacactccccaacagctttgttgatgtagcttgtatctctgagaatttattgtattaaaattaatactgagatatttttaaaa

SEQ ID NO: 619142 - DNA, 2906 bp, Homo sapiens
tggcggcggcggcggcggttgtcccggctgtgccggttggtgtggcccgtcagcccgcgtaccacagcgcccgggccgcgtcgagcccagtacagccaagccgctgcggccgggtccggcgcgggcggcgcgcgcagacggagggcggcggccgcggccagggcggcccgtgggaccgcgggcccccggcgcagcgctgcccggctcccggccctgccggcctcctcccttggcgccgcggccatggcggccagcgcgaagcggaagcaggaggagaagcacctgaagatgctgcgggacatgaccggcctcccgcacaaccgaaagtgcttcgactgcgaccagcgcggccccacctacgttaacatgacggtcggctccttcgtgtgtacctcctgctccggcagcctgcgaggattaaatccaccacacagggtgaaatctatctccatgacaacattcacacaacaggaaattgaattcttacaaaaacatggaaatgaagtctgtaaacagatttggctaggattatttgatgatagatcttcagcaattccagacttcagggatccacaaaaagtgaaagagtttctacaagaaaagtatgaaaagaaaagatggtatgtcccgccagaacaagccaaagtcgtggcatcagttcatgcatctatttcagggtcctctgccagtagcacaagcagcacacctgaggtcaaaccactgaaatctcttttaggggattctgcaccaacactgcacttaaataagggcacacctagtcagtccccagttgtaggtcgttctcaagggcagcagcaggagaagaagcaatttgaccttttaagtgatctcggctcagacatctttgctgctccagctcctcagtcaacagctacagccaattttgctaactttgcacatttcaacagtcatgcagctcagaattctgcaaatgcagattttgcaaactttgatgcatttggacagtctagtggttcgagtaattttggaggtttccccacagcaagtcactctccttttcagccccaaactacaggtggaagtgctgcatcagtaaatgctaattttgctcattttgataacttccccaaatcctccagtgctgattttggaaccttcaatacttcccagagtcatcaaacagcatcagctgttagtaaagtttcaacgaacaaagctggtttacagactgcagacaaatatgcagcacttgctaatttagacaatatcttcagtgccgggcaaggtggtgatcagggaagtggctttgggaccacaggtaaagctcctgttggttctgtggtttcagttcccagtcagtcaagtgcatcttcagacaagtatgcagctctggcagaactagacagcgttttcagttctgcagccacctccagtaatgcgtatacttccacaagtaatgctagcagcaatgtttttggaacagtgccagtggttgcttctgcacagacacagcctgcttcatcaagtgtgcctgctccatttggagctacgccttccacaaatccatttgttgctgctgctggtccttctgtggcatcttctacaaacccatttcagaccaatgccagaggagcaacagcggcaacctttggcactgcatccatgagcatgcccacgggattcggcactcctgctccctacagtcttcccaccagctttagtggcagctttcagcagcctgcctttccagcccaagcagctttccctcaacagacagctttttctcaacagcccaatggtgcaggttttgcagcatttggacaaacaaagccagtagtaaccccttttggtcaagttgcagctgctggagtatctagtaatccttttatgactggtgcaccaacaggacaatttccaacaggaagctcatcaaccaatcctttcttatagccttatatagacaatttactggaacgaacttttatgtggtcacattacatctctccacctcttgcactgttgtcttgtttcactgatcttagctttaaacacaagagaagtctttaaaaagcctgcattgtgtattaaacaccaggtaatatgtgcaaaaccgagggctccagtaacaccttctaacctgtgaattggcagaaaagggtagcggtatcatgtatattaaaattggctaatattaagttattgcagataccacattcattatgctgcagtactgtacatatttttcttagaaattagctatttgtgcatatcagtatttgtaactttaacacattgttatgtgagaaatgttactggggaaatagatcagccacttttaaggtgctgtcatatatcttggaatgaatgacctaaaatcattttaaccattgctactggaaagtaacagagtcaaaattggaaggttttattcattcttgaatttttcctttctaaagagctcttctatttatacatgcctaaattcttttaaaatgtagagggatacctgtctgcataataaagctgatcatgttttgctacagtttgcaggtgaaaaaaaataaaaaaggggggggccgcctttatttaatatagaaataaaaatagaaaagaaaaaaaaaataaaaataaaaaagagaataagaagataaaaaaaaagataaggaaaataaaagataaagaaagagcacaagaaagaagaacgatagaggagacgagacagaaccaacaaagaaagaggagcagaaataaaaggacagcggacagagaggtacaaaaaaaaagaagacagagaagaagagacaaggaggagggggggaagcaaggaaggaaggaagcagagaagaagaaaaaaagcgagaggaaaaaaaaagcaagagaaaagagagacagaggaagaagcaagacgaaggccaagacagacc

SEQ ID NO: 619143 - DNA, 5078 bp, Homo sapiens
tggcggcggcggcggcggttgtcccggctgtgccggttggtgtggcccgtcagcccgcgtaccacagcgcccgggccgcgtcgagcccagtacagccaagccgctgcggccgggtccggcgcgggcggcgcgcgcagacggagggcggcggccgcggccagggcggcccgtgggaccgcgggcccccggcgcagcgctgcccggctcccggccctgccggcctcctcccttggcgccgcggccatggcggccagcgcgaagcggaagcaggaggagaagcacctgaagatgctgcgggacatgaccggcctcccgcacaaccgaaagtgcttcgactgcgaccagcgcggccccacctacgttaacatgacggtcggctccttcgtgtgtacctcctgctccggcagcctgcgaggattaaatccaccacacagggtgaaatctatctccatgacaacattcacacaacaggaaattgaattcttacaaaaacatggaaatgaagtctgtaaacagatttggctaggattatttgatgatagatcttcagcaattccagacttcagggatccacaaaaagtgaaagagtttctacaagaaaagtatgaaaagaaaagatggtatgtcccgccagaacaagccaaagtcgtggcatcagttcatgcatctatttcagggtcctctgccagtagcacaagcagcacacctgaggtcaaaccactgaaatctcttttaggggattctgcaccaacactgcacttaaataagggcacacctagtcagtccccagttgtaggtcgttctcaagggcagcagcaggagaagaagcaatttgaccttttaagtgatctcggctcagacatctttgctgctccagctcctcagtcaacagctacagccaattttgctaactttgcacatttcaacagtcatgcagctcagaattctgcaaatgcagattttgcaaactttgatgcatttggacagtctagtggttcgagtaattttggaggtttccccacagcaagtcactctccttttcagccccaaactacaggtggaagtgctgcatcagtaaatgctaattttgctcattttgataacttccccaaatcctccagtgctgattttggaaccttcaatacttcccagagtcatcaaacagcatcagctgttagtaaagtttcaacgaacaaagctggtttacagactgcagacaaatatgcagcacttgctaatttagacaatatcttcagtgccgggcaaggtggtgatcagggaagtggctttgggaccacaggtaaagctcctgttggttctgtggtttcagttcccagtcagtcaagtgcatcttcagacaagtatgcagctctggcagaactagacagcgttttcagttctgcagccacctccagtaatgcgtatacttccacaagtaatgctagcagcaatgtttttggaacagtgccagtggttgcttctgcacagacacagcctgcttcatcaagtgtgcctgctccatttggagctacgccttccacaaatccatttgttgctgctgctggtccttctgtggcatcttctacaaacccatttcagaccaatgccagaggagcaacagcggcaactttctggagcaatgcattctcaagtgtttcctcacgctcattttgcggcaacctttggcactgcatccatgagcatgcccacgggattcggcactcctgctccctacagtcttcccaccagctttagtggcagctttcagcagcctgcctttccagcccaagcagctttccctcaacagacagctttttctcaacagcccaatggtgcaggttttgcagcatttggacaaacaaagccagtagtaaccccttttggtcaagttgcagctgctggagtatctagtaatccttttatgactggtgcaccaacaggacaatttccaacaggaagctcatcaaccaatcctttcttatagccttatatagacaatttactggaacgaacttttatgtggtcacattacatctctccacctcttgcactgttgtcttgtttcactgatcttagctttaaacacaagagaagtctttaaaaagcctgcattgtgtattaaacaccaggtaatatgtgcaaaaccgagggctccagtaacaccttctaacctgtgaattggcagaaaagggtagcggtatcatgtatattaaaattggctaatattaagttattgcagataccacattcattatgctgcagtactgtacatatttttcttagaaattagctatttgtgcatatcagtatttgtaactttaacacattgttatgtgagaaatgttactggggaaatagatcagccacttttaaggtgctgtcatatatcttggaatgaatgacctaaaatcattttaaccattgctactggaaagtaacagagtcaaaattggaaggttttattcattcttgaatttttcctttctaaagagctcttctatttatacatgcctaaattcttttaaaatgtagagggatacctgtctgcataataaagctgatcatgttttgctacagtttgcaggtgaaaaaaaataaatattataaaatatgctattgtttttgtgttcttgctgcaatgcctttaccaaagtggccttaaatatgagtagtgaattgagaacatcttgaattcttaaaagacttcttagtgactttttataaaaaggccatgtagaaaatttattaaaactactatgactgctacattcaggaatatgccagtggtaaagcatttaaatgtagcttgtcagatttaccataatcctactaatttctttgcagcttattaattttgtgaaatttgtatatatgaagaatttgcatgtatgtgtatttacaaatttttctaagtatcttgaattctcagactgcaaaaggcctattttaactattgattttttttaaaaaaaattgtctttgaatgtattggaagtagacatgcattaactgtgacattattgcacctcagtttttttctttctttttttgggcaaactgatattatctataggatatttgtttatgtttgttttttgggggaaagaaactggaactcagtgttaccttaaagttacggaatactttgttttaaaggaaaagataataagtttagttatatctttttgttaatattcaaatgaacttgtttaagtatctatgtacagtaatgcctcattcatctagaggtaatctggcagtcttgtgaaaaccgaacacaactcagaaacttggaatcgttttttttaaaaatgcctctgagcaacccatataagtcacaaagtctgtgtgttagagcttatgcatttgtttttatgagagattttaataaatttaattatttgcttgtccagactatagcatattagctgtttagaagggatggcttgaaaggaaggagactgaaaaacactctgagagcatacactgtccaaggccattagtgtaaggaccgctacccagcctagaggacatcactatactacatcatctgatgattattctttattatgcctctaggtaattaagtaaaggtgaaattgcatacacagatatgtagtacatattttaaaagttttatcttaaattgattaaaactttttaaaaagctttggtattaaaagaggtaaacatcagtttcctcaaacattttattcatgttgaatgcctttttgcaatgatgactgagttgttatcatagtattttaaaacctgtatagtgttttagacttgttaaaacattgctgtctagtgtacatctagctaaaagtgtggtttatctaaaccgttttaataagcaagatgactgggaaatctctgccccttttctgagcagtatgcctcttcttttagaattaaatgaatgctgcacaggtccagatgtgtgttgatgtagacttgaaatgtctccacattttggaggacttcctcagcccttttcattgagggaaaatatatttgaatttctgttttagattgtatcgggtcccagttgattcatgtgtacaaagttatgctacctaattacagaccattacccaaatatcctaccaggctttccatctgaatagtaaattaaacagttgttatcaaaatgattttaaagactatttctttttctgggtaactattgaagtttgtaattaaatgggggctcttactgactttaaattagcgcttataaaataaaaatgtttagttcaagaagagacccaagctgggtatggtggtgtgagagcctgtgagtcctagctacctggaggtgaggtgggaacatcacttgagcccaggagttggaggctgcagtgcgctacgatcacaccactgcacaccagcctggggatagagtgagatcccatctctaaaaaatgaaaaaaagaagagaggtagctttaaagtggtttttctcatgatattcactgtttattattaaagaaaatcagctttcgttagacttttacatttagatttattcttagttttatatagaccatcaaaattatgttgagtactaaaaaggagaaaaaatcctggaaggtaacaaggctgaagaccttcaaatttcctggcttactggtttagtcacatcatttttcctgttcaggtatctgcagatatccctgttcaggaaagatcttttttcaggatggcaaacttttgacatagtttaaagacattttttccccattttttgaaatagagaatattttattatttttgtgaaaatagagttttggtaatcactttcttcctcaaaataagtccttctgttaatttgtaaaagcacattagtgctttacctgtgaaattccccgcccccctgcacacacacccactttagtacagttcctgtcaattggcaacatggagagggtgacctggctgctggtttaccactgtaccaacatctctggagcattttagtttcagaaccttaacactccccaacagctttgttgatgtagcttgtatctctgagaatttattgtattaaaattaatactgagatatttttaaaa

SEQ ID NO: 619144 - DNA, 228 bp, Homo sapiens
tactcatagaggatcccagtgctacctccacaaacaggttcggtccaggctacttcaataaagcgaatgttgcataaagcagggtgacaaactttttagtttccctggtgcatataaaaagttggtgtttggcattattactggtagtctataaaagtgtgtagtaccatttatgccttaaaaaatgtatattcctttaggtttaaaaataattttgtttgctaaaaa

SEQ ID NO: 619145 - DNA, 202 bp, Homo sapiens
ctcggcctatctatatgtccaggcttctttccccatagtgtctggggacaagaggtgtgggttacatgagtaggttctttagtggctattggtaagatttgggtgcacccatcacccaagcagtatacacggcatcctacttgtagtcttttatccctcactccctccccaccatttcttcccctgggcgtcagtatagata

SEQ ID NO: 619146 - DNA, 298 bp, Homo sapiens
gcggatcccgtgattgtgtggtgttatgaagaagatgatgaatgatgttgataatcgcatctagatatttgaattgaacgatgatgatgatgaacgattaacgatatcgtcgaatgatttgaatttagaagaaaatatagagatatttaaatttagaagatattaaaaagagaattgaaagcgagtcagtaaccataactctcttatttttctctctcatattgccacgtgtacattcgtgatacattcgtttgtccactttcgttacccataacaccacacaaatccgggtaccgag

SEQ ID NO: 619147 - DNA, 4909 bp, Homo sapiens
tggcggcggcggcggcggttgtcccggctgtgccggttggtgtggcccgtcagcccgcgtaccacagcgcccgggccgcgtcgagcccagtacagccaagccgctgcggccgggtccggcgcgggcggcgcgcgcagacggagggcggcggccgcggccagggcggcccgtgggaccgcgggcccccggcgcagcgctgcccggctcccggccctgccggcctcctcccttggcgccgcggccatggcggccagcgcgaagcggaagcaggaggagaagcacctgaagatgctgcgggacatgaccggcctcccgcacaaccgaaagtgcttcgactgcgaccagcgcggccccacctacgttaacatgacggtcggctccttcgtgtgtacctcctgctccggcagcctgcgaggattaaatccaccacacagggtgaaatctatctccatgacaacattcacacaacaggaaattgaattcttacaaaaacatggaaatgaagtctgtaaacagatttggctaggattatttgatgatagatcttcagcaattccagacttcagggatccacaaaaagtgaaagagtttctacaagaaaagtatgaaaagaaaagatggtatgtcccgccagaacaagccaaagtcgtggcatcagttcatgcatctatttcagggtcctctgccagtagcacaagcagcacacctgaggtcaaaccactgaaatctcttttaggggattctgcaccaacactgcacttaaataagggcacacctagtcagtccccagttgtaggtcgttctcaagggcagcagcaggagaagaagcaatttgaccttttaagtgatctcggctcagacatctttgctgctccagctcctcagtcaacagctacagccaattttgctaactttgcacatttcaacagtcatgcagcaggtggaagtgctgcatcagtaaatgctaattttgctcattttgataacttccccaaatcctccagtgctgattttggaaccttcaatacttcccagagtcatcaaacagcatcagctgttagtaaagtttcaacgaacaaagctggtttacagactgcagacaaatatgcagcacttgctaatttagacaatatcttcagtgccgggcaaggtggtgatcagggaagtggctttgggaccacaggtaaagctcctgttggttctgtggtttcagttcccagtcagtcaagtgcatcttcagacaagtatgcagctctggcagaactagacagcgttttcagttctgcagccacctccagtaatgcgtatacttccacaagtaatgctagcagcaatgtttttggaacagtgccagtggttgcttctgcacagacacagcctgcttcatcaagtgtgcctgctccatttggagctacgccttccacaaatccatttgttgctgctgctggtccttctgtggcatcttctacaaacccatttcagaccaatgccagaggagcaacagcggcaacctttggcactgcatccatgagcatgcccacgggattcggcactcctgctccctacagtcttcccaccagctttagtggcagctttcagcagcctgcctttccagcccaagcagctttccctcaacagacagctttttctcaacagcccaatggtgcaggttttgcagcatttggacaaacaaagccagtagtaaccccttttggtcaagttgcagctgctggagtatctagtaatccttttatgactggtgcaccaacaggacaatttccaacaggaagctcatcaaccaatcctttcttatagccttatatagacaatttactggaacgaacttttatgtggtcacattacatctctccacctcttgcactgttgtcttgtttcactgatcttagctttaaacacaagagaagtctttaaaaagcctgcattgtgtattaaacaccaggtaatatgtgcaaaaccgagggctccagtaacaccttctaacctgtgaattggcagaaaagggtagcggtatcatgtatattaaaattggctaatattaagttattgcagataccacattcattatgctgcagtactgtacatatttttcttagaaattagctatttgtgcatatcagtatttgtaactttaacacattgttatgtgagaaatgttactggggaaatagatcagccacttttaaggtgctgtcatatatcttggaatgaatgacctaaaatcattttaaccattgctactggaaagtaacagagtcaaaattggaaggttttattcattcttgaatttttcctttctaaagagctcttctatttatacatgcctaaattcttttaaaatgtagagggatacctgtctgcataataaagctgatcatgttttgctacagtttgcaggtgaaaaaaaataaatattataaaatatgctattgtttttgtgttcttgctgcaatgcctttaccaaagtggccttaaatatgagtagtgaattgagaacatcttgaattcttaaaagacttcttagtgactttttataaaaaggccatgtagaaaatttattaaaactactatgactgctacattcaggaatatgccagtggtaaagcatttaaatgtagcttgtcagatttaccataatcctactaatttctttgcagcttattaattttgtgaaatttgtatatatgaagaatttgcatgtatgtgtatttacaaatttttctaagtatcttgaattctcagactgcaaaaggcctattttaactattgattttttttaaaaaaaattgtctttgaatgtattggaagtagacatgcattaactgtgacattattgcacctcagtttttttctttctttttttgggcaaactgatattatctataggatatttgtttatgtttgttttttgggggaaagaaactggaactcagtgttaccttaaagttacggaatactttgttttaaaggaaaagataataagtttagttatatctttttgttaatattcaaatgaacttgtttaagtatctatgtacagtaatgcctcattcatctagaggtaatctggcagtcttgtgaaaaccgaacacaactcagaaacttggaatcgttttttttaaaaatgcctctgagcaacccatataagtcacaaagtctgtgtgttagagcttatgcatttgtttttatgagagattttaataaatttaattatttgcttgtccagactatagcatattagctgtttagaagggatggcttgaaaggaaggagactgaaaaacactctgagagcatacactgtccaaggccattagtgtaaggaccgctacccagcctagaggacatcactatactacatcatctgatgattattctttattatgcctctaggtaattaagtaaaggtgaaattgcatacacagatatgtagtacatattttaaaagttttatcttaaattgattaaaactttttaaaaagctttggtattaaaagaggtaaacatcagtttcctcaaacattttattcatgttgaatgcctttttgcaatgatgactgagttgttatcatagtattttaaaacctgtatagtgttttagacttgttaaaacattgctgtctagtgtacatctagctaaaagtgtggtttatctaaaccgttttaataagcaagatgactgggaaatctctgccccttttctgagcagtatgcctcttcttttagaattaaatgaatgctgcacaggtccagatgtgtgttgatgtagacttgaaatgtctccacattttggaggacttcctcagcccttttcattgagggaaaatatatttgaatttctgttttagattgtatcgggtcccagttgattcatgtgtacaaagttatgctacctaattacagaccattacccaaatatcctaccaggctttccatctgaatagtaaattaaacagttgttatcaaaatgattttaaagactatttctttttctgggtaactattgaagtttgtaattaaatgggggctcttactgactttaaattagcgcttataaaataaaaatgtttagttcaagaagagacccaagctgggtatggtggtgtgagagcctgtgagtcctagctacctggaggtgaggtgggaacatcacttgagcccaggagttggaggctgcagtgcgctacgatcacaccactgcacaccagcctggggatagagtgagatcccatctctaaaaaatgaaaaaaagaagagaggtagctttaaagtggtttttctcatgatattcactgtttattattaaagaaaatcagctttcgttagacttttacatttagatttattcttagttttatatagaccatcaaaattatgttgagtactaaaaaggagaaaaaatcctggaaggtaacaaggctgaagaccttcaaatttcctggcttactggtttagtcacatcatttttcctgttcaggtatctgcagatatccctgttcaggaaagatcttttttcaggatggcaaacttttgacatagtttaaagacattttttccccattttttgaaatagagaatattttattatttttgtgaaaatagagttttggtaatcactttcttcctcaaaataagtccttctgttaatttgtaaaagcacattagtgctttacctgtgaaattccccgcccccctgcacacacacccactttagtacagttcctgtcaattggcaacatggagagggtgacctggctgctggtttaccactgtaccaacatctctggagcattttagtttcagaaccttaacactccccaacagctttgttgatgtagcttgtatctctgagaatttattgtattaaaattaatactgagatatttttaaaa

SEQ ID NO: 619148 - DNA, 105 bp, Homo sapiens
tgttgttttttgaaaagcttttgatattatggaaaatgcttatagtgtttagcgaaagcagcaggcacacgaatatgcaaaacacacatatacacagtatttgga

SEQ ID NO: 619149 - DNA, 4810 bp, Homo sapiens
tggcggcggcggcggcggttgtcccggctgtgccggttggtgtggcccgtcagcccgcgtaccacagcgcccgggccgcgtcgagcccagtacagccaagccgctgcggccgggtccggcgcgggcggcgcgcgcagacggagggcggcggccgcggccagggcggcccgtgggaccgcgggcccccggcgcagcgctgcccggctcccggccctgccggcctcctcccttggcgccgcggccatggcggccagcgcgaagcggaagcaggaggagaagcacctgaagatgctgcgggacatgaccggcctcccgcacaaccgaaagtgcttcgactgcgaccagcgcggccccacctacgttaacatgacggtcggctccttcgtgtgtacctcctgctccggcagcctgcgaggattaaatccaccacacagggtgaaatctatctccatgacaacattcacacaacaggaaattgaattcttacaaaaacatggaaatgaagtctgtaaacagatttggctaggattatttgatgatagatcttcagcaattccagacttcagggatccacaaaaagtgaaagagtttctacaagaaaagtatgaaaagaaaagatggtatgtcccgccagaacaagccaaagtcgtggcatcagttcatgcatctatttcagggtcctctgccagtagcacaagcagcacacctgaggtcaaaccactgaaatctcttttaggggattctgcaccaacactgcacttaaataagggcacacctagtcagtccccagttgtaggtcgttctcaagggcagcagcaggagaagaagcaatttgaccttttaagtgatctcggctcagacatctttgctgctccagctcctcagtcaacagctacagccaattttgctaactttgcacatttcaacagtcatgcagcaggtggaagtgctgcatcagtaaatgctaattttgctcattttgataacttccccaaatcctccagtgctgattttggaaccttcaatacttcccagagtcatcaaacagcatcagctgttagtaaagtttcaacgaacaaagctggtttacagactgcagacaaatatgcagcacttgctaatttagacaatatcttcagtgccgggcaaggtggtgatcagggaagtggctttgggaccacaggtaaagctcctgttggttctgtggtttcagttcccagtcagtcaagtgcatcttcagacaagtatgcagctctggcagaactagacagcgttttcagttctgcagccacctccagtaatgcgtatacttccacaagtaatgctagcagcaatgtttttggaacagtgccagtggttgcttctgcacagacacagcctgcttcatcaagtgtgcctgctccatttggagcctttggcactgcatccatgagcatgcccacgggattcggcactcctgctccctacagtcttcccaccagctttagtggcagctttcagcagcctgcctttccagcccaagcagctttccctcaacagacagctttttctcaacagcccaatggtgcaggttttgcagcatttggacaaacaaagccagtagtaaccccttttggtcaagttgcagctgctggagtatctagtaatccttttatgactggtgcaccaacaggacaatttccaacaggaagctcatcaaccaatcctttcttatagccttatatagacaatttactggaacgaacttttatgtggtcacattacatctctccacctcttgcactgttgtcttgtttcactgatcttagctttaaacacaagagaagtctttaaaaagcctgcattgtgtattaaacaccaggtaatatgtgcaaaaccgagggctccagtaacaccttctaacctgtgaattggcagaaaagggtagcggtatcatgtatattaaaattggctaatattaagttattgcagataccacattcattatgctgcagtactgtacatatttttcttagaaattagctatttgtgcatatcagtatttgtaactttaacacattgttatgtgagaaatgttactggggaaatagatcagccacttttaaggtgctgtcatatatcttggaatgaatgacctaaaatcattttaaccattgctactggaaagtaacagagtcaaaattggaaggttttattcattcttgaatttttcctttctaaagagctcttctatttatacatgcctaaattcttttaaaatgtagagggatacctgtctgcataataaagctgatcatgttttgctacagtttgcaggtgaaaaaaaataaatattataaaatatgctattgtttttgtgttcttgctgcaatgcctttaccaaagtggccttaaatatgagtagtgaattgagaacatcttgaattcttaaaagacttcttagtgactttttataaaaaggccatgtagaaaatttattaaaactactatgactgctacattcaggaatatgccagtggtaaagcatttaaatgtagcttgtcagatttaccataatcctactaatttctttgcagcttattaattttgtgaaatttgtatatatgaagaatttgcatgtatgtgtatttacaaatttttctaagtatcttgaattctcagactgcaaaaggcctattttaactattgattttttttaaaaaaaattgtctttgaatgtattggaagtagacatgcattaactgtgacattattgcacctcagtttttttctttctttttttgggcaaactgatattatctataggatatttgtttatgtttgttttttgggggaaagaaactggaactcagtgttaccttaaagttacggaatactttgttttaaaggaaaagataataagtttagttatatctttttgttaatattcaaatgaacttgtttaagtatctatgtacagtaatgcctcattcatctagaggtaatctggcagtcttgtgaaaaccgaacacaactcagaaacttggaatcgttttttttaaaaatgcctctgagcaacccatataagtcacaaagtctgtgtgttagagcttatgcatttgtttttatgagagattttaataaatttaattatttgcttgtccagactatagcatattagctgtttagaagggatggcttgaaaggaaggagactgaaaaacactctgagagcatacactgtccaaggccattagtgtaaggaccgctacccagcctagaggacatcactatactacatcatctgatgattattctttattatgcctctaggtaattaagtaaaggtgaaattgcatacacagatatgtagtacatattttaaaagttttatcttaaattgattaaaactttttaaaaagctttggtattaaaagaggtaaacatcagtttcctcaaacattttattcatgttgaatgcctttttgcaatgatgactgagttgttatcatagtattttaaaacctgtatagtgttttagacttgttaaaacattgctgtctagtgtacatctagctaaaagtgtggtttatctaaaccgttttaataagcaagatgactgggaaatctctgccccttttctgagcagtatgcctcttcttttagaattaaatgaatgctgcacaggtccagatgtgtgttgatgtagacttgaaatgtctccacattttggaggacttcctcagcccttttcattgagggaaaatatatttgaatttctgttttagattgtatcgggtcccagttgattcatgtgtacaaagttatgctacctaattacagaccattacccaaatatcctaccaggctttccatctgaatagtaaattaaacagttgttatcaaaatgattttaaagactatttctttttctgggtaactattgaagtttgtaattaaatgggggctcttactgactttaaattagcgcttataaaataaaaatgtttagttcaagaagagacccaagctgggtatggtggtgtgagagcctgtgagtcctagctacctggaggtgaggtgggaacatcacttgagcccaggagttggaggctgcagtgcgctacgatcacaccactgcacaccagcctggggatagagtgagatcccatctctaaaaaatgaaaaaaagaagagaggtagctttaaagtggtttttctcatgatattcactgtttattattaaagaaaatcagctttcgttagacttttacatttagatttattcttagttttatatagaccatcaaaattatgttgagtactaaaaaggagaaaaaatcctggaaggtaacaaggctgaagaccttcaaatttcctggcttactggtttagtcacatcatttttcctgttcaggtatctgcagatatccctgttcaggaaagatcttttttcaggatggcaaacttttgacatagtttaaagacattttttccccattttttgaaatagagaatattttattatttttgtgaaaatagagttttggtaatcactttcttcctcaaaataagtccttctgttaatttgtaaaagcacattagtgctttacctgtgaaattccccgcccccctgcacacacacccactttagtacagttcctgtcaattggcaacatggagagggtgacctggctgctggtttaccactgtaccaacatctctggagcattttagtttcagaaccttaacactccccaacagctttgttgatgtagcttgtatctctgagaatttattgtattaaaattaatactgagatatttttaaaa

SEQ ID NO: 619150 - DNA, 81 bp, Homo sapiens
gagtcgccatgttagtttcacatactgcaaggaaggagaatcgagtgtacaacggagataccgccagatattactagagac

SEQ ID NO: 619151 - DNA, 146 bp, Homo sapiens
ctaagtccgcgtacgcagctatataatcaatctggttactcttatagctcaaagcaatttggcctgatctatctatctgatggacatgcatcagagatgattatactaggaacaagagtgtcactgatgctcatgtgtaaatgcat

SEQ ID NO: 619152 - DNA, 4515 bp, Homo sapiens
tggcggcggcggcggcggttgtcccggctgtgccggttggtgtggcccgtcagcccgcgtaccacagcgcccgggccgcgtcgagcccagtacagccaagccgctgcggccgggtccggcgcgggcggcgcgcgcagacggagggcggcggccgcggccagggcggcccgtgggaccgcgggcccccggcgcagcgctgcccggctcccggccctgccggcctcctcccttggcgccgcggccatggcggccagcgcgaagcggaagcaggaggagaagcacctgaagatgctgcgggacatgaccggcctcccgcacaaccgaaagtgcttcgactgcgaccagcgcggccccacctacgttaacatgacggtcggctccttcgtgtgtacctcctgctccggcagcctgcgaggattaaatccaccacacagggtgaaatctatctccatgacaacattcacacaacaggaaattgaattcttacaaaaacatggaaatgaagtctgtaaacagatttggctaggattatttgatgatagatcttcagcaattccagacttcagggatccacaaaaagtgaaagagtttctacaagaaaagtatgaaaagaaaagatggtatgtcccgccagaacaagccaaagtcgtggcatcagttcatgcatctatttcagggtcctctgccagtagcacaagcagcacacctgaggtcaaaccactgaaatctcttttaggggattctgcaccaacactgcacttaaataagggcacacctagtcagtccccagttgtaggtcgttctcaagggcagcagcaggagaagaagcaatttgaccttttaagtgatctcggctcagacatctttgctgctccagctcctcagtcaacagctacagccaattttgctaactttgcacatttcaacagtcatgcagcaatgtttttggaacagtgccagtggttgcttctgcacagacacagcctgcttcatcaagtgtgcctgctccatttggagctacgccttccacaaatccatttgttgctgctgctggtccttctgtggcatcttctacaaacccatttcagaccaatgccagaggagcaacagcggcaacctttggcactgcatccatgagcatgcccacgggattcggcactcctgctccctacagtcttcccaccagctttagtggcagctttcagcagcctgcctttccagcccaagcagctttccctcaacagacagctttttctcaacagcccaatggtgcaggttttgcagcatttggacaaacaaagccagtagtaaccccttttggtcaagttgcagctgctggagtatctagtaatccttttatgactggtgcaccaacaggacaatttccaacaggaagctcatcaaccaatcctttcttatagccttatatagacaatttactggaacgaacttttatgtggtcacattacatctctccacctcttgcactgttgtcttgtttcactgatcttagctttaaacacaagagaagtctttaaaaagcctgcattgtgtattaaacaccaggtaatatgtgcaaaaccgagggctccagtaacaccttctaacctgtgaattggcagaaaagggtagcggtatcatgtatattaaaattggctaatattaagttattgcagataccacattcattatgctgcagtactgtacatatttttcttagaaattagctatttgtgcatatcagtatttgtaactttaacacattgttatgtgagaaatgttactggggaaatagatcagccacttttaaggtgctgtcatatatcttggaatgaatgacctaaaatcattttaaccattgctactggaaagtaacagagtcaaaattggaaggttttattcattcttgaatttttcctttctaaagagctcttctatttatacatgcctaaattcttttaaaatgtagagggatacctgtctgcataataaagctgatcatgttttgctacagtttgcaggtgaaaaaaaataaatattataaaatatgctattgtttttgtgttcttgctgcaatgcctttaccaaagtggccttaaatatgagtagtgaattgagaacatcttgaattcttaaaagacttcttagtgactttttataaaaaggccatgtagaaaatttattaaaactactatgactgctacattcaggaatatgccagtggtaaagcatttaaatgtagcttgtcagatttaccataatcctactaatttctttgcagcttattaattttgtgaaatttgtatatatgaagaatttgcatgtatgtgtatttacaaatttttctaagtatcttgaattctcagactgcaaaaggcctattttaactattgattttttttaaaaaaaattgtctttgaatgtattggaagtagacatgcattaactgtgacattattgcacctcagtttttttctttctttttttgggcaaactgatattatctataggatatttgtttatgtttgttttttgggggaaagaaactggaactcagtgttaccttaaagttacggaatactttgttttaaaggaaaagataataagtttagttatatctttttgttaatattcaaatgaacttgtttaagtatctatgtacagtaatgcctcattcatctagaggtaatctggcagtcttgtgaaaaccgaacacaactcagaaacttggaatcgttttttttaaaaatgcctctgagcaacccatataagtcacaaagtctgtgtgttagagcttatgcatttgtttttatgagagattttaataaatttaattatttgcttgtccagactatagcatattagctgtttagaagggatggcttgaaaggaaggagactgaaaaacactctgagagcatacactgtccaaggccattagtgtaaggaccgctacccagcctagaggacatcactatactacatcatctgatgattattctttattatgcctctaggtaattaagtaaaggtgaaattgcatacacagatatgtagtacatattttaaaagttttatcttaaattgattaaaactttttaaaaagctttggtattaaaagaggtaaacatcagtttcctcaaacattttattcatgttgaatgcctttttgcaatgatgactgagttgttatcatagtattttaaaacctgtatagtgttttagacttgttaaaacattgctgtctagtgtacatctagctaaaagtgtggtttatctaaaccgttttaataagcaagatgactgggaaatctctgccccttttctgagcagtatgcctcttcttttagaattaaatgaatgctgcacaggtccagatgtgtgttgatgtagacttgaaatgtctccacattttggaggacttcctcagcccttttcattgagggaaaatatatttgaatttctgttttagattgtatcgggtcccagttgattcatgtgtacaaagttatgctacctaattacagaccattacccaaatatcctaccaggctttccatctgaatagtaaattaaacagttgttatcaaaatgattttaaagactatttctttttctgggtaactattgaagtttgtaattaaatgggggctcttactgactttaaattagcgcttataaaataaaaatgtttagttcaagaagagacccaagctgggtatggtggtgtgagagcctgtgagtcctagctacctggaggtgaggtgggaacatcacttgagcccaggagttggaggctgcagtgcgctacgatcacaccactgcacaccagcctggggatagagtgagatcccatctctaaaaaatgaaaaaaagaagagaggtagctttaaagtggtttttctcatgatattcactgtttattattaaagaaaatcagctttcgttagacttttacatttagatttattcttagttttatatagaccatcaaaattatgttgagtactaaaaaggagaaaaaatcctggaaggtaacaaggctgaagaccttcaaatttcctggcttactggtttagtcacatcatttttcctgttcaggtatctgcagatatccctgttcaggaaagatcttttttcaggatggcaaacttttgacatagtttaaagacattttttccccattttttgaaatagagaatattttattatttttgtgaaaatagagttttggtaatcactttcttcctcaaaataagtccttctgttaatttgtaaaagcacattagtgctttacctgtgaaattccccgcccccctgcacacacacccactttagtacagttcctgtcaattggcaacatggagagggtgacctggctgctggtttaccactgtaccaacatctctggagcattttagtttcagaaccttaacactccccaacagctttgttgatgtagcttgtatctctgagaatttattgtattaaaattaatactgagatatttttaaaa

SEQ ID NO: 619153 - DNA, 117 bp, Homo sapiens
tacccctgtaatttaatgccaggctgaaatgtactccggagagaagcaaacgttcatcaacagtcatcataatgcgaggtacagtccctttacctacagcgctctagtgacttgtgg

SEQ ID NO: 619154 - DNA, 4910 bp, Homo sapiens
tggcggcggcggcggcggttgtcccggctgtgccggttggtgtggcccgtcagcccgcgtaccacagcgcccgggccgcgtcgagcccagtacagccaagccgctgcggccgggtccggcgcgggcggcgcgcgcagacggagggcggcggccgcggccagggcggcccgtgggaccgcgggcccccggcgcagcgctgcccggctcccggccctgccggcctcctcccttggcgccgcggccatggcggccagcgcgaagcggaagcaggaggagaagcacctgaagatgctgcgggacatgaccggcctcccgcacaaccgaaagtgcttcgactgcgaccagcgcggccccacctacgttaacatgacggtcggctccttcgtgtgtacctcctgctccggcagcctgcgaggattaaatccaccacacagggtgaaatctatctccatgacaacattcacacaacaggaaattgaattcttacaaaaacatggaaatgaagtatgtcccgccagaacaagccaaagtcgtggcatcagttcatgcatctatttcagggtcctctgccagtagcacaagcagcacacctgaggtcaaaccactgaaatctcttttaggggattctgcaccaacactgcacttaaataagggcacacctagtcagtccccagttgtaggtcgttctcaagggcagcagcaggagaagaagcaatttgaccttttaagtgatctcggctcagacatctttgctgctccagctcctcagtcaacagctacagccaattttgctaactttgcacatttcaacagtcatgcagctcagaattctgcaaatgcagattttgcaaactttgatgcatttggacagtctagtggttcgagtaattttggaggtttccccacagcaagtcactctccttttcagccccaaactacaggtggaagtgctgcatcagtaaatgctaattttgctcattttgataacttccccaaatcctccagtgctgattttggaaccttcaatacttcccagagtcatcaaacagcatcagctgttagtaaagtttcaacgaacaaagctggtttacagactgcagacaaatatgcagcacttgctaatttagacaatatcttcagtgccgggcaaggtggtgatcagggaagtggctttgggaccacaggtaaagctcctgttggttctgtggtttcagttcccagtcagtcaagtgcatcttcagacaagtatgcagctctggcagaactagacagcgttttcagttctgcagccacctccagtaatgcgtatacttccacaagtaatgctagcagcaatgtttttggaacagtgccagtggttgcttctgcacagacacagcctgcttcatcaagtgtgcctgctccatttggagctacgccttccacaaatccatttgttgctgctgctggtccttctgtggcatcttctacaaacccatttcagaccaatgccagaggagcaacagcggcaacctttggcactgcatccatgagcatgcccacgggattcggcactcctgctccctacagtcttcccaccagctttagtggcagctttcagcagcctgcctttccagcccaagcagctttccctcaacagacagctttttctcaacagcccaatggtgcaggttttgcagcatttggacaaacaaagccagtagtaaccccttttggtcaagttgcagctgctggagtatctagtaatccttttatgactggtgcaccaacaggacaatttccaacaggaagctcatcaaccaatcctttcttatagccttatatagacaatttactggaacgaacttttatgtggtcacattacatctctccacctcttgcactgttgtcttgtttcactgatcttagctttaaacacaagagaagtctttaaaaagcctgcattgtgtattaaacaccaggtaatatgtgcaaaaccgagggctccagtaacaccttctaacctgtgaattggcagaaaagggtagcggtatcatgtatattaaaattggctaatattaagttattgcagataccacattcattatgctgcagtactgtacatatttttcttagaaattagctatttgtgcatatcagtatttgtaactttaacacattgttatgtgagaaatgttactggggaaatagatcagccacttttaaggtgctgtcatatatcttggaatgaatgacctaaaatcattttaaccattgctactggaaagtaacagagtcaaaattggaaggttttattcattcttgaatttttcctttctaaagagctcttctatttatacatgcctaaattcttttaaaatgtagagggatacctgtctgcataataaagctgatcatgttttgctacagtttgcaggtgaaaaaaaataaatattataaaatatgctattgtttttgtgttcttgctgcaatgcctttaccaaagtggccttaaatatgagtagtgaattgagaacatcttgaattcttaaaagacttcttagtgactttttataaaaaggccatgtagaaaatttattaaaactactatgactgctacattcaggaatatgccagtggtaaagcatttaaatgtagcttgtcagatttaccataatcctactaatttctttgcagcttattaattttgtgaaatttgtatatatgaagaatttgcatgtatgtgtatttacaaatttttctaagtatcttgaattctcagactgcaaaaggcctattttaactattgattttttttaaaaaaaattgtctttgaatgtattggaagtagacatgcattaactgtgacattattgcacctcagtttttttctttctttttttgggcaaactgatattatctataggatatttgtttatgtttgttttttgggggaaagaaactggaactcagtgttaccttaaagttacggaatactttgttttaaaggaaaagataataagtttagttatatctttttgttaatattcaaatgaacttgtttaagtatctatgtacagtaatgcctcattcatctagaggtaatctggcagtcttgtgaaaaccgaacacaactcagaaacttggaatcgttttttttaaaaatgcctctgagcaacccatataagtcacaaagtctgtgtgttagagcttatgcatttgtttttatgagagattttaataaatttaattatttgcttgtccagactatagcatattagctgtttagaagggatggcttgaaaggaaggagactgaaaaacactctgagagcatacactgtccaaggccattagtgtaaggaccgctacccagcctagaggacatcactatactacatcatctgatgattattctttattatgcctctaggtaattaagtaaaggtgaaattgcatacacagatatgtagtacatattttaaaagttttatcttaaattgattaaaactttttaaaaagctttggtattaaaagaggtaaacatcagtttcctcaaacattttattcatgttgaatgcctttttgcaatgatgactgagttgttatcatagtattttaaaacctgtatagtgttttagacttgttaaaacattgctgtctagtgtacatctagctaaaagtgtggtttatctaaaccgttttaataagcaagatgactgggaaatctctgccccttttctgagcagtatgcctcttcttttagaattaaatgaatgctgcacaggtccagatgtgtgttgatgtagacttgaaatgtctccacattttggaggacttcctcagcccttttcattgagggaaaatatatttgaatttctgttttagattgtatcgggtcccagttgattcatgtgtacaaagttatgctacctaattacagaccattacccaaatatcctaccaggctttccatctgaatagtaaattaaacagttgttatcaaaatgattttaaagactatttctttttctgggtaactattgaagtttgtaattaaatgggggctcttactgactttaaattagcgcttataaaataaaaatgtttagttcaagaagagacccaagctgggtatggtggtgtgagagcctgtgagtcctagctacctggaggtgaggtgggaacatcacttgagcccaggagttggaggctgcagtgcgctacgatcacaccactgcacaccagcctggggatagagtgagatcccatctctaaaaaatgaaaaaaagaagagaggtagctttaaagtggtttttctcatgatattcactgtttattattaaagaaaatcagctttcgttagacttttacatttagatttattcttagttttatatagaccatcaaaattatgttgagtactaaaaaggagaaaaaatcctggaaggtaacaaggctgaagaccttcaaatttcctggcttactggtttagtcacatcatttttcctgttcaggtatctgcagatatccctgttcaggaaagatcttttttcaggatggcaaacttttgacatagtttaaagacattttttccccattttttgaaatagagaatattttattatttttgtgaaaatagagttttggtaatcactttcttcctcaaaataagtccttctgttaatttgtaaaagcacattagtgctttacctgtgaaattccccgcccccctgcacacacacccactttagtacagttcctgtcaattggcaacatggagagggtgacctggctgctggtttaccactgtaccaacatctctggagcattttagtttcagaaccttaacactccccaacagctttgttgatgtagcttgtatctctgagaatttattgtattaaaattaatactgagatatttttaaaa

SEQ ID NO: 619155 - DNA, 337 bp, Homo sapiens
atgtattatcacgaattgagcggaaggcctgtggaatgtatcatataggaattgagtggacaggcctgtggaatgtgagaggacctcgacacctggccgcgcgatcatcggaacctgactcttgcactggctgcatgtggcttcccggtatttacacgccttctccacgtggtctcgcaggtctttcctcaagaccttttcttagcagaccggacgcacacatggaagttcttcaaaatggcaatcatttattaaatgcaccagcatctgtcccagcgttaactgctctgcccaacctctgctttcattccgacactagatcttaagagccagaatt

SEQ ID NO: 619156 - DNA, 996 bp, Homo sapiens
  misc_feature (728)..(728): n is a, c, g, or t
cctgttgactcacgcctgtgtcttacgataatgcggaggtcaagttgggtgaatagatacaggagtctgagagcttgactggagacgctgtgagacgccgtgtggtagctaattatacaaaaaatatgatacggctgtgacgcaggtgcctggtgctatgtcgcgcaggctagctctggaggagggccttcaagcgccaagggaaaatatcggactcggatttgcatgggaagagacgcgaacgacctgcgggttgagcgcggaccattgccacttcattcgccaatttccacgcctaggggtgaaaagtagggggcaattctgttcctcacacctgactgcgattggatatcccaacactgtgaatggatggccatggggggtttccatgaatatagctaagtccctacgcaccttcgagtagctccggatgcaggggtcggcttccttgttgacccgtcccaagttgtacgtctttgacaacacgacgtccattaggcctacagcatgtgtaagagaccccttggttctcaaaatttactaattaaggaaacaattaaggggcggaccctggtttgtgctgagagggtaagataaatcgcaggtgtagctgagagagccctggcatgggggcacgtggaccttgggccttgagacatcaaggcaatgtgcgttggctagggccgttgagcgtgagatcagcacccattgaagtttcgtaagtactnggctgagccaggaggtggaatagtactctgcttctagatatgagcccctttttgttgtttttgccctcttgtgtgtgtcgcccttgtggccccggagaaagcgttgggtcagcacccggttggcgtgggcaggttcctcttggcgggggcagacaacatgttcgtcatggtggttggccaaaagaaacaccggggcatacaaaagggatgtttgtcgcacataagagaccgcggagggatcaagcactttgaagaggccgggccttga

SEQ ID NO: 619157 - DNA, 4459 bp, Homo sapiens
ctgtggattaaatcctgccctttttgatgacacatactaagaaatttagataaatttctctgttttcacaaaagatcgagtgaaaaatgagaaaggttaactccgcataatgtaactcttcgtatgtataagtgtgttttaagtttgcagatagttttgtataaagattttgcagatccgactggaatatctttatacttaatatgtggtttgtagtccccagttgtaggtcgttctcaagggcagcagcaggagaagaagcaatttgaccttttaagtgatctcggctcagacatctttgctgctccagctcctcagtcaacagctacagccaattttgctaactttgcacatttcaacagtcatgcagctcagaattctgcaaatgcagattttgcaaactttgatgcatttggacagtctagtggttcgagtaattttggaggtttccccacagcaagtcactctccttttcagccccaaactacaggtggaagtgctgcatcagtaaatgctaattttgctcattttgataacttccccaaatcctccagtgctgattttggaaccttcaatacttcccagagtcatcaaacagcatcagctgttagtaaagtttcaacgaacaaagctggtttacagactgcagacaaatatgcagcacttgctaatttagacaatatcttcagtgccgggcaaggtggtgatcagggaagtggctttgggaccacaggtaaagctcctgttggttctgtggtttcagttcccagtcagtcaagtgcatcttcagacaagtatgcagctctggcagaactagacagcgttttcagttctgcagccacctccagtaatgcgtatacttccacaagtaatgctagcagcaatgtttttggaacagtgccagtggttgcttctgcacagacacagcctgcttcatcaagtgtgcctgctccatttggagctacgccttccacaaatccatttgttgctgctgctggtccttctgtggcatcttctacaaacccatttcagaccaatgccagaggagcaacagcggcaacctttggcactgcatccatgagcatgcccacgggattcggcactcctgctccctacagtcttcccaccagctttagtggcagctttcagcagcctgcctttccagcccaagcagctttccctcaacagacagctttttctcaacagcccaatggtgcaggttttgcagcatttggacaaacaaagccagtagtaaccccttttggtcaagttgcagctgctggagtatctagtaatccttttatgactggtgcaccaacaggacaatttccaacaggaagctcatcaaccaatcctttcttatagccttatatagacaatttactggaacgaacttttatgtggtcacattacatctctccacctcttgcactgttgtcttgtttcactgatcttagctttaaacacaagagaagtctttaaaaagcctgcattgtgtattaaacaccaggtaatatgtgcaaaaccgagggctccagtaacaccttctaacctgtgaattggcagaaaagggtagcggtatcatgtatattaaaattggctaatattaagttattgcagataccacattcattatgctgcagtactgtacatatttttcttagaaattagctatttgtgcatatcagtatttgtaactttaacacattgttatgtgagaaatgttactggggaaatagatcagccacttttaaggtgctgtcatatatcttggaatgaatgacctaaaatcattttaaccattgctactggaaagtaacagagtcaaaattggaaggttttattcattcttgaatttttcctttctaaagagctcttctatttatacatgcctaaattcttttaaaatgtagagggatacctgtctgcataataaagctgatcatgttttgctacagtttgcaggtgaaaaaaaataaatattataaaatatgctattgtttttgtgttcttgctgcaatgcctttaccaaagtggccttaaatatgagtagtgaattgagaacatcttgaattcttaaaagacttcttagtgactttttataaaaaggccatgtagaaaatttattaaaactactatgactgctacattcaggaatatgccagtggtaaagcatttaaatgtagcttgtcagatttaccataatcctactaatttctttgcagcttattaattttgtgaaatttgtatatatgaagaatttgcatgtatgtgtatttacaaatttttctaagtatcttgaattctcagactgcaaaaggcctattttaactattgattttttttaaaaaaaattgtctttgaatgtattggaagtagacatgcattaactgtgacattattgcacctcagtttttttctttctttttttgggcaaactgatattatctataggatatttgtttatgtttgttttttgggggaaagaaactggaactcagtgttaccttaaagttacggaatactttgttttaaaggaaaagataataagtttagttatatctttttgttaatattcaaatgaacttgtttaagtatctatgtacagtaatgcctcattcatctagaggtaatctggcagtcttgtgaaaaccgaacacaactcagaaacttggaatcgttttttttaaaaatgcctctgagcaacccatataagtcacaaagtctgtgtgttagagcttatgcatttgtttttatgagagattttaataaatttaattatttgcttgtccagactatagcatattagctgtttagaagggatggcttgaaaggaaggagactgaaaaacactctgagagcatacactgtccaaggccattagtgtaaggaccgctacccagcctagaggacatcactatactacatcatctgatgattattctttattatgcctctaggtaattaagtaaaggtgaaattgcatacacagatatgtagtacatattttaaaagttttatcttaaattgattaaaactttttaaaaagctttggtattaaaagaggtaaacatcagtttcctcaaacattttattcatgttgaatgcctttttgcaatgatgactgagttgttatcatagtattttaaaacctgtatagtgttttagacttgttaaaacattgctgtctagtgtacatctagctaaaagtgtggtttatctaaaccgttttaataagcaagatgactgggaaatctctgccccttttctgagcagtatgcctcttcttttagaattaaatgaatgctgcacaggtccagatgtgtgttgatgtagacttgaaatgtctccacattttggaggacttcctcagcccttttcattgagggaaaatatatttgaatttctgttttagattgtatcgggtcccagttgattcatgtgtacaaagttatgctacctaattacagaccattacccaaatatcctaccaggctttccatctgaatagtaaattaaacagttgttatcaaaatgattttaaagactatttctttttctgggtaactattgaagtttgtaattaaatgggggctcttactgactttaaattagcgcttataaaataaaaatgtttagttcaagaagagacccaagctgggtatggtggtgtgagagcctgtgagtcctagctacctggaggtgaggtgggaacatcacttgagcccaggagttggaggctgcagtgcgctacgatcacaccactgcacaccagcctggggatagagtgagatcccatctctaaaaaatgaaaaaaagaagagaggtagctttaaagtggtttttctcatgatattcactgtttattattaaagaaaatcagctttcgttagacttttacatttagatttattcttagttttatatagaccatcaaaattatgttgagtactaaaaaggagaaaaaatcctggaaggtaacaaggctgaagaccttcaaatttcctggcttactggtttagtcacatcatttttcctgttcaggtatctgcagatatccctgttcaggaaagatcttttttcaggatggcaaacttttgacatagtttaaagacattttttccccattttttgaaatagagaatattttattatttttgtgaaaatagagttttggtaatcactttcttcctcaaaataagtccttctgttaatttgtaaaagcacattagtgctttacctgtgaaattccccgcccccctgcacacacacccactttagtacagttcctgtcaattggcaacatggagagggtgacctggctgctggtttaccactgtaccaacatctctggagcattttagtttcagaaccttaacactccccaacagctttgttgatgtagcttgtatctctgagaatttattgtattaaaattaatactgagatatttttaaaa

SEQ ID NO: 619158 - DNA, 1413 bp, Homo sapiens
  misc_feature (531)..(531): n is a, c, g, or t
  misc_feature (588)..(588): n is a, c, g, or t
cgggcgatgatcgaacagcgcctgggaacagcgctccccgtaactatggtcccgagcccgaggatcctccatcgagttagatgtctgcgtcgagagggtccgaggtagcgagaagcttatctgagagcagcgtacgtgccgcacgtccagtcctctccgagcgaggcacttgcgcattccacggcgacctccctaggctggcaaccaccgtgagcaagggacgcttcggcctctcctagcacacgctaaaacacatatcgattcggtctcgtcttgtgagactaacgaggaatctgtacctcgataatgatacttctgcttggttcgcatataaggctaactcagtgtctttactgcttggactctggaccatgggcaacactcatgacgcatcggacctgcaagtaagttagagatggaccggtcatcatggcagacatccagtagcagagaagagactaccgaagtgccactgactgagaagactatggtccgcgttcttgaatacccgaatctagggatgccgatacnttgcgagtcaatgcgagtgcatttgccacgagttagtcacgtggggagcgccacctngggcccgtacccgcgcgcaggcgctcgcggttcgacccttacttgacctagttattagtcgtaccctgctaggctattaacaagcacctttaaaaggaaggtcttcccttgccctcataatccaagagaaaggtgaccttccccgcgattgtcctgaggcacacgtacgcacaaggcctaggtttcatgggcaaaaagatatctcctcccacaaattttctgtcaccattggccgtatgcagtgatgtgacatgtggaacgcgccagctatgtgcatgttgacaacatggcccaggccacacaggtaacgtattgccatccgtgtcgccacatgttacatcctataaaagtatagttccccgggcggaacattagaaagaagcattatacccccccttgtagcgttgtatgggatgcgctcacacccaagtaactaacttgctaacggaagaaggaaaatccagcgatttggcaagtcgttcaattcgttagaaacaattacacattggaacggtttctaaaaaaggccatgggcacgcgggtccagccttattcgaactagggaagacaaaaacgggcccttaccttttgtgggggcaaaggtaaccgaaaaggtggtagcattgatcacgtctagattggttgcatgagacccccttgaatcttttacccggcttatggctcttttggatcaattcaatttcggatacaacgagaaccaattttgcagccatgaaacagggtctcatgggacacagtatgggtccgggaaagcctaaaaacgggacggttccccaccttagggcaaacgcattcccagcgcct

SEQ ID NO: 619159 - DNA, 4394 bp, Homo sapiens
tgcctgtagtttcctttgttaatagagtcacttttatagtactgtgcttgaggtcatatacagagtattgtatccaaatttatcattgcacaaagtgttttggaaattcttggttactccttagtaaattacctgtaattgggttaaatgctggtagggtttaaaatctgattgctaagtgaattctctataaagtgagttttgatacatagaaacttttcatataattcttaaactcatgtgtcatgtattttcatttatagttttcatattcattaacatatgtggttccttaccatttacagctcagaattctgcaaatgcagattttgcaaactttgatgcatttggacagtctagtggttcgagtaattttggaggtttccccacagcaagtcactctccttttcagccccaaactacaggtggaagtgctgcatcagtaaatgctaattttgctcattttgataacttccccaaatcctccagtgctgattttggaaccttcaatacttcccagagtcatcaaacagcatcagctgttagtaaagtttcaacgaacaaagctggtttacagactgcagacaaatatgcagcacttgctaatttagacaatatcttcagtgccgggcaaggtggtgatcagggaagtggctttgggaccacaggtaaagctcctgttggttctgtggtttcagttcccagtcagtcaagtgcatcttcagacaagtatgcagctctggcagaactagacagcgttttcagttctgcagccacctccagtaatgcgtatacttccacaagtaatgctagcagcaatgtttttggaacagtgccagtggttgcttctgcacagacacagcctgcttcatcaagtgtgcctgctccatttggagctacgccttccacaaatccatttgttgctgctgctggtccttctgtggcatcttctacaaacccatttcagaccaatgccagaggagcaacagcggcaacctttggcactgcatccatgagcatgcccacgggattcggcactcctgctccctacagtcttcccaccagctttagtggcagctttcagcagcctgcctttccagcccaagcagctttccctcaacagacagctttttctcaacagcccaatggtgcaggttttgcagcatttggacaaacaaagccagtagtaaccccttttggtcaagttgcagctgctggagtatctagtaatccttttatgactggtgcaccaacaggacaatttccaacaggaagctcatcaaccaatcctttcttatagccttatatagacaatttactggaacgaacttttatgtggtcacattacatctctccacctcttgcactgttgtcttgtttcactgatcttagctttaaacacaagagaagtctttaaaaagcctgcattgtgtattaaacaccaggtaatatgtgcaaaaccgagggctccagtaacaccttctaacctgtgaattggcagaaaagggtagcggtatcatgtatattaaaattggctaatattaagttattgcagataccacattcattatgctgcagtactgtacatatttttcttagaaattagctatttgtgcatatcagtatttgtaactttaacacattgttatgtgagaaatgttactggggaaatagatcagccacttttaaggtgctgtcatatatcttggaatgaatgacctaaaatcattttaaccattgctactggaaagtaacagagtcaaaattggaaggttttattcattcttgaatttttcctttctaaagagctcttctatttatacatgcctaaattcttttaaaatgtagagggatacctgtctgcataataaagctgatcatgttttgctacagtttgcaggtgaaaaaaaataaatattataaaatatgctattgtttttgtgttcttgctgcaatgcctttaccaaagtggccttaaatatgagtagtgaattgagaacatcttgaattcttaaaagacttcttagtgactttttataaaaaggccatgtagaaaatttattaaaactactatgactgctacattcaggaatatgccagtggtaaagcatttaaatgtagcttgtcagatttaccataatcctactaatttctttgcagcttattaattttgtgaaatttgtatatatgaagaatttgcatgtatgtgtatttacaaatttttctaagtatcttgaattctcagactgcaaaaggcctattttaactattgattttttttaaaaaaaattgtctttgaatgtattggaagtagacatgcattaactgtgacattattgcacctcagtttttttctttctttttttgggcaaactgatattatctataggatatttgtttatgtttgttttttgggggaaagaaactggaactcagtgttaccttaaagttacggaatactttgttttaaaggaaaagataataagtttagttatatctttttgttaatattcaaatgaacttgtttaagtatctatgtacagtaatgcctcattcatctagaggtaatctggcagtcttgtgaaaaccgaacacaactcagaaacttggaatcgttttttttaaaaatgcctctgagcaacccatataagtcacaaagtctgtgtgttagagcttatgcatttgtttttatgagagattttaataaatttaattatttgcttgtccagactatagcatattagctgtttagaagggatggcttgaaaggaaggagactgaaaaacactctgagagcatacactgtccaaggccattagtgtaaggaccgctacccagcctagaggacatcactatactacatcatctgatgattattctttattatgcctctaggtaattaagtaaaggtgaaattgcatacacagatatgtagtacatattttaaaagttttatcttaaattgattaaaactttttaaaaagctttggtattaaaagaggtaaacatcagtttcctcaaacattttattcatgttgaatgcctttttgcaatgatgactgagttgttatcatagtattttaaaacctgtatagtgttttagacttgttaaaacattgctgtctagtgtacatctagctaaaagtgtggtttatctaaaccgttttaataagcaagatgactgggaaatctctgccccttttctgagcagtatgcctcttcttttagaattaaatgaatgctgcacaggtccagatgtgtgttgatgtagacttgaaatgtctccacattttggaggacttcctcagcccttttcattgagggaaaatatatttgaatttctgttttagattgtatcgggtcccagttgattcatgtgtacaaagttatgctacctaattacagaccattacccaaatatcctaccaggctttccatctgaatagtaaattaaacagttgttatcaaaatgattttaaagactatttctttttctgggtaactattgaagtttgtaattaaatgggggctcttactgactttaaattagcgcttataaaataaaaatgtttagttcaagaagagacccaagctgggtatggtggtgtgagagcctgtgagtcctagctacctggaggtgaggtgggaacatcacttgagcccaggagttggaggctgcagtgcgctacgatcacaccactgcacaccagcctggggatagagtgagatcccatctctaaaaaatgaaaaaaagaagagaggtagctttaaagtggtttttctcatgatattcactgtttattattaaagaaaatcagctttcgttagacttttacatttagatttattcttagttttatatagaccatcaaaattatgttgagtactaaaaaggagaaaaaatcctggaaggtaacaaggctgaagaccttcaaatttcctggcttactggtttagtcacatcatttttcctgttcaggtatctgcagatatccctgttcaggaaagatcttttttcaggatggcaaacttttgacatagtttaaagacattttttccccattttttgaaatagagaatattttattatttttgtgaaaatagagttttggtaatcactttcttcctcaaaataagtccttctgttaatttgtaaaagcacattagtgctttacctgtgaaattccccgcccccctgcacacacacccactttagtacagttcctgtcaattggcaacatggagagggtgacctggctgctggtttaccactgtaccaacatctctggagcattttagtttcagaaccttaacactccccaacagctttgttgatgtagcttgtatctctgagaatttattgtattaaaattaatactgagatatttttaaaa

SEQ ID NO: 619160 - DNA, 297 bp, Homo sapiens
ggtcgatctctagcaggatcccccgtttatgcaccgggttagggtgaagatgtttactgccctagggtcaaccctagttgaataagcaaaacagttatagcttataagtcaacaagaggagataagatagaatcacaaaacatactctaccctaaagaaggtggaaaaaggaacaagataagtagtgaaactaatagaacaatggcaaggccatatactgtaatcatatcagcaatcacattagatgcatatcatctaaatctcccacttaaaaggctaagattgtcagactaaaag

SEQ ID NO: 619161 - DNA, 1027 bp, Homo sapiens
gtcatgtgattgaatgcctagtcaggatctgacatatagctccactatcaatagtgtagtatttatttcagatcccttatcaggggtgagtcatgtgatgaatgggctaatcagaaaagtgaaggagcgaagaatgcataagcttgcgcaacatgatgacatatagaacaagatcgtgtatctattttttatcaggtgttgtaatattcgtgcatggtcgttatgtgttgttgtagcttattaactggtagaggatagaagatgaggaaagaatactcagtctttcctcgagcagtcgtattacagaggtgacacagttgcggagtaataatctgactggcctagtcgatggaaaagacaacctgtttcttatcagccccatcctgctaatcctccgctgcaaacgtgaactacactgttgtattctagtaattcactgtgaatctgataaccaacagcgcggtcgagtgtctagtatctactaggtcgcaggtgttctgtcatgagccattatatgtagacatttaaataaatcatacggtaatacttgtctgactgtgaccatgaggctccataagcgatacatatatttgggatgacatttgctatactgacgttgtgacagtggtctgagtcatctctaagtcttccgtgggcatggacagtcgtaaataatatcagtgatttggaacaacttacaattcttgccgtgtcacagtgaacacctgggtggttggtgttccgttaaattgtgtgagaaaatgtgcattaggggaggtccagattttaagggagtagctgcgatgtcccaggtggataaggcttctttgtggagaagaagaaaaagaagacaaacacaaaagggggggtagagatatcgggggcaatatcaggcacacacttgagaaaggggccaaagggggtatataggaagaggagggagaaagtgagagaagacgagtttgggaccactgtgttgttgtgacagccaggaggggaaaaatggtaaggggggcggtatacacgt

SEQ ID NO: 619162 - DNA, 696 bp, Homo sapiens
atgttcattgtggaatacaccccgaaaagcgatttcaatagcgagggtggtctccagatctccaagcaaacaggccccagttggttgttaaaacttgatagactcagaatactttggaagaagaaaaccaaaagcggctcttactcaccggtaattttccatccaaaagtgccagtagttaccacaattgccaataaataggcaaaacactagttaatagggcgtgcctcatgttttgcatcggttagtagattttccaccaggcgcagtgcttgatcaaaagtcaagctgtccttccacacaaactttgtgaccaccatctgtaggcgaaggtggctttcttaacttcaggcacaccaatctcttcgggctctggactggcagccttcaagggccctatagacctcagctaagatgcgttaaagggaaacagagaaacagatgtacagagccgaagccaagtctacgcaatcccttgaggaagtaatattaagttagctggagcaattcacatgcaagagataactctgacaatgcccagaatttcctagctggtcctcattagtgaacaaaagccatttgaatataaacatccggccacgtgtggtggctcacgcctggaataccagccatctgggacgccaagacgggtggatctcattaggccaggagttcgagtccagcctgcccaacgtg

SEQ ID NO: 619163 - DNA, 360 bp, Homo sapiens
gggcccccccctttttttttaaccccttgggcccttttttttaaaggggaggggttttgggcaaccggtttttccccccccctggggggggttttaaaaagccccctttcccctcccccgggggttttttgggaccccccctttcccccccggggggttgggggtttccattttttaaaggtttggggggccccccaaaaaagggaaaagggcccccaagttctcctttccctttttggttaaaattttttaacccccccccccccccccatttatttttttttaagaaccccaatgaattaatttttttttggggggccttttaaaaaattcaaattaaattttttttggggcgcagga

SEQ ID NO: 619164 - DNA, 170 bp, Homo sapiens
ttttgggggggggggggggggggcccttaacccccccccttttgggaaaatcccccggggggggtttttttggccccttttttttttttaaaaaagggccccccgggaggcttgaaaaaaccccttttttttttggttttttcccaaaaaaggggggttttttttgggga

SEQ ID NO: 619165 - DNA, 193 bp, Homo sapiens
  misc_feature (160)..(160): n is a, c, g, or t
tctgacactctgttgtataacctcagaaagctactagatgtgaagtactaatgactagcatgatcctgccaagtgaaagaggcaggcatgagcaatggacagttaacgaggggtgggagccttgatcatcgatgagggagtcttgtactagacatctatnggaaaagactgtccacagctgtgaatgtcatca

SEQ ID NO: 619166 - DNA, 914 bp, Homo sapiens
  misc_feature (34)..(34): n is a, c, g, or t
  misc_feature (74)..(74): n is a, c, g, or t
  misc_feature (82)..(82): n is a, c, g, or t
  misc_feature (86)..(86): n is a, c, g, or t
  misc_feature (92)..(94): n is a, c, g, or t
  misc_feature (103)..(103): n is a, c, g, or t
  misc_feature (126)..(126): n is a, c, g, or t
  misc_feature (151)..(151): n is a, c, g, or t
  misc_feature (153)..(153): n is a, c, g, or t
  misc_feature (171)..(171): n is a, c, g, or t
  misc_feature (254)..(254): n is a, c, g, or t
  misc_feature (262)..(262): n is a, c, g, or t
  misc_feature (299)..(299): n is a, c, g, or t
  misc_feature (359)..(359): n is a, c, g, or t
  misc_feature (489)..(489): n is a, c, g, or t
  misc_feature (504)..(504): n is a, c, g, or t
  misc_feature (547)..(547): n is a, c, g, or t
  misc_feature (553)..(553): n is a, c, g, or t
  misc_feature (603)..(603): n is a, c, g, or t
  misc_feature (622)..(622): n is a, c, g, or t
  misc_feature (641)..(641): n is a, c, g, or t
  misc_feature (645)..(645): n is a, c, g, or t
  misc_feature (666)..(666): n is a, c, g, or t
  misc_feature (682)..(682): n is a, c, g, or t
  misc_feature (705)..(705): n is a, c, g, or t
  misc_feature (708)..(708): n is a, c, g, or t
  misc_feature (749)..(749): n is a, c, g, or t
  misc_feature (754)..(754): n is a, c, g, or t
  misc_feature (778)..(778): n is a, c, g, or t
  misc_feature (841)..(841): n is a, c, g, or t
  misc_feature (908)..(908): n is a, c, g, or t
aacaagcttggatgagcagggggaactaggggtnggcagaaaggattatgggtggaaaacattggctcttcctnggggggtnatgngggggnnngggaagagngtggctcagcctgcgggtaaatnggctagaaaagccaaggccaaaggntngtggggagaggacaagtnagcatgtccagcctggggtctgggtgtggggttatcccttctccctgtccctccccatctcgtccataagcctaggtcttggngccttgtntggggggctgcggtaatgtgaggaacggggatctgtntagcttttggccactccctgggacctcacgcccctttggacagagggagattgggcagcngggccttgctgctttgtaatctgctgtcccgacttggtttgtcttgtccaagggtgacgaaagagccagggaccagggtctcatgggatgaggtacagggtgggagaggggggaggggctgggggctgangggagccagaaagcngtggctgtttggggctggcaggatgtggaagaccgcctctccngccctnacatggggactgggcccagaccctgcttggtcacacccagcccagaagangggtcctccagttccagtnactttttcggtggagcgtnagtngggcttttgctccaaggagtnccttcccatttcaaanaggagcaaatggtgcatccagcnctnaaagaccttccagtttatggtctccatggtgttcttaaggngtttnaggttctccgggaagctccccttnagtggcgggtacaccttcagggggtcagcattttggagcaggtgcataaaatggtcctctgtnatgttgccatatttggtggcattttgcatgggcccctggggcagggctcccatgggcagcccttgcntcacca

SEQ ID NO: 619167 - DNA, 171 bp, Homo sapiens
gtcgccctgctaggagaggcgctttcacaggctgggaggttgggttacattttgcaggtgtaccaaagggttcaagcttttccacccacttctctatccactgagacttcacctaactaatactggtaactcacttatttctattcacagccggtacttaactaagtaacc

SEQ ID NO: 619168 - DNA, 492 bp, Homo sapiens
tatacgtatcaagggtataacgagatcgagagcgatcctgtgattcttattaccggctctcatctcacgacgtgaaacacggggtgtgtgaaagtcgacattacatacatgaggctatcagcagtgattgtacaggatgtgtcattttctaggaatacagagaaggggagagctgcaggtgaagcgattctgagggctgaaaatccctttcccagtacgaagacagcatccttcaatcccgccagctcatgtgcatctgagggtggggttctgtcttcatgctagaaaccaaactgctctcacagcttcctgctaaatcaccacggctaacggataagcagagacggactatccagtctgactactgagcactcaagtcgtcagtccagttgctacccgggaacggggggcagacagtgtgcgtgcccttctaccggggctggacagagtgtggtttaccgggggaacttggcaagccggggccgaacgctt

SEQ ID NO: 619169 - DNA, 233 bp, Homo sapiens
catttactcctaagtcttattacaagctaagccagacttaagtgttacatgtggaaagtgagagcacacagaggagcggacatgcagcaaggcgacgcgaggccaatgcagcgaggggtgggtgacccagggagtggctcagttcacgaaaagcgagcgggtgaactccacgtagtcgaacgcggtggggagctcgcggcccttgccgtccaccgtagggcttcatgtgggag

SEQ ID NO: 619170 - DNA, 997 bp, Homo sapiens
gctgaggaatgatgtggaacataatgtcgctcgtatggtcatcggaggcccttataatctggccctgataacgtccgatctcacctcaatgtgccatcgttcccccaaaaggtgccttcttcttcagcggtcctcctgcggggctccctatgcttgggcaactgtgcttaccaccccagatagctggatttactaaatagtgcctgatgtttaccatctcattgagagagtcttaatgtagccggcccaggtccagggttctgtgccccatgttgatgatgctggtatctccattcctgggatattcctatggcatttaccaatgtctactgtcacttcctggtgacttgtccatctttcctaccagacagcttcccaaggcatgtcttactgaccatcggattccccagcatagagcatagttaaatgcctagtaaataatgaatggaaatccaatatgaacagaaatgggatttttcaccatgaaaattgtaaaagattcgtttgggattacacatgccaggtaagtggaaggaaagaaacattgtgaggagtaatctagttttaaaacccagcttaactcagcttggttattagaaatagtgtaagtttgagaacaggagaagggaagggatctatctagctttctgcatatttcttgatagcctcctaacctaacaacaaaatgccaaaaaaaagcaaacctggcagccattgaagagcattcataaaggtttttgttttgtttttaggagacagtctgctctgtcgaccaggctggagtgcagtggcacaaccttggactcactgcggcctcctcctcaccgggtttcaagcagattctcactgcttgcagcctcccgagtagctgggattaacaggtgtgcacactctatgcctggatgatctctagtgtgtctttttttaagtttattaaaaaacccgagcgagggtggcccaacgcaaattgttttcggaacacaagctcctagcttcc

SEQ ID NO: 619171 - DNA, 232 bp, Homo sapiens
tgcagtcggtagccagcgaagaagcacaggatctcccagcccagatgtttcccacttaactagcattgcccttttacatcttttttttattccccaatagtcttcaggacattcagtacactgtgcttttcagagcgttgatgattccacgtccctgctcctgccttcacctcgtctttctttgtcaaattgcctatctttgagccattgtatgtctctgataacatctctg

SEQ ID NO: 619172 - DNA, 217 bp, Homo sapiens
gtgtccatgtcacgctagctgtcaatgtcatctgcgagttggccaggtgcatccgcaagaagtacctttcccttgtccgactcttcttcaagctcatgaactcctccaccaacaagtgggtcctcatcaagattatcagactggcaagtgtcccttccggtctgtgctcttctgtcacctggagaggcacacttggtggcccagcggtcgacggacg

SEQ ID NO: 619173 - DNA, 201 bp, Homo sapiens
caacaatcctgtaagggaggttttacaaactcttctttgtatatatatatatggttttttgagatggagttttgctcttgttgcccaggctggagtacagcggtgagatctcggctaactgcaacctctgcctcccgggaccaagcgattctcctgcttcagcctcccaagtgggggagattctgggtgtgcaccaccaca

SEQ ID NO: 619174 - DNA, 492 bp, Homo sapiens
  misc_feature (41)..(41): n is a, c, g, or t
  misc_feature (63)..(63): n is a, c, g, or t
  misc_feature (154)..(154): n is a, c, g, or t
  misc_feature (186)..(186): n is a, c, g, or t
  misc_feature (316)..(316): n is a, c, g, or t
  misc_feature (355)..(355): n is a, c, g, or t
  misc_feature (357)..(357): n is a, c, g, or t
  misc_feature (407)..(407): n is a, c, g, or t
  misc_feature (413)..(415): n is a, c, g, or t
  misc_feature (417)..(417): n is a, c, g, or t
  misc_feature (432)..(432): n is a, c, g, or t
  misc_feature (466)..(466): n is a, c, g, or t
tctctttctttttccatttcacacataaactgccctccgtnaaattagggatccgtccagctnggacttcatttcatcctcgatttctgggggtggaggcaacattaggcctttctcttccttctcttcctcctcctcctcctcctcatccttnccatcttgttccattggaccagggactactgntgtccagaagacggggtccccatttcccaacacctgatctttcggatcttagaatcccccgtcgccactggctcctcctccttctcctccatggctcttcctcctcctcctcaccctcagcaggatgaangccaaggaccccccagccagaagcagcagcaccagcagngncccccccacggccccccacaccagcgggcccacatctcggggcgaggccngggggnnncncggacaaagaggacnggcgcagcgcggcccaggcccacggcaggggggncggggcagacgaagggggagggaaca

SEQ ID NO: 619175 - DNA, 297 bp, Homo sapiens
tcttgggtggagccagtgcacgtctgtgggagcgtttgggtggtgagtgcacgtgctgtgggggctgtcttgtggtggaggtgactgcacgtgctgtggaggcgtcttgggtggagtcagtgagtgcactgtgctgtgggggcgtcttgggtggagtcggtgattgcacgtgctgtggggggccgtcttgggtggagtcgagtgcacgtgctgtggggggcgtcttgggtggactgtgagtgcacgtgctgtggggggcgtcttgggtggagttgagtgcacgtgctgtgggtctca

SEQ ID NO: 619176 - DNA, 436 bp, Homo sapiens
actctgtgccactgcaatgacagactgagaatactgtggtaggagtctctatagcgcatgatgccacgggcgagcgtgacccagatggagacccgacagctgttgttcatcattctggatattctggagaccgacagaggaagtctagggcctagagcctttgtcaaggtccagtgctggtccaggacaagagcgtcatcctgtagggactcgctgagctggacttgcacaccatacatggtgttctgggccacctggctatcgagacacgcacgctgtatacactgtttggcggcaacgactgcctccgagaagcccttggagagacctagaggcgaacggctggctggtgcgctgaccaagctctccgtactgaacctatgcatgttgcggctgaaccggctcggcctacagatggatacgctgtgtctacccg

SEQ ID NO: 619177 - DNA, 387 bp, Homo sapiens
tacataatctgaccagctcaacaatggttccaggatctcaatgcaatgagtcctcattcgtatctcgcgaacgctcaggtacagtcgcagcaatgtcacgcttcaagatctcgatgatgtctgtcagagcagtcagactacattgatccacaggagtgagagttcgagactcatctttctaacagcgagaacatgtagatgcaacggggttcagatatacatccttatcttcacatcagcgcattactcgagaatggcagttgtcctcaatatagcttgtctgctgtacatagtcagagagtttgctgcccaagcctgggttttccataaacgcagtggaccagccggctcccctggagcgaggtctctggcttagtaacacttctg

SEQ ID NO: 619178 - DNA, 680 bp, Homo sapiens
tgggtcataacgtgtagtgctatgagtacctatgaagagttgttcaacgttggttcccccggagtcatgagagccacgaccttttgtctgcccaattatgagaggaataggggaagctttcacgccctgcaggcttttttagcacggcggaccccaattgtcttgcccagaaacttgtgtttgccgcctttgtgctcgcacgatttcttgttaccccatcccctctttactccttgcccgtgtgaccctgcttttttctctgtagatgttcaccagttaaggcctattttcctcgggccactttccccacccgatcgaggaccacccccatctgtttggggaggttacctggccccacaagtgtatccgatcacgttagccctgtctgtgagaggaagggacacccactattctacactgccctctgacctgccccttgatccccatatctattaccgtgtccattagggataataggtaagggctctgtttctgtcaagcccatgttcaccaaggaccacctgtttaaaaaaaaaaaaagtctggcatcagagggagcatgtggagagcaacttgggaagaacaagttcattttgtattgaatgatttttaatgaatgcaatattaatccttgcagatgagccataatcattaaatcgattaaatgataagacccttta

SEQ ID NO: 619179 - DNA, 557 bp, Homo sapiens
  misc_feature (94)..(94): n is a, c, g, or t
tcccagcagaagcccatgaagagtctgtttggagaggacgagaaagagttggtgaggagactgagatcatccccacgctggagcctttgccacntcacgaggttcctggacatcagtcagtttttatgaatgaaccaagactgtctgacttcaagcaagttcttttgcgggaggggattcaagcggaatttgtagggggcgtacttgtctgcaacaatcaagtagcagttcgcagaacagaaactggacgcatcggattagaaggctgcctttgtcaagacttttataggatacgagaccttttatatgaacagtatgccattgtgtaaaggacatgatgtcaagatgtgtctgcttgacctttctcaggaagaaaggattctcatctgaggctaaacttttgctgtcttgttttgtaacatacaaaaagaatctgccagaaaacgtgagcatgtactagattttgaaaaatatgaatcaagggcctggggtgtagctcagtggtagagctcttgcctagcatgtgcaaggccctaggtttgattctctgtcctgaa

SEQ ID NO: 619180 - DNA, 146 bp, Homo sapiens
gtgtagctattactgcaggccaccgtactcatgcacctaatgggaagcgccaccctagtgcaatatcaaccattaagcttcactctacacttatcatcttcacaattctattactactgactatcattgaaatggtcgccaatccg

SEQ ID NO: 619181 - DNA, 160 bp, Homo sapiens
gatgaaagtcctgcatcccctcaaagattagcttattcgcaggtagaaagggctagagaggctatgtcccaaattcttactcaatgctgaattagactgggctcttgcttgtgcaagtcttgtattgacagagattagtccagttacagaaccaagaggg

SEQ ID NO: 619182 - DNA, 363 bp, Homo sapiens
  misc_feature (356)..(356): n is a, c, g, or t
gtgtcgccaatggttatccagagagccttccgcaggcacctggtgcaacgcttcttgaagcatgcctccttccatcttccgtcagcaggcgggcagcggcctctccgaagaggatgcccctgagcgagagggcctcatcgcctacgtgatgagtgagacctttcttccgaccccttggcccacccctccagctcctccatctcctccacttccttcccaccctcctatgacagtgtcacctttttaatttccagaactgcacaatgaccagcaggaggggagaagagagtaggaaaaaggagggaaggccagacatcaagtgccagatgttgtctgaagagatcgagcccttctcnccgagct

SEQ ID NO: 619183 - DNA, 150 bp, Homo sapiens
cgctgttaggctgggagacgcggacagtgtcgtggatgagggacagaagggcgcgcaaagccattccttgttcgcgttccatcgcccggtcttcaagcgtctcggccaggtagaacatggaacgcctggttcgcggcctcgccaacgtgg

SEQ ID NO: 619184 - DNA, 146 bp, Homo sapiens
gtccaaatgtaaactaatcgtcccagcaattctattactcacaatgacatgacttaccaaaaaacacataatttgaatcaacacaaccacccacagcctaattattagcatcatccctcatactattttataaccaggtgcaacaa

SEQ ID NO: 619185 - DNA, 791 bp, Homo sapiens
cacaggtttatagaaattaccagtcaactttctcttgtaaatcatctacttctatttccttcttccttcaatatagaggtaaaccttgtgaaacttgtttcaaatttaatgaatgactttatatatagttttggttttttaactatatgaatatatcacctataacaaatgcaaatatttgtttcacacatccatcctacccctgaaacctccccccttcacacacacactttatacacttcagtggtttcctttaagacaaagttttatcattaagaggctgcatggttttgctccagttatctttcatgtctcatcttaaatttgctttctccccttccctatgcactagccaagctaacttttcttcagtttctcaatttgctctttttcactacttgttgttttaagaatatgttctcttgcatggattattcttgtatctaacatacactaatccttcagatctgtgctccaatatcccttctacagagaagatgccccaatcaatcaaggctaaatcaagcgtcactgtttactcatatatcttttgtcacaaaacaatttagaactattattttacctatatttgcatacttgttatctgtttaattattttttctactcctgttagtccacatacaccttgatggcaggagtagcgggagaccatgtactccttaacttaagggatgagaaagaagtcaaaaagcacaagagaaggacaatgaattcaaaagagaggaaagaaaatctgcaaaggtgtaaaagaatactatgttattctatgt

SEQ ID NO: 619186 - DNA, 288 bp, Homo sapiens
agccaggcatggatgggctttggtcctcgaggttggacccagcttcttgccaccttccctccgggcagtcagctctccatccatcccctctttaatctatgaatctatagctcggtgtgtgtacaaacacccctatcgttgtctcaaatactcagcattacattggtgaggcaaatcagagcttctcaatcagattacatctcatttcataacgggaacatcccgagcactagtctgtcttgtactgaggtagtctgaccaggtgtacagcgctttactccaccttgg

SEQ ID NO: 619187 - DNA, 207 bp, Homo sapiens
gagtccttgtgcacaaactgtacacctgattctgacaaatgtgtattagtccgttttcatgctgctaataaagacatacctgagactgggtaacttataaagaaaagaggtttaattaattcacagttcagcatggctggggaggcctaaggaatcttagagtcatgatggacttactgttcaccttgtcattaaaacacagaaaga

SEQ ID NO: 619188 - DNA, 791 bp, Homo sapiens
gaaacatggtggtgtcgggtatgaggctgggactaagccaagggatgcaggtgtggtgccggtgggaactgaggaagcgcccaagctttttgttctgaactcccacttgcgttgtggatgtcctgaggatgggatgactgtatctggattacccggagctctggcatataccacgtgctccctaaattatgagcgaatgtggacctaaagtgctacaaggtttcaagatggcagcgatctatgcatggtcagcccagtccgttctctagaagatgcaaaattcagaagaccaagtggtcatgagagaatcatagaagcacaaattttgtgacctatctttagaagacagacaatgcacccgcacaatataactatcagatggcgacattgtggcaaccaagcagctggttctctcgtggaagtattcgtcaaaacttcctgtacagaccgctgcttcaacgggtcaacacatgatgctcttgcacacgaccactagtgacactcaattgtggctaacagctttccacttgttcgtcctaccaggttggttcacgtgacaaaggccttttcttgttgaacttctgagtgctctcgggtattccacgaatgaatataacgcaacggacagaccgtgtggtctctcatgacaggctcaaacctggatgtggcatagcttggtgggagttggcctatccccagttccttcgggcgctcctcactaccaaattgggccgcctgggcacccaaagtatccatccgggtcccactgggcacaaaacggaaggggtaac

SEQ ID NO: 619189 - DNA, 776 bp, Homo sapiens
gcccatctgacggcgttctgtttgcagatacctgtcagcttctagatgctccccaggttcatcctgtgtcgtctcccccacctaccagacatctgcttgtgagccctgggcttaggattcgccatggcaagctgaagagtacatcatccgcatccccccagtaccactatatccatgtgctgggaccagaacagtcaacgtgtcccgtgtgcggcaggtcgggccaagagacctacatccgagcaggacaatgagaggtgtactgtattgcccgccatgcgcactggtgagccgattcgccccacgtctagctactgtcgcagtggtcaaccctgtgtctcgggatgcccatggcctctggtgctgtatgatgtcacagggtcaagttcgtgcttacgaccatcgctgtaacctcgtagatccggtctggcccaggtaccccttccccctgtaatcccagggggagtggtgctggaaaacggacatcaacatcccctggcaggtggttctgtccaaccatctgcctccatctaaaggcgctgtcttgattttcgcgggctaatagactgcgcgacaaggtgtttggcccggcagcatgcagtcgggtttctcgtagggacctcggccgtacatcccccgggaggcgatcctcgggggtcgtggtgcgatcatacggggtcacccatcttcaggcccgaagcccggtctgtcggctctagggacccgcagcagtgtggtgacccgggacttttgcgcagcgtgtgccttgggcgatg

SEQ ID NO: 619190 - DNA, 306 bp, Homo sapiens
  misc_feature (23)..(23): n is a, c, g, or t
  misc_feature (75)..(75): n is a, c, g, or t
  misc_feature (77)..(77): n is a, c, g, or t
  misc_feature (121)..(121): n is a, c, g, or t
  misc_feature (125)..(125): n is a, c, g, or t
  misc_feature (139)..(139): n is a, c, g, or t
  misc_feature (180)..(180): n is a, c, g, or t
  misc_feature (212)..(212): n is a, c, g, or t
  misc_feature (243)..(243): n is a, c, g, or t
  misc_feature (291)..(291): n is a, c, g, or t
ccgcgtggggcgcaccgtccganccgcccctcccggtgtgcagcgccccgcaccgccccgcctcgcctgggagangncgccgggacgcgccgggctggagtgggcggttattggctttganctangccgtttccgggangcggactcagaccccatttcctttttccacatccaggtcangtggcgtttgctgtggcggctaggcccgcgtncgctggaaaccttccgcgcttggcccccgcnagcctccttccctggcccggcgcttgcggttcttcccggcggcacatnggttgcccccggggc

SEQ ID NO: 619191 - DNA, 207 bp, Homo sapiens
  misc_feature (106)..(106): n is a, c, g, or t
gaagctggaagcgcagacttgtgatattccagttccccctgcagtggtttggagtccctgccattctgaaaggctggttagaatctcaactgacatcatagcattngggcacacctccacgcagaccgcccgaacttcaaactcctggacacggactggacacgacacgccgggacgacactacttgtgggactgacgaccacccac

SEQ ID NO: 619192 - DNA, 219 bp, Homo sapiens
acgtaacgccttcgtggtacaaggctggctgcaggaacttcacttcgccccggacaccttgctttcaatcaacccgtctacaggtaccttgtccgccaaggtcgagggcaaaactaaaaccttccatctctcggattcatcaggctggggacaaatttcaggaccattgctggacgccgcgaaagttatcgcccctggaaataacggtgatttacgtgt

SEQ ID NO: 619193 - DNA, 894 bp, Homo sapiens
gggaggctggatgccgagcggaggaggcaggaaccggagcgcgagcagtagcgtagggtgggcacactatgggtggggatcaccaacgattcgaggcggtgaatcgcaagatccaggttctgcagacggtcgaggcgagatgatgcgaagagtgagctgaggcgtgtagcgccttcctagccgtaataatgcttagatggcgagcacagaggctgggccctggaacaccaaggcatgaggcgtgaggtggcgctccattttaaccagtaggagtccagactggtgcgaagaacgagcgtggagactgatgctcatggagctgacttggaacgaactgccgcgtgtcaaacaggtctggtagaggtaacgtcgtgagaaacatgcatgacgtagaatgagcacgttggacgaagaggggtaatgacgggattgatggatgaattggggggacataatagtgagactcgaatgatctaggatggaaggtcacatcggagaaatccatacgtcatagagatagcgtgagaagcaacgaattaggatgaaagagggcaggacttagggaatgtattggaagaagggtgggtcggtcaaaagtcgggatcgaaatccagtgttcgacacgggcacgacctcaagcgagcatgaacagccaacgacgggaagcgagacgcgtcgacgccttgggcgcacatcagtgccaccggccatggacacggtaaggaacggacctggtcacgtgtaaacctgcggacattcacggaaccttggcactcgggaacccccgaaaccgcgtggcaccaacgggtcaccgggaaagcatgggaggcacaggaaggcacagagcggataacggcctcgcaaagtcaaggcaaagcagctcaatacgttctg

SEQ ID NO: 619194 - DNA, 173 bp, Homo sapiens
gtgagcctcagctgctaagtgatgtcagctgtcctccttttcttgaaagtcgagcgagtctcagtctgacatccacactcgaaacctttccccgtcagcaaagcatcacaatcagaacgtctgtctgctctgcgatctctggatggagttgatactcacaacgaaggagaggg

SEQ ID NO: 619195 - DNA, 701 bp, Homo sapiens
taccgcggttgtccacacggtgtgttggaatcgttgcatgtcccgtcggctcgtgcggtgtttcccgccctcggttgttcccgcgcgttgtttgaatctgggcgcttttttcgtgtacgcgccagatgaaattcgcgggaagacgctcacttgcgacgtgggtatgtttcaataacaggccgccccggtcgtggcaccagtggtggtgccaccaatgtgtgtcgtcgcccaaactctccgagagaagactgccgtttgcgctaagacgcctcaaggagaagagggcttggaggcaaaagggcgcccgaagggttagtttgacgaacccgcgccatgcgggaaataagttcgccgcttcttactagagatggggtggttctcatcggtgcagatgctaacaagaagcttcttcctctgttgctctccactagtttcgcgcaaagcataaagttcactgcagagttcgatggagaaatagatcacttctgtccccagaaatgtttactcgcccgtgagtttgcgttgccatccttgtggatagcagccccacaaatagagatatggcggaaactatcttagtggagaacgcagtactattatgctgcgcgtcattactaatatggagatgcttgcccccactaaaaagatgataggtaaacaaaaaggagatggagagtaacagcccaacaatagcaagagaa

SEQ ID NO: 619196 - DNA, 493 bp, Homo sapiens
  misc_feature (458)..(458): n is a, c, g, or t
tcaagtgatcctcctcccacctcgccctcacaaagtgcggggattacaaggtgtgagccacggcagcagtcctagtagtctttcaatactaaaaggacacatagaccagcatagggggggaggcaggaagtatggcagggtgagtagaagcacagcacagcctcgggagccacagggtcggggttcgaatccggtcggctatggtatgagtcacagtcggggcaggaaatagatgactcaggggtcatggaagacttggaggaagtacctagttatagaagtattaagaaaagcaacaaggaatgatgaggcaaccggggtgcccaaaaagtgaacgtggttatcactaggaccaaaggcacgaggagagggaggtgtaacggagacccagggagagcagtaccggtgggaaaggggctacggaacaggagcggtggctatgggtagagaaatgcagncactattggattacgctgttgcactgagcaggtag

SEQ ID NO: 619197 - DNA, 1020 bp, Homo sapiens
  misc_feature (291)..(291): n is a, c, g, or t
  misc_feature (346)..(346): n is a, c, g, or t
  misc_feature (357)..(357): n is a, c, g, or t
  misc_feature (364)..(364): n is a, c, g, or t
  misc_feature (372)..(373): n is a, c, g, or t
  misc_feature (385)..(385): n is a, c, g, or t
  misc_feature (400)..(400): n is a, c, g, or t
  misc_feature (408)..(408): n is a, c, g, or t
  misc_feature (419)..(419): n is a, c, g, or t
  misc_feature (431)..(431): n is a, c, g, or t
  misc_feature (444)..(444): n is a, c, g, or t
  misc_feature (465)..(465): n is a, c, g, or t
  misc_feature (475)..(475): n is a, c, g, or t
  misc_feature (492)..(492): n is a, c, g, or t
  misc_feature (507)..(507): n is a, c, g, or t
  misc_feature (512)..(512): n is a, c, g, or t
  misc_feature (732)..(732): n is a, c, g, or t
ggcttgagcccttatttcagaatctcaagatctctaggatttctgggcctctcccattactgaaaaggaaccctggttttatatccacacttttttttcctcagagttagattcaattttaattatcacatgaaaaagctgatgtgagcgagaaatttttatacatatgtgtgtgtgtgtgtgtatatatatatatatatatatatcatctaataaagagggagtgccagtgatgctgaagaaaaagaatacaggaagcagaggagatataacaatccaaaagaagagtanctatgatttcagaaatagtcaagataagtggactaaagcagcttgggtcaaatanagttcatctanagaaaantgtgcagnnggaggtacattntatgtgtcttataanggtgaatntgaataatacntgatcatatttncatctccatactntgaaactagttactctgaaanggatcttgcntgattagtaagcaaacntgtgtgaggctaaanagcanatatctagaactttaggaagcttactcatgaaatgtaatttcccttagtagactggcatattttactactaaaaggcgtgtgatacagactaacagctaaatagcagcaaacacatttcttatcatctcgtggaagccagatatcccagccccgttttccttcttcccattgtctgctgaaactaacttaatactttttcttctttccagctttctattntgtctcctgacatttctcttctgaaaaaaataaccaatataaatttagatatcacaaccatttctatttcccctcttgcttctcacataaaaaatctcgagactttttcacttcatgaaatagttttgataatttaatgcgaaaaaacttgggcaaaggtaatgtgtatattttcagaaatttttcacttgatggaatagttgctttccttcaatcttcttcaaagtgtttgaagtctttatgctgtgcattgggtctgaacggaggtctaacaattgctattaggta

SEQ ID NO: 619198 - DNA, 359 bp, Homo sapiens
gtcgtacacgactctgctcaagtctcccaatcaggcattgccacgtcgtgtaccaattcttcacaaaatcatgtgtactcaaagtagcaccgttagtaagcactttcttttagtttgggagacggagtctccctctgtcgcccaggctggagtgtagtggcccgatctcagctcactgcagtctctgactcccaggcatccagtgatcctttcaccttggactcctgagtagctgggactacaggtgtctgacaccatacctggctcattctctgtattttttagtagaggcagtgttgcccaggcctgttctcgatctcctgaattcaagcagtctgtccgtcttggcctcccaaagg

SEQ ID NO: 619199 - DNA, 337 bp, Homo sapiens
cacacttgcatatgagtgagggtttcaaaagatacataaagccttaacttagaattgcattatgttttagaatcatcattgccttaataatcaagcatggaattaagtcatattaaaggagaaatgcatgtttatggattttttgtaagtataaatgcagtgatgtttggtttaaaaaatttgtttctgtgacaatgtctgtaaatataaccaatagagtcatttacagaagaaaaatgagcatgtaataatacaagaactgtttccccctcaaaacctgaacttgaattacctgtaaaaactgaaatttattggttaaagagaagccagtgttgta

SEQ ID NO: 619200 - DNA, 327 bp, Homo sapiens
gcttgatcatttctgcttgggtgtatttgggtcttctgatttgatctttataaatctaggcaccaggctatcaaacttgttgaatcttctgaagaatcaacttcaggttatgctgatcttttgtatggattttaatgcctcagttttgttcagttctgctctaattggtgtaatttctttttttctgctggcttagggatatgttttctcttgtgtttctggttcctctaggtgcaataattagagtcttaatttgagatctttctaacttcttgaggtaggtgtacagcactataaactttcctcttcatccttctttagattgtg

SEQ ID NO: 619201 - DNA, 1592 bp, Homo sapiens
  misc_feature (325)..(325): n is a, c, g, or t
  misc_feature (780)..(780): n is a, c, g, or t
cgatggtggttcgggcgaggcgcgtcggggtgatgagtgttgtttgtggtggcggattgttgccgctacgaagatacttgtcgggtgtgacggccgccctcctcgttttcgggcgtcagactacggctgtggtgggttggttgacctcgcccgctggtgttgggacatacgatggtgatagagtcgccgtctgtgataggtgctctcttcttcccccgtgccacatgaggagggcggggaggagagggggacgcccctgttttggagaggctggcgcccgatgtgtgtgcaacgatcctggctgcccataacacgtttatgtatnttgtctgtgggggaacaacacccctcatatttcgtatagtagagggggccgctggtaggcgaccccccgtgtcggccacagtggtgtgccgagagatcggtatgacatgtatataattggggtgggcgcgccccctagttgtgggtgaaagcaaacctcttatggggggcttctccctttttgtgtctgggtggtgttcgttgtgcccacccagacgagtgttgtccaccgacgaaaaggttgtcaaaatgaggggggcgcctcttgtgaaaggaggggtgttgtcgtacacgaacaagatgatttgctggggtcaagagtggtcaccgccaagacgaaagattttgggggcacccccatgcgctaatatagtgttataaggggccctcgtcagtaaaaatgtaagacccctgtgggtgtgaatttgcctcatcccccacgcttgtataagaagngcgccacccttatatgttttgggggcgccacgcccgtctgttgttgtgtttccatctgtggtatagagaaaatggagccctttgggagattgtaagaacatatattttgggttaagcccccctctgttaaaggtgtcgcggccacactagaagtgttttagcccctcacggaggaaatattttcccaccacagggggctttgtccaccccagcaacacccccacatagattgtgcgcccagctagacgttgtgatactcaaactctttttgggaaaagagcctcgacacttctctttctataccacacactctgtgtagacacactctctataataatagttgtaaaatttttctcttgagaagagagggtgtttctcgtggtaaacgctgtatattgtgatagtgtctccgcccctgttataataatagagtttctcttgtagtgtcttcttataccacgcgttgaaaagttatttcgccacaacaccctctctcggagaaagttaataaattaccactccactaatcacatcttatttgtttataaactctataaaagccctcatcggaaattttccttagagaaaggaaatatggaggacacttctcacgagccacagttggttttgtgtgtaataatgttttccaccacggaaaccaccctgttataatgaatattcacatgcctcacgcacctcgtcacctttttaaaacccgtcacaggagtccccctgtataaattggaaatgggccgttttggattttcaccttttaaaatggttaaatattaacttccgtccatctcccggga

SEQ ID NO: 619202 - DNA, 314 bp, Homo sapiens
cataatcagtatattattcactcctatgtgagtaattgaggagtatgctaagattttgcgtagctgggttcggtttaatccacctcaactgcctgctatgatggatcagattgcgagagtgaggcgacggcttacgtttagtgcagggcgcgcatttggtatctgcattgagcatgggggctagtttttgtcatgtgagcaagcaagcagccggcatgtcagaggggtgccttgggtaacctctgggactcagcagtgaacgggggctattcctagtctcattgctcatagccatctcatgattcattcactgc

SEQ ID NO: 619203 - DNA, 454 bp, Homo sapiens
aagagggaggcccgaaaacccaatttttatcccctgcccccttcccgggggaattatccaaaaaaacgggtcgccctcccctggttggtaaaaggttttttttcccaacaatttcccgtggggtggggagacaatgggggcccggggaaaaattcaaaaaccccccctcccgggttggattccggggggttttttttttttttaaaaaagttccccgtggcaaaaaaaaggggggcccgggggaagtttttttttttttccgttagggaagggggtttggccacccccaaaaagaaaaagaccttttcctttttcccgggtaaataagtgggggggcgggcaacccccccctccccgggttttttggtttggaaagggagttttgggggggccccctttttaattttttccgggcccccgggatggaaataaagcccccccccctcccttggga

SEQ ID NO: 619204 - DNA, 221 bp, Homo sapiens
tctagagatccccagcgggaaacaattcactatacaggatgacagaaattgtattgtatgcatgttgtgttaatatgtaaagttttgtttcatgagacagtcacgctctgatcacccacgctacagtgcaatagagcaatctcggctcactgcaaccccctcctcccgagtatacaagcattgttcctgcctcatcctcctcagtatctgggattacagat

SEQ ID NO: 619205 - DNA, 358 bp, Homo sapiens
  misc_feature (298)..(298): n is a, c, g, or t
  misc_feature (302)..(302): n is a, c, g, or t
cccatttgaaaattgtcatctggcttcgttgtaaaagatgttcaaccagaagagtgaagagaaagaaccaggcagcacattgccaaccctggccagagagatgtctgtttttcaactacaaaagtctatgcaaagttcctcagtgggggtgatattaatgttttggacaaagcaattaattctttatggaagagggagttgggagggagacatccatgagctgtgtgtcttcaagattagtgtctgggtccagaacactgagatggctggcacagatacagacaatatgtaatatggnaggnagaccttacgtatcttccagtgacagactatgtcaactaaaagatatatagctata

SEQ ID NO: 619206 - DNA, 103 bp, Homo sapiens
ccactcgtaatgggagaaggtgcagcagtggtgccaaacgggaccatgcctcctggaggagcagagcaagcagcagtcaacgagcactgggcgcattcgccag

SEQ ID NO: 619207 - DNA, 451 bp, Homo sapiens
aaagtcgtgtggagtaatgatctccccataggaggttttggtgtgtcctagctatatcaaaaagtatatagtccctcattgaattgccgctcagccatgtcctctccagcaatgcctatagtcagtagagcaatctggtgtacacagccatccctgtgttagaggatcaaaaacgtgtatgtcattgtagtctacaagcctgaaccatcctcaagccagagtaatagcacaaggtcctatttgtttttctatcaagcattaaacttttcttatatgcactcttgctcagttgcacctcccctgtgtgtggcataaaactatgcttgtcagcctttttatatcagctttttggaagcatacatgttttcaatgttctgtgggaaagcctctgtattttttcccctctttggccatctttttctgaaaataaagtgatgaatcctctaaaaaa

SEQ ID NO: 619208 - DNA, 653 bp, Homo sapiens
  misc_feature (5)..(5): n is a, c, g, or t
  misc_feature (23)..(23): n is a, c, g, or t
  misc_feature (61)..(61): n is a, c, g, or t
  misc_feature (83)..(83): n is a, c, g, or t
  misc_feature (97)..(97): n is a, c, g, or t
  misc_feature (110)..(110): n is a, c, g, or t
  misc_feature (124)..(124): n is a, c, g, or t
aaaanagcatgaacccaaggtgncccccggggaagtccccctaataaaactggtttgtacnagtcatggtgttggggtgatcnagaatggaagcccntttcaaatagacncttagtattttggncttaattcgcaatgcattgattcagccccagaattatttgccagaaatagactttcttcccctggtgttgggagccaggagggttggaaaagctcaggaacccctgagctggttcatctgtttgcatattgggtaggttaatttccctggagcctgagagtctttggccagatttcagctgcgtctgcctggctcttttgctgcagctgtgagattggggtctggttccagcagtctgtcactggtcagcctgagtatcacaccctgagctctggggctgggagtttcttcccacaccctctcccttgtgccttaagttgcgatggctctgagtatacaattaatcggaggtgaggggtgggtgtcacagctaatcccaaattcaaaaattagtccaaggtgctgcaaaatataaatttgatgtcagtagaaagtcgtatcctaaaatgtaaaaactgtaagtgtacagtagttaatgagctcagaacatctgataactgcaatttaaaatgggcaaaaagttaaaaaa

SEQ ID NO: 619209 - DNA, 854 bp, Homo sapiens
  misc_feature (216)..(216): n is a, c, g, or t
  misc_feature (569)..(569): n is a, c, g, or t
  misc_feature (714)..(714): n is a, c, g, or t
  misc_feature (723)..(723): n is a, c, g, or t
cacagagagattcatattaatgagtacgccacactggatgggggcgagcggtgggaggacaaaaaaaaaaccccatcccaactataccctcaccaaaaaccagaaaaaaaatcagaaaaaatggattatgaaagtatggggtgacaaatccagtgaaagccctaaataaatgtaaaatgcctaatgcagtggttcccaaacctgtctgcacattgntaacccctggggacctccaaaaatatcgatgtctattcccaattccatgtatttccatctacactggagagacccaacgtcaggatattgaaaagcttccccggatgatgtttttttgttgttgttgttgttgttttaatagatggagtctcgctctgtctccagcctgggcaacgagagtgaaactctgtcgcaaaaaaaataaataataaaataaagaccctaggagtcttccatcttaaacctagccctacaggtgaccgaatgcagctggagaataactgcttgttaagaggcagcaaaaccttgggttttgttgggaacatcatctctcactactttgatctcttggncatatgacagactaatcattagtgtcgcatttattcttccagtggtcagatggggtgctcacatgctgcaggttccttacatgtgcttgtttccttccctaaactgaaggtgcctttgaaggcagtctttttctacatccatcangttctctgnggaagagcacttcttagctattccatcaacactcttgccagtctaatctcaccatcagtttcccgtggcctgccctttgtctgaaactttgaaggtcttatcgaatgttacttagcctccaacagtattcg

SEQ ID NO: 619210 - DNA, 200 bp, Homo sapiens
gaggtaggacagaaaggccaccacagctcagaaagtgcgacgaatgacagaggctaaatgagaatgaacgaaaagaaaagagtgacctattaatgaatttcgagcttaattgcatgtgcacgagctagagctccgaactaacgtagctgctactaaggtcaaggttaaggtcaagggcctgagacttagttaggagagag

SEQ ID NO: 619211 - DNA, 151 bp, Homo sapiens
agacgtcattcttgcatagagaacttttctaaagtgagactgacacgggtggctgtgcccttgctatcaaggggggcccggctggggacgtcagcctttccatgagcaagtgggcttttccacatactcatgcaatttcccccagcagctg

SEQ ID NO: 619212 - DNA, 1806 bp, Homo sapiens
  misc_feature (981)..(981): n is a, c, g, or t
  misc_feature (1625)..(1625): n is a, c, g, or t
gtcgggcggggtcgtttcttttatgttgtgtggggggggtgctcccctccgtctcgtctcctcctcgggtcagcgagtagatagtattttgtgtggcgccgtgccctgtcatttgcttgtgtttggttgggcgtgtgcgcgcgccccgccccctactcctggttgtggtggtccccccgcctccttcctttttgtgtgtacgcccccccccatcgtctggctgtgtgtgtcatctatcattgtataggataatatgttgttttggtccgtcgctgcctctcatcttacagatgttgcaggagtgtgggtgggcgcgcttccccatactcgtgtttcttggtgtagatggttgccttgtctcttgcgtaggggtcttgttgttgttttttcggtgttgggcgactcggaatcccccaccccgcagagatgtttgtgtgggcgggccgcccccgccacgccgaatttagtgactccgcacgcctgggtgtgggtggggtcgagccctctgttcgttgttgttgtttttttggttggcccgcccccacacaccggtggtgcgccccctctcccttttatacaagtgaagtaggggggtgttctccaacgccagttgttttgtgtccgctcaccattttcgctcctcgttggttgttaatagagtgtacctctcccccccccgctcccttgtttgccggtgaaatggtgtttgtttccccctcccttccccggggatggtatagcatccctctcgtttttgggtcggtggtgaggtcgtccccacccctgggtgccaacgtcgctccaaccattttcctccggctttgtctcgttaaaggacgtgttgttaatgaccagcctgttgtgcctcgctccccttgtgttgattcccggcccgggtgggcgtcccccccccacccaaggtgtgtcgctacccaccatacatgcttccctcctaccggccgggaagtggtcagttaaccntccttgccttctttggaccggagaaacacaccccttcgtcggggggcggctttgtctaaagaagaataattctgcgggttgtgaaaatgaacccccggcggcggtttaaacacccatctgtgatatggcgttgtgctgttggagccacaccattcggtaagtaacagggggagaagccatccttcgttggtgcaaccaacattcaatattcggcggtgggagtagcacccacaccttcttgggcgccctcgttttcgaaaatatgcgcctccgccccaccagaatcatcttctaatcatatatagagcccaccgcccaccagtctcgtatagtagactccgcgccaccagctgttttcttgcgctatatctctcgcgcagcatattttgagatgagacatcatccgctggtctccaacaggcgcccctcagaataagaataaggcgcgataggagccacgaggcccgcgcacataggccgggcgctctcctcgatatgctctggccacacggagatgtgaagttgcttaaggcacaaggcttagctttcacaaggccccacggacccagccagagtcttccccatgtttcctgagacccgaagatgcccagagacaccacctggtggcacagtcttgtgtctcnagaaagaggataccagagattggggggccagccccccagatcccctttcttgttccccagactccagattttccccaaagaccctgacatgctgaattcttctctattgtaaggtttcccagttagatttgccttccgatgattaaatctaagtccatttgaaacaaaaagaaaaaaaaaa

SEQ ID NO: 619213 - DNA, 511 bp, Homo sapiens
  misc_feature (226)..(226): n is a, c, g, or t
  misc_feature (371)..(371): n is a, c, g, or t
  misc_feature (380)..(380): n is a, c, g, or t
tacaagagaagagacgagatggcgccattgcgctccagcctgggcaacgagagtgaaactctgtcgcaaaaaaaataaataataaaataaagaccctaggagtcttccatcttaaacctagccctacaggtgaccgaatgcagctggagaataactgcttgttaagaggcagcaaaaccttgggttttgttgggaacatcatctctcactactttgatctcttggncatatgacagactaatcattagtgtcgcatttattcttccagtggtcagatggggtgctcacatgctgcaggttccttacatgtgcttgtttccttccctaaactgaaggtgcctttgaaggcagtctttttctacatccatcangttctctgnggaagagcacttcttagctattccatcaacactcttgccagtctaatctcaccatcagtttcccgtggcctgccctttgtctgaaactttgaaggtcttatcgaatgttacttagcctccaacagtattcg

SEQ ID NO: 619214 - DNA, 1109 bp, Homo sapiens
tcccttctcattttataaacctcaaagtggatgatggtggggctgtatgtgtgggcactggtgcctatgcagtcacattcacaatacagcccacatcatcccttgcatgataaacccaagtggatcattcagatagataacccccataaatgtgcacgtaccagagtctacatcaatatacgaaacagggagacagtagccgccaaggagatgaccaagatgcagggagaaccaacacagaccccacccgtaccaccagtcgacactactgccaccccacagcgcagaacacaacacaacacaccatacaaccaagaggcactgggacaacaatcagatcccatcagagacggcactaccgatcgaaaccgcaacggaccacgaacggaccggtccacgactgcgacgcctcacacgagccgaccgagacggtaccgcggcaagaagacccacccacgagcagcccacaaactagccacaaaataactacagtacagacgctatcgcagaccctgcaccacaacaagctagcaaaagaaccacgacacgcaacatagagcccaccaccacggcaccctactctaacacgctcaacgcgcctacgccagcgcacagatacacgacgaacaggagccaaaaatcgacaaggactgagacagcagccaccatcctaaagcgcacacaatgcgacaatacacaccaccaccacctcgcatatagctgcccaaaaccgaccctgcgcaagcccacccatgcaccccaccgcacccaacctgacccacacccgcactccgctccaccacagcgcgcccgaacagactgcgagccacgccaggcccagcacagcgacacgacgacgatgcgacagccggtccgacgcaggccgccctatgctggcacgagcgcagtagaagagactacagcacaaacgacgcgcgacacgcagccacccccgcgcggaggacacggcaccgacgcagcgaccgcgcgcacaccgcggagacatacagcaatgacagccgatgacgaagcagcgtgtcccgtccccgccaatccccaccagcgcgacagcgacgcacacgccagcaacagacacgccagacccaacc

SEQ ID NO: 619215 - DNA, 483 bp, Homo sapiens
tacaagagaagagacgagatggcgccattgcgctccagcctgggcaacgagagtgaaactctgtcgcaaaaaaaataaataataaaataaagaccctaggagtcttccatcttaaacctagccctacaggtgaccgaatgcagctggagaataactgcttgttaagaggcagcaaaaccttgggttttgttgggaacatcatctctcactatcacaccctgagctctggggctgggagtttcttcccacaccctctcccttgtgccttaagttgcgatggctctgagtatacaattaatcggaggtgaggggtgggtgtcacagctaatcccaaattcaaaaattagtccaaggtgctgcaaaatataaatttgatgtcagtagaaagtcgtatcctaaaatgtaaaaactgtaagtgtacagtagttaatgagctcagaacatctgataactgcaatttaaaatgggcaaaaagttaaaaaa

SEQ ID NO: 619216 - DNA, 295 bp, Homo sapiens
cagtgaagcatataggatcctgcatgttaatgggtttaatggagagggcggcgaatgaggacccgcaggctgcaaggagcaacagcgatggtgagtaaggcaccaacagtgcaggacatcaaaaacaacctgaaagaggcgattgaaaccattgtgggcgccatgagcatactggtgcccgccgatggagctggccaatcgcgtagaaacagttcagagtggactacattctgagtgcgatgaacgtgcctgaatttgacttccctcccgaattctatgagcatgccaagggtct

SEQ ID NO: 619217 - DNA, 293 bp, Homo sapiens
ttgtttcgctgatggcgtccacgcttgtttgcgcagacacggagtgccacggcgctaatctcgagctcactgtaacctccgcctcccgagttcaagcgattctccagcgctcagcctcccgaatagcggggactacaggcgcccgccatcatgcctagctaatttttgcatttttagtagagatggggtttcaccgagttagccaggatggtctcaatctcctaacctcatgatctgcccgcctggggctcccaaggtgctgggattcaaggcatgagcaccgtggccggccg

SEQ ID NO: 619218 - DNA, 249 bp, Homo sapiens
  misc_feature (126)..(126): n is a, c, g, or t
  misc_feature (136)..(136): n is a, c, g, or t
  misc_feature (143)..(143): n is a, c, g, or t
  misc_feature (160)..(160): n is a, c, g, or t
gtcacatgacatctgcccagtttccacaacgatgtggctcctgccacacccacagggcagcctcctccaaaggcctcctggaggggcctacccagaagcctccttgacaccacgtctgcaaccctngctctatgcntgacccnttgtcactgaaaccctngatctacgacttactatgaactaaactgacaattaacatggccaacggggccgctaaaaagccaaacttttaaacaaaaagaaaagaaa

SEQ ID NO: 619219 - DNA, 275 bp, Homo sapiens
gcctccagaggataaaactatgatcactgagcccgtaatatggtcatggcctattcctagagttataagaagttgccaggaagccgtaaataagtgaggcagcagtgccaggaggttaaatgaggcactaaaaatgattaaggatactagtataagagatcagggtcgtcctttagggttgtgtatggctatcatttgttttgaggttagtttgattagccattgttgggtcgggattacgtcggatgttgatgagatagttttaaatggcgaat

SEQ ID NO: 619220 - DNA, 276 bp, Homo sapiens
  misc_feature (212)..(212): n is a, c, g, or t
actgcaacctccgccttctaggttcaagcgattctccgtgcctcagcctcccgagtagttgggattatgggcacgatagctgggactacaggcacctgccaccacacccggctaatttttggtgattctaatggaaggtggctttagggtgataactgatggccttttaatcatttaggtttttaatttcttaaattatttcattggagcantttgctttaatttgtttatttttggaatacttgtgaacttagtttacggggtgtgatggatcat

SEQ ID NO: 619221 - DNA, 198 bp, Homo sapiens
tctcaaggacccccagcatcgcaatcacaggggcgctggttacagtgcaggtcctgaggcccccaggaaatctgcattttaaacaggctttccagctgcttctcacacacattaaacgttagaggacaacacggcccgagctcagtggctcacacctataatcccagcactgtgggaggccaaggaaggcagatcact

SEQ ID NO: 619222 - DNA, 302 bp, Homo sapiens
tatagacaacatcgcatctcaaatataacatgtacataaaatagaacatacactgatatctgatcatccctcacaaatatacacacctaatcctcccattcctatctcccaccctcatctcagtgacacgtctacccatccagtagcttcagccagaaacctgggagacatactagacactttcctcttcctcaacccccacactcaatctataataaaatgaattctttctttaacatacttctcaaatccatccacttctctccatctcttctgccactaagtcccacctgcagagatac

SEQ ID NO: 619223 - DNA, 167 bp, Homo sapiens
attaccgtttattccactgtaccatggacagaattccgacctactcttttgagatttggctccggtaagtcctgaggaagggcataaagtgaatgtcctatttgggacttactggagcaaatctcaaaaacattcggatttctctcctcggtacaatgaatttacct

SEQ ID NO: 619224 - DNA, 1255 bp, Homo sapiens
  misc_feature (26)..(26): n is a, c, g, or t
  misc_feature (144)..(144): n is a, c, g, or t
  misc_feature (270)..(271): n is a, c, g, or t
  misc_feature (273)..(273): n is a, c, g, or t
  misc_feature (276)..(276): n is a, c, g, or t
  misc_feature (279)..(282): n is a, c, g, or t
  misc_feature (285)..(285): n is a, c, g, or t
  misc_feature (291)..(293): n is a, c, g, or t
  misc_feature (567)..(567): n is a, c, g, or t
  misc_feature (588)..(588): n is a, c, g, or t
  misc_feature (597)..(597): n is a, c, g, or t
  misc_feature (620)..(621): n is a, c, g, or t
  misc_feature (642)..(642): n is a, c, g, or t
  misc_feature (650)..(650): n is a, c, g, or t
  misc_feature (654)..(654): n is a, c, g, or t
  misc_feature (661)..(661): n is a, c, g, or t
  misc_feature (663)..(663): n is a, c, g, or t
  misc_feature (676)..(676): n is a, c, g, or t
  misc_feature (679)..(679): n is a, c, g, or t
  misc_feature (691)..(691): n is a, c, g, or t
  misc_feature (693)..(693): n is a, c, g, or t
  misc_feature (703)..(703): n is a, c, g, or t
  misc_feature (727)..(727): n is a, c, g, or t
  misc_feature (736)..(736): n is a, c, g, or t
  misc_feature (746)..(746): n is a, c, g, or t
  misc_feature (755)..(755): n is a, c, g, or t
  misc_feature (773)..(773): n is a, c, g, or t
  misc_feature (783)..(784): n is a, c, g, or t
  misc_feature (789)..(789): n is a, c, g, or t
  misc_feature (796)..(796): n is a, c, g, or t
  misc_feature (804)..(804): n is a, c, g, or t
  misc_feature (811)..(811): n is a, c, g, or t
  misc_feature (837)..(837): n is a, c, g, or t
  misc_feature (848)..(848): n is a, c, g, or t
  misc_feature (855)..(856): n is a, c, g, or t
  misc_feature (879)..(879): n is a, c, g, or t
  misc_feature (903)..(903): n is a, c, g, or t
  misc_feature (924)..(924): n is a, c, g, or t
  misc_feature (929)..(930): n is a, c, g, or t
  misc_feature (935)..(937): n is a, c, g, or t
  misc_feature (950)..(950): n is a, c, g, or t
  misc_feature (956)..(956): n is a, c, g, or t
  misc_feature (1010)..(1010): n is a, c, g, or t
  misc_feature (1037)..(1037): n is a, c, g, or t
  misc_feature (1039)..(1039): n is a, c, g, or t
  misc_feature (1041)..(1041): n is a, c, g, or t
  misc_feature (1046)..(1046): n is a, c, g, or t
  misc_feature (1054)..(1054): n is a, c, g, or t
  misc_feature (1107)..(1107): n is a, c, g, or t
  misc_feature (1129)..(1129): n is a, c, g, or t
  misc_feature (1135)..(1135): n is a, c, g, or t
  misc_feature (1137)..(1137): n is a, c, g, or t
  misc_feature (1152)..(1152): n is a, c, g, or t
  misc_feature (1155)..(1155): n is a, c, g, or t
  misc_feature (1173)..(1173): n is a, c, g, or t
  misc_feature (1180)..(1180): n is a, c, g, or t
  misc_feature (1188)..(1188): n is a, c, g, or t
  misc_feature (1250)..(1250): n is a, c, g, or t
gttctgtggttgagctgcctggccanggcggactgggaaataaggtcttgtggatgagctcgaggcttaaaagtgacagtggggctttgtaaagaagaagatggacaatgagcgaccgtgtaggtcccccttcctataatgagnaccttttcacagacctgtactgagctccgtgagagtaaataactcggaggagatgggccctgcaagcctcttgcttagccgtctgtgcagaaaatagcattttcgaaatgccctgagttgacctanngnctnatnnnnctnctgctnnnggatttacgcgcacgttggaaccgaagagagctctgttgttgcaatgttcagcccacaagagcttactggtgaaggaatgggacaagacccatctttatgcaaagccagcgttacagtaatgttccagcatctcataatctatcctggggaattcagctgcctcccagggtgaatacaggtattcctgatgacagtctgcctctatcttacagagcagcttgttgctatataccattgaaaagccttcagagctgagaggtactactaaccaanaacctgcttggctcaaagggncagcacctnctctctaaagcccaagaggagtnngaggaaaactaggtgtctgtnttcactcnaggntgaagtnanaggtctgagcaanaanggtgtataaaananggaatctgtnttggaggacatcagaaggtgaatnttccaagtncttggacaanctagctgtngaaaagctttctgggttnggggggtatnncagangtacctnaaagtgtnagcaganacagattaagacactgggagccaatnaaacagcagtngagggtnngctgtgtatcacatttctgtatnttatcacccccttcctgcaacatnatttatctggaatctacctgnccttnngtttnnnagatacaagggcntggttntgttacccaggctggtttcaaggcataactttaagagatcctctcaccacaaanttccaaagtgctgggattgcaggtgtnantnatggnacccagantttgctgcctttcttacatgatccaggcccagaacccaaactcaggcactgtntagatgaacactttcgtaaacnactgancnagcttgttgccaatngtngattgaacttcccataantccactncgtgtctnttcctctgtttacagccaccttctgttcccgttatgagcctttaggtctccatttgcatatngcaaa

SEQ ID NO: 619225 - DNA, 329 bp, Homo sapiens
tttcaatggacctgactgcaatgttatcataactctgtaagacccccacaaatgcaggagcctgctcagcaagtaaagtggcactacatgagtgcaaccacaacactccaatccttttggcagtcaaggaaacccacaaaggagcaacatttgaatgtagcccttgaaagtaatgtgtcatgtgttcagctttctgaatcatttgtaatctcacaatgctgcactttttatcacagaagccgctcaacagtgggctgatagtcaaggtattgattaaccctccacactcattaccatcaacaggcatctgatattgaccaaaaatcact

SEQ ID NO: 619226 - DNA, 216 bp, Homo sapiens
ccgctgtccaagagaccctcacgcttcgtaaaacactgtctcctactgtctttctccccacatgccacctacagcgttcaaataaaggtttgtatactccgtaatgatccgctaacgttcttcatcatggtcaaagtcttctgcttgagccacacagccggcaaccccgtcaggcattgacgtttgccgcacatggttggtactacgtaggagtct

SEQ ID NO: 619227 - DNA, 212 bp, Homo sapiens
ctaagagggaggaaaatgaaaggctatgtactaattcacatatattgacaaaagaaaaaagggtgagtccataaacgctctgacccttgttgtagatgtgaagcgttccacttccagaacttgtgcttttattggacagccggagagatacgtctgtatattaggctccttaaatccttgagtgttataaatagcagagaaagggatataca

SEQ ID NO: 619228 - DNA, 771 bp, Homo sapiens
  misc_feature (707)..(707): n is a, c, g, or t
  misc_feature (713)..(713): n is a, c, g, or t
ggacggggttgcatcacttcctctcaagcttgggttggttggtggggttacacgcgggttcaacatgcgtatcgaaaagtgttatttctgttcggggcccatctatcctggacacggcatgatgttcgtccgcaacgattgcaaggtgttcagatttggcaaatctaaatgtcataaaaactttaaaaagaagcgcaatcctcgcaaagttaggtggaccaaagcattccggaaagcagctggtaaagagcttacagtggataattcatttgaatttgaaaaacgtagaaatgaacctatcaaataccagcgagagctatggaataaaactattgatgcgatgaagagagttgaagaaatcaaacagaagcgccaagctaaatttataatgaacagattgaagaaaaataaagagctacagaaagttcaggatatcaaagaagtcaagcaaaacatccatcttatccgagcccctcttgcaggcaaagggaaacagttggaagagaaaatggtacagcagttacaagaggatgtggacatggaagatgctccttaaaaatctctgtaaccattttcttttatgtacattttgaaaatgccctttggatacttggaactgctaaattatttaatttttacataaggtccttaaattgaaaagcgattaaaagacatctttcctgcattgccatctacataatatcganttacgntgtaaatgcattccgggtaattctactgaagattctcagaatcaagaattcactgaaa

SEQ ID NO: 619229 - DNA, 802 bp, Homo sapiens
ggacggggttgcatcacttcctctcaagcttgggttggttggtggggttacacgcgggttcaacatgcgtatcgaaaagtgttatttctgttcggggcccatctatcctggacacggcatgatgttcgtccgcaacgattgcaaggtgttcagatttggcaaatctaaatgtcataaaaactttaaaaagaagcgcaatcctctgtccctgttagggtggaaccgacagcattccgggaaacgcagctggtaatagagcttacacgtggatgattctatttgaattcgagcaacgtagaaatgaagcctatcatacataccatgcagagagcatatggagataaaactattgatgcgatgaagagagttgaagaaatcaaacagaagcgccaagctaaatttataatgaacagattgaagaaaaataaagagctacagaaagttcaggatatcaaagaagtcaagcaaaacatccatcttatccgagcccctcttgcaggcaaagggaaacagttggaagagaaaatggtacagcagttacaagaggatgtggacatggaagatgctccttaaaaatctctgtaaccattttcttttatgtacattttgaaaatgccctttggatacttggaactgctaaattatttaatttttacataaggtccttaaattgaaaagcgattaaaagacatctttcctgcattgccatctacataatatcagatatcgacggatgttagatggcctctcagtgttaaatcttgatgatagatgtacttaagtaatccatgagaatcctatg

SEQ ID NO: 619230 - DNA, 164 bp, Homo sapiens
cccacaggtaaaacccgccaaaccaaccactacctaataacaactgagagagacacccctctatctacaaaatagtggaaaagttataggaagacgacaaacctacctagcctgtaatagcttgtgtgcaagatatgatcttaggtcgactttaaagttgaccc

SEQ ID NO: 619231 - DNA, 166 bp, Homo sapiens
attacttctttcttctatattagtctggctagtggtctattttgttgatcttttcaaaaaaaccccaggttttcccttgggatttcatttgaattctttgaagggttgatgtgtctctatctcgatcagtctgtctatcttattattcttgtcttctgctagcttt

SEQ ID NO: 619232 - DNA, 804 bp, Homo sapiens
  misc_feature (740)..(740): n is a, c, g, or t
  misc_feature (746)..(746): n is a, c, g, or t
ggacggggttgcatcacttcctctcaagcttgggttggttggtggggttacacgcgggttcaacatgcgtatcgaaaagtgttatttctgttcggggcccatctatcctggacacggcatgatgttcgtccgcaacgattgcaaggtgttcagatttggcaaatctaaatgtcataaaaactttaaaaagaagcgcaatcctcgcaaagttaggtggaccaaagcattccggaaagcagctggtaaagagcttacagtggataattcatttgaatttgaaaaacgtagaaatgaacctatcaaataccagcgagagctatggaactacaagacttactttggattgcccgaacttcgcaccacgcaacggacgtttcgacacgacaattcagaaccaggaacgcgccaagctaaatttataatgaacagattgaagaaaaataaagagctacagaaagttcaggatatcaaagaagtcaagcaaaacatccatcttatccgagcccctcttgcaggcaaagggaaacagttggaagagaaaatggtacagcagttacaagaggatgtggacatggaagatgctccttaaaaatctctgtaaccattttcttttatgtacattttgaaaatgccctttggatacttggaactgctaaattatttaatttttacataaggtccttaaattgaaaagcgattaaaagacatctttcctgcattgccatctacataatatcganttacgntgtaaatgcattccgggtaattctactgaagattctcagaatcaagaattcactgaaa

SEQ ID NO: 619233 - DNA, 822 bp, Homo sapiens
  misc_feature (758)..(758): n is a, c, g, or t
  misc_feature (764)..(764): n is a, c, g, or t
ggacggggttgcatcacttcctctcaagcttgggttggttggtggggttacacgcgggttcaacatgcgtatcgaaaagtgttatttctgttcggggcccatctatcctggacacggcatgatgttcgtccgcaacgattgcaaggtgttcagatttggcaaatctaaatgtcataaaaactttaaaaagaagcgcaatccccttcggccaaaaaggttttacgggtgggacccaaaagcaattccgggaacagcagctgggtaaacgagcttacaggtggattaaattccaatttttggaaaaactttttgtggggaaaaaaaaaagccgttaggaaaaattgaacctatcaaataccagcgagagctatggaataaaactattgatgcgatgaagagagttgaagaaatcaaacagaagcgccaagctaaatttataatgaacagattgaagaaaaataaagagctacagaaagttcaggatatcaaagaagtcaagcaaaacatccatcttatccgagcccctcttgcaggcaaagggaaacagttggaagagaaaatggtacagcagttacaagaggatgtggacatggaagatgctccttaaaaatctctgtaaccattttcttttatgtacattttgaaaatgccctttggatacttggaactgctaaattatttaatttttacataaggtccttaaattgaaaagcgattaaaagacatctttcctgcattgccatctacataatatcganttacgntgtaaatgcattccgggtaattctactgaagattctcagaatcaagaattcactgaaa

SEQ ID NO: 619234 - DNA, 241 bp, Homo sapiens
gtggtatctagacggatcccgaagagaccaggtgattgtctgtcagaccttgtcggcttctatcaaaacagcaccctgttgtcaccaggcctagagagtggctgtaggtggccgctgaaaagtgacttaagttgaagagcacatttctttcatctctcttgtccatacctgatagacacattcctctctgccaccttccttcaagaaggacctgccctctgcagactgggctaagcgtgag

SEQ ID NO: 619235 - DNA, 381 bp, Homo sapiens
  misc_feature (376)..(376): n is a, c, g, or t
aaaacccccccagaacaacgttaaaaccccccaggtcagaatttttaaaaccgcccaggacggaccaggcaaaaaccagaggggagagctcagtaggccgcctgagactgctgctggcggaagccaccgcgttgcatgtagccctcgtttttgcggtacccgtccttctggtctcggaggtagcccccgtaggggccttgcttgtggccaaacacccgttcgttgttctccaccaggctgcccagcttttcggccagctgcagagccaggttctgctgagcagtgggctcagtgcggcgcatcaccactgtctgtgttggctggtccagggaggccatcagctcctcattaatgatcattttgctgatgatggagngcaca

SEQ ID NO: 619236 - DNA, 1008 bp, Homo sapiens
acaagaacaatgaagcctgttggtaactgatctacaaatgtaatatcacgttatcatatgtaaatcatgatggcctgtaacagttgaagcatctaaaaatatatatttatttcaagtattttcacatatattgtacttgacattatctcatgttggcacttctaagttgtactttttggtatgttacctgtacttaggcttcaaattgaagcctgtagttatgtgtaaaatcagatgcttgcacggaggacggtaacacagcaaaggcttaacttctttcttctctaatgtcacctgatataaagtactttatgttcgaagtgaattattcttgatgtaggcttcagtatactgtgtttacacaggtctcacagtcagtaaatagccagtgttcacatatttcaaccaggattccggctcgaatcacgctcgaagcatcttatctcaaccagtgcagtcatccatactagcatcacataaactatgtacactaggacacgactatatcataatactctaaggccttagatcatagtacaaaagctgccctatggctacaaattcgtggtacacttagcgaagcagacgtattgggcatccagtaatcacaaggtacccgtggcgacaaaatccctggacgtaagaaacggaaaactacacacctaaccgacacccacccaaacaggaatagggactaccccggacagcactccacacgggccagccagaaaccacacacgcggcaacacaagcacacactttcaagcccccgaacgccacaacaacatgaggaaagaacacccacacacggcgaaacaccatagtgagcatccgaaagcggcgggccacgcaacgagtcagggcaagccgcacacccagaccgggaccggaaagccacccgcgcgaacgaggccacaaaacacagaaacccagggaaaaaaagcgaaggggagaaaatacagggtctacaaagaacccagaggaagccagaggagcgaaaccaaacgg

SEQ ID NO: 619237 - DNA, 381 bp, Homo sapiens
atgatattactgaacagaagagttttaagactgaaaaaagattacatgtttaagagtttggcatatgataggtgcttgataaatgtcagttctcaaaattatttttctggccaggctcagtggcttatacctgtaatcccagcattttgggagccgaggccggcagatcacttgagccaggaccaacctggccaacatagtgaaaccccatctctactaaaaatacaaaaaactagctgggtaggtggcacatgcctataattccagctactcgggaagctgaggcataagaattgcttgaacccaggagggcagaggctacagtgagccgagattgcgccactgcactccagcctgggtgacagatcaagactccttctc

SEQ ID NO: 619238 - DNA, 154 bp, Homo sapiens
ggcccggattgtgagctccccgtgtctggggcaggaagtgtctcagaggctccaatttatatccatctgggggtcacggcaagagccagaacctgctgtttcaggtgggtgatgtaaatatagtgtgtacataataaagcacatctattttaac

SEQ ID NO: 619239 - DNA, 265 bp, Homo sapiens
gcgacgtctcagttgccgaaaaagttcctcagtttagaagctgttcataaagaatgtgaatgtactaaacactatttcacacacacggaggcatctctagttctgagacagaagtaacacttacaacaatggaatgtgaagatggccgaataggaacagctctggtctacagctcccagtcacagaggcagacactgaaagtctcagatggaaatgccgaactcacccgtcttctgcgtcgctccaggtaccgaggctcgacttc

SEQ ID NO: 619240 - DNA, 201 bp, Homo sapiens
ggagctcggtcccggttagagcggtctcagagcacagcaacacattatcgagccacgtcagtacataagagtaaagtaagctgattagtgatatggggatgggaaggggaaactcatatcaccactctttcctccatcatgtcgtatttttttttttttttggttttttggtttttcgaagaaaaccgctttaacggggga

SEQ ID NO: 619241 - DNA, 234 bp, Homo sapiens
catgctgcatgttactcatcagtatccccagcgaaatttgccctgggggaatttcgttctggatatcgattaggatagagtgcttgcttggccatgttggtttccttgtgagggttcgatgcagttcagtatcctgagcagacgcggcgcctggggattggccgcaccgacaataacagagggaaaactgacaatggcgatcgtcgagctcggcgtgctgatctacagcggtgc

SEQ ID NO: 619242 - DNA, 132 bp, Homo sapiens
tttttttttgacagtccacatttttagggccccaagacatgcatttaggaaaggtacgtgttcatcaggacagctagcaccatggcacaagatcggaatggaataaggcagggaaagcagacacgtcctagt

SEQ ID NO: 619243 - DNA, 492 bp, Homo sapiens
  misc_feature (6)..(6): n is a, c, g, or t
  misc_feature (87)..(87): n is a, c, g, or t
  misc_feature (91)..(91): n is a, c, g, or t
  misc_feature (95)..(95): n is a, c, g, or t
  misc_feature (105)..(106): n is a, c, g, or t
  misc_feature (112)..(112): n is a, c, g, or t
  misc_feature (115)..(115): n is a, c, g, or t
  misc_feature (124)..(124): n is a, c, g, or t
  misc_feature (132)..(132): n is a, c, g, or t
  misc_feature (306)..(306): n is a, c, g, or t
  misc_feature (386)..(386): n is a, c, g, or t
  misc_feature (487)..(487): n is a, c, g, or t
ggcctnctgcgagggttacgttaggtcaacaagtagcgtatgatgcaattttacatttattaaactacagttcggagccccaatttncacnttcnaaatacgctnngcgttntcntatggagtnacactggncttctaacatttgatatatctgggtgaaagacatgaactttacaaggctttaaacacaaatcctgtagtatgaaaactgtgttcttgtatgtcaacgatttaatggggaaccaattaatgggcttccatctccactaagtgatccattttgttgcatattttattttaaacgcntaaggggtaggacaaactggtaggtttaaatctggatacattatctaaatctcccattatccccaatgaattatagatgnaagctgattttgtctggtcccaaatagctattactaatagtttttgttgccaaaagaattaaagagaataagattgtttaaattatttttccacactggantgttg

SEQ ID NO: 619244 - DNA, 361 bp, Homo sapiens
cagcggaacaagcaagccaagaaataaaaagacaaaaatccagagttgaggctgggctttgaggtttcttttccctgaggagggtctacagcttctgcaagatgtagttaagaggttgagtggagctcatgagacacatgttggtgctcggggcctatattagttgcctgtagctgctgtaacaaatgaacacaaatgtggttgcttaaaacaacagtcatttgttgtctcgcagtcctggaagtcgaaagttggaaacaggtctcactgagctacagtcaaggagttggcagggctgtgttccttttggaggctctaggagagaatgcatctctttgcttgttccgctggtaccgagctc

SEQ ID NO: 619245 - DNA, 112 bp, Homo sapiens
tcccttttaagtaagggggtctttttatggataacttcccaacagcatcggtaaccatcgggtacaaaaatatcccattaaactctttcccgagggggctccgttggctcca

SEQ ID NO: 619246 - DNA, 110 bp, Homo sapiens
  misc_feature (75)..(75): n is a, c, g, or t
  misc_feature (107)..(107): n is a, c, g, or t
tttggagacctccaggattatttctctgtcagccagatgcccaagttcaagtcattagtgatatgtggcagggcngacagagaaataatgacttgaacttgggcatntgg

SEQ ID NO: 619247 - DNA, 150 bp, Homo sapiens
ggtgcgacttccaacatcagaaaccattcgatattagatcgtcgtgctagtaaaaacctaatctcggccgggagcagtggctcatgccatgtagatcccagcactatgtgggacggccgaagtgacaggtggatcacgtaggctcagaga

SEQ ID NO: 619248 - DNA, 154 bp, Homo sapiens
gggtataaagaacgagcaataatggagaatgctgtgtgatgaggaagacagatatatgaagtaatgcagctgcaaatcaaagaatgccaaaggttgccaaccactggcaagctaggcaagaggcaagcgaaggactccccttacaggtatcaca

SEQ ID NO: 619249 - DNA, 258 bp, Homo sapiens
ggaggatcagctggagccggacactgccctgcgaacgctgctctttaaagtacacatggcagagagggcctctcccagattacactcagtgtttgctagtgctgccaccttcaatctcccagtgacccagtgcccttacacccaacagatgcggccctttcaccacaaatgagcctgcttggatgggcaacggggacatttgcacatggtatgcgctgcagcagcgctgacttcctatcctctatagcatggcgtgcc

SEQ ID NO: 619250 - DNA, 1314 bp, Homo sapiens
  misc_feature (931)..(931): n is a, c, g, or t
aagtggttcctccctcctcgtagaatgtggggacacccccagtgttccaaccctggtggtggaaaaatggtgttaagaaagacgccccccggaggaatgttgctccagcccccacacgaaatttttcctggacaacacacaccggagagtttttttcggcgtccacctgaagagccttcttttgggttaaaaaaaatgtgccacaaaccgttggtgggtggccccctcacacacgtgtttttctcttcgcgggaaatatagaacaccccctcgggggtttctcccctcgcttgggaagagggttgtcccaacaagaagattctcctgttgagcagcgaaaaagagtagcctcttctgaagagaagagcccctttcttttctcctgaatattatgatagagagggagagagagaggagaacacaccaggggagggctctaccctcaatatagagagagatatgagatatgcccgcgaacatagagaagtttctttctccctctcgcgagagctctctcgtagagagagaggacgaaaaaaatatgttggtgagaaactctgacccaccccaacaaaggccccgcttttatatgtataaaggcacacctctcgtgagattgagagagaaagagattttgtcccacacaaataaatatcctacagagaaaggtgttttctgtatagaccacacaagcgtcacacaagcgcccacacaaaaaaggtgtgttacacacacacagtttcacagagatatatattccacaaagcgtgagactggagaggtgagaaacaaagagatatatttcgccacacaacaacccgtgagaagagacacacacacagagaaatcacacacacgtgtgagaagagaagaatgtgtatagagatgacacacagagagacacaccccttctcacacaaaagggagaaanaagagaagccgcgagaaggacacacacacaagtgtgagaagagaggagacacacagcgagacacacatgttcacacaatataaaggctctcccacgcgggcgctctatacactctcacacaaagagaccgcgagagggcgagagtcacgtatcgagcacgccacgcgccgcagaaaaaaggttgtgtgttgcgcctaactatatgagaaacacacaccacaacgtgagaaaaatataggagacacacaggagaccacaaaaatgaaagagaccacaatgagactcaagagagggaccacagaaacacaccaacgccaaaaaattccagaccaaagccagtaaagtttaaaaggtttttattaaattataccaaaaccggccag

SEQ ID NO: 619251 - DNA, 436 bp, Homo sapiens
gtgtaaggaactccatctgcatcattaactcgtatcatgaccagaagccatgggcacaggtgctcaggcacgttccaggcaggcttccgcttgtagctacaggatactcttccctcaggcgagcagataaggactgcaggacggtatggaagagacaggaacatgctcccctgggcacatctgaagagtcccggacaggcaaacaagccacatgggacaagggtcacagcagcagcctaggggccagtcgctcgacctaaacttgttctttcagctacagacgaaagcttaatcacgtgcaatctatgccttgggactctttgcagcactctgcggggcatgtgtcacagaactctggctgtaaacagatacacaaacatcttcagactggatacatttttccaatacttgttgcgggtcggttttaaagcatgta

SEQ ID NO: 619252 - DNA, 129 bp, Homo sapiens
gagctcggcccggcttttggggttgcgaaggtcaatttcttcatgtgccacattgaggtccccacacagcacaaggagccgaggagcaggagaaacaaatcgttaaaacctagcgaattccccaacgag

SEQ ID NO: 619253 - DNA, 722 bp, Homo sapiens
  misc_feature (181)..(181): n is a, c, g, or t
ttctacaaataacaattgtcctcatggttccccgcgcacaatatatattccacccactcgaaaatcttttagtatccaacatctttccgccccctccccctaatatgggacaaattatttctttttcgctctctcaatattatggaaaaaaatgtatttttcaccaccgcgccccccacanaatttaacacacatgtgcctggtgtattattttggtaaaagcaacaacaacagtgtctccgcacatcataacatgtgattaaatggggcggtgcaaaacaagtataaaaatagatgtttgttctgcccccacgcggctgatgattttctcggaaattaagacaagttgcaccaattaacgtggcggcactcccccgctaaaaaatttgttattgccttttcctctccctctattctcggatgatatacatcatagggggtgatatagcgcgagacgtctctttcttcgcaaaggaaacacctctctcccacactttggtgtgagaccaagaatactgcggaactgtaatatttctgtgaaaagaggctcccacagcgtggtgttaactctagaaagatagatcttatatgggacgacgcacacgtctgtagagatgtgaggataactcgaggcacttcttgtatgtcacgtggcacatattttttaaccatgagacttatgctggggaagctgtgaatataaaaaatgcctctttaacccc

SEQ ID NO: 619254 - DNA, 879 bp, Homo sapiens
agatcacttgaggtcaggagttcaagaccagcttggccaatatggtgaaaccccgtctttactaaaactacaaaaattagctgggcgtggtggcacgtgcctgtagtctcagctacttgggaggctgaggcaggagaatcgcttggacccaggaggcagaggttgcagtgagctgagatagtgcgactgcactgcagcctgggcaacagagactctgcctcaaaacaaaaaagctctataaatttcaggtgtgttattaataatgaaatattaaattatttcttagggccaggcaccatggctcatgcttgtaatccccacactttgggaggccaaggcaggaggatcgcttgagctcaggagtcaagaccagcctgggcaacatagtaagacctcatctctaaaaaaaataaataaactatttcttagaaatgtagttcctgtttagacctttgaacaatgaccatgtctagtggtctctccatagcacatgatgtctacaaactgttcttattttcattactaacagctacaaaataactataaagtagatcataaatatgcctatgttaatatgtctctagtgcttctacttctcatgtggaatctaactcactatgtgcaagagcttcttgggctggcatttattctgcccttttagggcattgcaacggccttcaggcttgtgacttggcctgttacttaactctcgcgctcagtggccctgtacaccgcttggcacactgctgtttccgcggctggggccccctgtatcccccttgggcgttgccgggcccgcccgcgtctgccccggggccgggggcccctaaccaaggggggggcgcccccccccggggggggccggcgttcgtctctccg

SEQ ID NO: 619255 - DNA, 781 bp, Homo sapiens
  misc_feature (103)..(103): n is a, c, g, or t
  misc_feature (139)..(140): n is a, c, g, or t
  misc_feature (182)..(182): n is a, c, g, or t
  misc_feature (192)..(192): n is a, c, g, or t
  misc_feature (201)..(201): n is a, c, g, or t
  misc_feature (203)..(203): n is a, c, g, or t
  misc_feature (206)..(206): n is a, c, g, or t
  misc_feature (209)..(209): n is a, c, g, or t
  misc_feature (215)..(215): n is a, c, g, or t
  misc_feature (296)..(296): n is a, c, g, or t
  misc_feature (301)..(301): n is a, c, g, or t
  misc_feature (309)..(309): n is a, c, g, or t
  misc_feature (324)..(324): n is a, c, g, or t
  misc_feature (381)..(381): n is a, c, g, or t
  misc_feature (616)..(616): n is a, c, g, or t
  misc_feature (634)..(634): n is a, c, g, or t
  misc_feature (648)..(648): n is a, c, g, or t
  misc_feature (684)..(685): n is a, c, g, or t
  misc_feature (691)..(691): n is a, c, g, or t
  misc_feature (693)..(693): n is a, c, g, or t
  misc_feature (700)..(701): n is a, c, g, or t
  misc_feature (760)..(760): n is a, c, g, or t
gccaccgttccgccgggccatggggccgcgcgtgtgcagccgcgctgtgctgctcctgtggcgctgctgctggcgcgtgcgtgcggtgccgaagaggctcgcnctgcccccgcgattcacgttgtcgccgccgccggcnntgacgaacgggagccagccgggcgcgccacacaacagcacgnacacggtccnccgggggcntnggntcngcgctnacgcgtccttctacgtgatcctgggcttctgcggcctgaccgcgtctacttcctgatccgggcgtttaggttgaagaagcntcagnggaggcgntacggcctcctcgcnaacactgaggaccccacggagatggcctcgctggacaggacgaggagacggtctttnagtcccggaatctgagatgatgctgagccagggaggcggcccttccagcagccatgagggaaggacaggagatggggcccacccagtgcccagcaaccccctgctccaccactcattcccctgctgggcccggggctggtgtcacccagtgccaacccgagagctccttttggaacctgcacagcccgccgacctgttgccacctgcacccaccgctggaccatgcagcctcgcntcctggatgctgtcccancctggccgagggtnccaggtgaagactggagggaccccaacagccaccgnncaggangntgaggcnnccttgcctgactgtgacttgtgctcttctctctctgcccccgtggggacatggcagccnagagccaagggggggtgggag

SEQ ID NO: 619256 - DNA, 103 bp, Homo sapiens
catacactgcaactagtctgtctccatatcacgcaacagaaagcgaacccaaaggtggatagtctgagaagctctcaaaacacatggggcttgccaggaaaca

SEQ ID NO: 619257 - DNA, 996 bp, Homo sapiens
tgggccctccctttctctggggaaatagggggggggcgaaaaaattcgtgggcatttgggggaagagtttcctctctctggggagctaaggggggctcttcaaaacccaaatgggctatgaactccgcgccctaaaggttgtaagatgggcttggctccccgggggattttcccccgtggttaagcacgtggtttttcctaactccagatattctgccggggtaaaagaaggggggttgggctttaattccacctcgcggggaagagggggacacaagtcttttcggccgcaacttctttcaaaaattgggggtggtctagacaagctgtgggggagggggccacgagaggggcgtggaggtctccaaaaataaaaaaaacaccctcttgtgtgcatcgagaggagttttggggcacacaagcagaggggggttctgtgaaggagagctgttttcaacagaggaagaacggcgacattgtgtcatgaaggtggagctggtcggtcatcttgaggagggaccgagaagaatgatggtacatataggtggcgcccaagaatattgggggaggggggaggaagaggtgctattgtccccccgtggttacaagagagtggagggagaacaacgggggcacatcaccacaatatagtgtggtggcccggacaacgaacggggtgctcttaaaggaaaggcgggaaacaagcaaggagcggcgaaaaaaacaccatgaggagcgcataattaaccagccgcagaatgtgggatcaggggaaacacccacgatagaggaaaccgcgcgatttaggagacaccgcgcagtcgcggggcgacccaaggtgtccaataacaccccctcgggggtgaaagccgcgaagccccagcgacctgtgctccggggagaaaagctactcccacttgcgggaggtggacacaatatggtggcacgggatacatgtggccacaacacgagggggtgaaccccatagaggtgggg

SEQ ID NO: 619258 - DNA, 190 bp, Homo sapiens
gtgtctgactgctctctctccccgacgtctggtgagccacgtgacaataaaggcaaaagggtggggtctaacagctggttgtggagctgagccctggaaagccctcttttgaaagtaccttctaatcaaagccacagacccagctcccaaacagaatagtgactcacagaccaagactttgaagcttttg

SEQ ID NO: 619259 - DNA, 750 bp, Homo sapiens
  misc_feature (660)..(660): n is a, c, g, or t
ccgcccttttttttttttgtttacaaacccggttctggggtgggtgtgggtataatactaagtggagatgatatcatttacgggggaaggcgcttggtgaagtaggccttatttctctggtcctttcgtacagggaggaattggaagtagatagaaaccgaccgggattactccggtctgaactcagatcacgtaggactttaatcgttgaacaaacgaacctttaatagcggctgcaccatggggatgtcctgatccaacatcgaggtcgtaaaccctatggttgatatggactctagaataggatggcgctgttatccctagggtaactggtcccgtgggtcaagttatgggatcaatggagtatagtagttcgcttggactgggtgaagtcttagcatgtactggctcggaggtggggttctggctccgaggtcgccccaaccgaaatttttaatggcaggttgggaagttaaggacctggggggttggtcaaggtacggttggcattaataaattaaagctccatagggtctactcgtctggctggtgtcatgcccgcctcttcacggggcaggtcaatttcaccgggttcaaacagtaagagacagttgaaccctcgtggagccattcatacgggtcccaattaggacagtgttntgccccttggccggtaggtccgcggcgtacattgtctgggcgcggcctaatctgggaccaggagtttggaccggcgcaatggggctcaca

SEQ ID NO: 619260 - DNA, 764 bp, Homo sapiens
ggaattgaaagaaataatttttggaaaaagaaaaactccaagggtagctgttggcactttcagagcatcccatattttcaggatgttttgtatgagataaagtaaatcagttttgtttgacagggtgtagtgtgcccagccaggtcattattttaaattgacaaaatgatttaaatgatagaagacattgtatattcctgaaacaataaatacctattaagtacattttgatacagtggagaagtacagatttttgttatatagtttaaattatttattgggataatgtatataacgggttaattcaacactttagtgtttaaatactcatcattcttataataggtgcacaggttcataaagatagttctctcattatgattaagaaatacaactaagtggtgaagtggcattaaagttagaagcttcaaattcttcatcgagggtttgagggtggctttttaacaaagaaacttgggtaacagtaggatgatagaccagttaggtttcatgaacgttcagagcttcatatcttggcttttcacaacctagtagatacagagtaaataactggaagaatactagagtagaaagaaacccttttcctgaataaggtgtcgaggatcacaagggggtcaggcttaatcaagaattttagagactaggccaggccggaattccgcacttggggagccaggaggtggatacctgaaggtcggagatcaaaccacctggcggactgggaacttatttgcggaatatta

SEQ ID NO: 619261 - DNA, 307 bp, Homo sapiens
ggacaatacttaagagacccctgaccctaaggaaatagactgcagcaccaatgggccaactttggggcgatcatcttgcccagaaacatcatgttgaaactcttggtcagaggttggatgaaagctgacagggtccatccaggagcaagtttgagccttgccagttccattttgggtgctgagttgagtcgcgactatagcaaacctgtgatctctggctgctgctcaaagaaacaagaggaggatgatatgtaaactctgatcatatctatctgagcttttgatcagctagcaccacatatcagct

SEQ ID NO: 619262 - DNA, 153 bp, Homo sapiens
cccacccttctgcgtgtgcccaagcttactgccgtaggggcggacacaggtctcgttcccacacccttactgtccggggggcttggggacgtgtggtacgaccccacgacacactcttctggggaccgtcacgtcactcgttacctacctact

SEQ ID NO: 619263 - DNA, 158 bp, Homo sapiens
gtcccgacctgggtgcgcggcgcgctggagccctgggcgtgaacggcgtgatcctggactacaacctgctggccaaccgctacatgacgcggcagtggcggcaacacggccagctacaccctgtacggcaccgccggcgtgaacctggggtaccgagc

SEQ ID NO: 619264 - DNA, 342 bp, Homo sapiens
aaagtaaaaagaaataggtgaaaataattttaatatgctttaacacaatatatctcaaatataatttcaacatgcaatcaatattttaaacatttagtgagatattttacattttttcacactaagccttggaatctagtgtgtattttgcacttacagcatttctcaattcagccactaaattttcatcaaaaatgctcaataagtatttagatttcaaaaagtttacagttgaaaaggtagagtcacatacccaagttgctccaattatacctacaaatttttaaataactaagtttagtatcaatttttaaatttacattaattaaatggaaaaaaaaa

SEQ ID NO: 619265 - DNA, 210 bp, Homo sapiens
atcacttgagatcgaaggaacgaaaatgagcctccgagttttccggacagacttatcacagccataagatcccggactcataccagctcagccggatgactactacatcctggcagacccatggcgacaggaaatgggagaaaggtgtgcaggtgcctgccggggcaaatgcgcatcccagagcccgtgttgaggatcctcccaccagtg

SEQ ID NO: 619266 - DNA, 582 bp, Homo sapiens
  misc_feature (487)..(487): n is a, c, g, or t
  misc_feature (489)..(489): n is a, c, g, or t
  misc_feature (542)..(542): n is a, c, g, or t
gttttaaatcaccccctccccaataaagctaaaactcacctagattgtaaaaaactccaattgacacaaaatagactacgaaagtggctttaacatatctaaacacacaatagctaaaacccaaactgggattaaataccccactatgcttaaccctaaacctcaacaattaaatcaacaaaactgctcaccaaaacactacgagccacaacttaaaactcaaaggacctggcggtacttcatatccctctacaggagcctgttctgtaatcaataaaccccaatcaaccttaccacctcttgctcatcctatataccaccatcttcagcaaaccctgatgaaggctacaaagtaagcccaagtacccacataaagacgttaggtcaaggtgtaacccatgaggtggcaagaaatgggctacattttctaccccaaaaaactacgatagcccttattaaacttaagggtcgaaggtggatttaacantnaactgaaagtaaagtgcttaattgaacagggacctgaaccgcgtacacaccancccttaccctgctcaaatatacttcaaaagacatttaact

SEQ ID NO: 619267 - DNA, 295 bp, Homo sapiens
ttcgtgaaacccgacttcagtaaaatatggggagaagggaggccttagcgcaagcaaaattgtcaaatagcccgcgcaaatccgattcgactacttcgacacggaggttcgttttggcgagagaccatccttgagtatgtcccaaaacctaattttttgactttcgtcccctggggcgaaatttttggcaaaccgaaattttctatcgcacgtagaaaaaacaagagcgctggatccgtccagcgctcttcctttttcccttttgggaaattttttaattcttcgcgttctggca

SEQ ID NO: 619268 - DNA, 168 bp, Homo sapiens
ccagcccccttggcctgccatgtgtttctgccgcaaaccccctttagatggggagggaagaagaaccttcagtggaggggacatgacccccccctatgggcataaacgaaagcgccccattttcttcgtatccctcaacccggaaatcattacggggttttcttttta

SEQ ID NO: 619269 - DNA, 1190 bp, Homo sapiens
  misc_feature (260)..(260): n is a, c, g, or t
  misc_feature (319)..(319): n is a, c, g, or t
  misc_feature (387)..(387): n is a, c, g, or t
  misc_feature (556)..(556): n is a, c, g, or t
  misc_feature (639)..(639): n is a, c, g, or t
  misc_feature (663)..(663): n is a, c, g, or t
  misc_feature (682)..(682): n is a, c, g, or t
  misc_feature (710)..(711): n is a, c, g, or t
  misc_feature (713)..(714): n is a, c, g, or t
gaagttgatcgaggctatatgtctccatacttattaatacatcaaaaggtcagaaatgtgaattccaggatgcctatgttctgttgagtgaaagagaaaatttctagtatccagatccatgtgtacctgctcttgcaaattgccaatgctcaccagttaagccttgtggtcataatcggctgaagatgttgagtggagcaagctcgtaagtacactctgtcttgaagtaggctacaaggtttggtcttcaaggttgtggncagtccaaggctccaggggtttggtgacaatacgaaagaaccaagcttaaagatatggnctattgctactggtggtgcacgtgtttggagaagagggattgaccctgaaatctttgaagacgttcangcctcatggacttagcgaaaagttggagaggtcattgtgcaccaaacgacgggatgccatgctcttaaaaggaaaacggtgacaaggctcaaatttgaaaaacgtattcaacgaaatcatttgagcagttacgatgtcacaactagtgaatagtgaaaaggaaaaactngaatgaacggcttgcaaaactttcagatggagtggctgtgctgaaggttggtgggacaagtgatgttgaagtgaatgaaaagnaagacagagttacagatgcccttnatgctacaagagctgctgntgaagaagtttttgggttgtaagggggnngnnccccccccccctgaaaaaaatcccccccactttttgcttccttgtggcccctgtctccccttggctcttgcggggtttaaggcgcccttctcgttctcttgcccttgtctgttgtttttgttgctcgtctttcttgggtctttttttttttgggcgcttttcttctcccctcccttttttggtggtttggttcgctccctcagcggtttgcccctttattcggtgttctttcgttttttggcttcttggggggcgtctctttttcttctttcacgttctggccttttgtcttttctttttgctcttttttgtgttcttgtcttctgtttttcctttttgttgcttttcttctcctcttctttctttgcccgccctttgttttctttttctccttgtgtcttctttcttgcttgctttttctcttttcttcttcctgcttctgttgcgcctctaattttaaagaataaaaaaaaaat

SEQ ID NO: 619270 - DNA, 105 bp, Homo sapiens
tctgactcagtatcaccacttgctccaactgtggataaggcatagcacggctggctgtttgtttccttaccagctacatgggtcaattttgcttgtagctgttgg

SEQ ID NO: 619271 - DNA, 527 bp, Homo sapiens
ctgtgaagaggagtctgatcttgtcccccaggctggagtgcactggcacgatctcagctcactgcaaactttgcctccgggattcaagcgattctgagtagctgggattacaggtgtccaccaccatgcccggctaattttttggtacttttagcagagatggggtttcaccatgttggccaagctgatcttgaactcctgacctcaggtgatccacccatctcggcctcccaaagtgctgggattacaggcttgagccaccacacctggcccattattacattttctaacagattttggctgtccttgtttacttgtttccctcaactttttttcccaaacagacagggtccctcactttattgcccaggctggagtgtggtggcacgaccatagctcaccgcagccttgaactcttgggctcagcctcctgagtagctacaactacgggtgcatggcaccatgctcagctaatttttattggctgtagggatggggtcttatgttgcctgagccgtactccaacc

SEQ ID NO: 619272 - DNA, 461 bp, Homo sapiens
  misc_feature (41)..(41): n is a, c, g, or t
tctcggttaaatgtctcccagagaaaactcaacactgcccnacctggccataggcccttgaccccctttcttggagcatttacaaaaaaagagcttacaattgtgagtccttcctctgtccccttgacacgtatgtgttctctcctacaattcaggagtatctttcttaaggacctgaaagccattcctttgaaatttaatcatctggaaggttgctatctcccattcttggtgggagggtagaatcctgacttcagtgataatcgccagctagctgacgcagctgatctaatcacttttatactgacagactttgaaatgttttgcatgtattccggctctttccccctcccttattctctctttaagctgctcaattatctctgcattgaaatggaacgctgctctttcccctactgttagtaattactgaataaaattggttttcaccactttaaaaa

SEQ ID NO: 619273 - DNA, 280 bp, Homo sapiens
cttccctagatccttttctccatgatacttactgagtagctacactgtagaggcagtgttctaggccatctctcatactacatagtttattagatatatctcattttttgacctctccaagctggaacataagctaaattatttcaagattttggttcgttttgactcttctccctatgccttatcttcatagccctgtatattcgtatgagttttaattaaatatttactctaaggaataaattcattctctccgtctgtgactcttgccttttcctgg

SEQ ID NO: 619274 - DNA, 424 bp, Homo sapiens
  misc_feature (11)..(11): n is a, c, g, or t
  misc_feature (13)..(13): n is a, c, g, or t
  misc_feature (216)..(216): n is a, c, g, or t
  misc_feature (268)..(268): n is a, c, g, or t
  misc_feature (305)..(305): n is a, c, g, or t
  misc_feature (321)..(321): n is a, c, g, or t
  misc_feature (328)..(328): n is a, c, g, or t
  misc_feature (384)..(384): n is a, c, g, or t
  misc_feature (393)..(393): n is a, c, g, or t
agacacatctntncttcattcatatatgttaatagatgaagcatttttcctgctgcatattcctgaatagagttgctgaaagagtctacttctttactcatgggaagttgaaggccattctgtgtataaaggctgaggcaacggggaaagacctgacagctagttacataccctctgacatattactcccatgatggccttccattgacacatgtnctgatagaattctaaacctctggaatttccctgctttcaacttctatggccnttgactgtacatggtaacctgatgccatatgctatgngccttattagaactanatcattncatcatggaggatactgtgaggcaccatatccttttcttcttgcatgcattttctnaaacccctnttatgaaagttggatttggcgtaacttgctt

SEQ ID NO: 619275 - DNA, 544 bp, Homo sapiens
ccctccctttttgtataatttaataaagaaatggtcgcgcaaaaaaaaaaaaaaaaaaaaaaaaaaaaaaaaaaaaaaaaaaaaaaaaaaaaaaaaaaaaaaaaaaaaaaaaaaaaaaaaaaaaaggggggggggccttttatatttttctgggggggccgttcgcccccgttttttttaaagggggtcgctactcaatatgtgggatgtttattatatgaacaaggggcacgggaagggggtgtttaaaaaaagtgggaaacgagggagaaaaacaaccgtcacacttgcatgcagtttttcttgtgaaggaaagcaacaaccactctattagcgaggggggggacgacattaagaggtgggaacaaactccctcgtcataaagaattgtttctgacggtcataggaatttaataaataattatttggctgtgtagttaatgatggtgtataaaagcgagtatttgtgatgggagaaatatagatatgtgctttcggggtgatgtatataataattattttgaacaggcaggattttaattgg

SEQ ID NO: 619276 - DNA, 241 bp, Homo sapiens
tacgtgtttctactcagggtaataaatagtgttttcctctgacatgtttccaagttatttgtaaaaggcaactgcagtggtctcaatacgttttctttttttttggagatagggttcttacttggtcacccagactgcaatgcagtgacgtgatcccaaatcactgcagctttgaacttctgggctcagatgattcttctccctcagcctcccgagtagctgggactacaggcacacacta

SEQ ID NO: 619277 - DNA, 1003 bp, Homo sapiens
taaatattatactagcatataccatctcacttctaggaatactagtatatcgcgcacacctcatatcctccctactatgcctagaaggaataatactatcgtctgttcattatagctactctcataaccctcagagcaccactccctcttagaccaatgatggtgcctattgccatacgtagatctctgccgcctgcgaatacatgctggtgggcctagccctacatagtctcaatctccaacacatatggcctagactacgtacataacctaaacctactccaatgctaaaactaagtcgtcccaacaaattatattacgtaccactgacatgacgtttccaaaaaacacataatttgaatcaactacaaccacaccacagtctaattattagcatcatccctctactatttttcaacccaaatcaacaacaacctatttagctgttccccaatcttttccgtccgagcccccttaacaacctccctctcctaatactaatctacctgattcctaaccctcacaaatcatggcgatgccagatgccacttatccagatgaaacattatcatgaataaaactctagctctcctatactattctcccgtacaaatctccttgttataacattcacgagccacagaagtaatcgttatttatatagcctcttacgaaatccatcacttatcccgaccatggtatagtcaaccgaatgaggcgaacagtccagaagcgtgatacgcatgacatgcttcctatgctacacctagtaggctccttcctatcgttgcctatttcatcacatcacctaggttatagcatctatactactctcagggcagagttcaactctgagcacactagatgaagctcaatagtgtagaagtacctgaagctcatgtgactaaagcggacccacgggcaaatgggggctgaagggtggaacccaaatacgggagatacccttgactagtaagcggaacatttggccggcacgctccta

SEQ ID NO: 619278 - DNA, 324 bp, Homo sapiens
ttatctaacatcactgacctctatcattaacattctcttaataagaatatatttgcttccatcccacaggttaggttccgagagcatgtcctaactttttcccttttttaaatacttcccttcttgtttgtacttgaatagtgaactaacaccaccctcagggtaattactgacatgattcataactaagcaacataacaaattccaactgtaatataacagtgaacactgcccatacttaacaatgctggagtcccatgatgccttttccccctgaactttttccattttgagaaggtgatgggggaggaggggtgcctcaag

SEQ ID NO: 619279 - DNA, 770 bp, Homo sapiens
tggatggtatttccaactatatatcctatagaaaattgctatcttcatagggcacttcaacacattgtggcctccatagtcaaatgaatatggaacagcagtagagggagagacccatttctttatgagctgcatcattcttaatctaattcaatcttcattggatctttgacgaaactttcttcacatagtgagactcattaattctcgtttattatttaaactatcatttaaaggaggcacactttacttgtgatatgagcgaaacttagctatgctagggactaatatttatccatcatatttattacctgaatatccgttcaaaacaattagaccggatgctttatagacctttatttcagcgctggacttggatattacccggtgtctgtttaaacattcctcaatttttgcaaaagataagctgccgattgttttaaaaattttagattggcgttttgccaaagttaataattggccaaaaaaatctccttttaccatcccgcgtgaaattgaaacttccaatagttatttttggaaacactccaaaacgggttgactaaggaccttattatgttgcgtgagaacgatattccccttggcgggggctttagcgaatggtaacaaatgggtgtgcgcaaattttttaaaaggtcaggggcgtctttttcctggtattcctctgtagcacgcccaaagaacaccttggagaacccttttcccctttaattatatcctagagcacaattaggtagggcttgcgcatt

SEQ ID NO: 619280 - DNA, 128 bp, Homo sapiens
aaaccatctccggcattacaaaagatgaagactgtaatcctcaacccgttcctcagagcaacttggtggcaagggagtgtctgtctgctgtcagaagcggtggtggagatggcggctcctgtgctgag

SEQ ID NO: 619281 - DNA, 177 bp, Homo sapiens
  misc_feature (18)..(18): n is a, c, g, or t
  misc_feature (53)..(53): n is a, c, g, or t
cctgtatataaaaaaatnaaaattacaaaaattacctgcatgcacctgatggncccggctacttgggaggctgaaataggagaatgtcttgaacgtgggaggtcaaggttgcagtgagccatgattgcatcactgtgccactgcactatggcctgggtgatagaaagacccagtctc

SEQ ID NO: 619282 - DNA, 521 bp, Homo sapiens
cacgaggtcaaagtcagtctctgttcaagggccctctcatctctgggctcctggcacccagcactgaatgtcactgatgcctggtattaattcttcaggatgactcttagcagaactcacacaaggtcctggagacccagagatgcctttctgaggtttattgcttcacctctctctgcctgcatcagatagaccctggtataaagaggagaaaagagtgattatgtttcaaaattatctacagaacttatttaaattctggatcagttgactttttttttttcctcatatataaaaaccttccaacttgtttctgtaggtaggtgacacttcgtttgatctgccggaagcaaatgtcctcattcagatctcatcccatggtggctccaggcgtcaggaagcccaaaggctagggcgggtgcttcgagctaaaaaaggtaaagtggcctttcatcttctgttgcaggaggtcactcctcttaaaccactttagttaggaagacgataggggtgagagctgc

SEQ ID NO: 619283 - DNA, 245 bp, Homo sapiens
  misc_feature (49)..(49): n is a, c, g, or t
ggcacgaggtagttccagctactcgggaggctgaggcaggaaaattgtntgagcccaggaggcggaggttgcagtgagcggagatcatggcacttcactccagtttgggcaccagaacgagaccctctcaaaaaaaaaaaggaccagggcaagaaagccacctctaactgctcctttccacatatactggaggtcctttctattgaattaggcaaggaaagggaaaaacgggtatacaggttgag

SEQ ID NO: 619284 - DNA, 383 bp, Homo sapiens
cgtggaggtgtggttcagaatgatcacgtgcatacatttatgtgcactttatttctattgttattacgttataatatgtaatgaaataattataggactcaccataacaaagaatcagtggaagccctgagcttgttttcctgcaactaggcagtcccatctggggatgacgggaaacagtgacgtatcatcagaaattagatttttataaggaacatgcaacctagatccctcgcatgggtagttcacaatagggttctcgctcctattgagaatctaatgctactgatgatcgacaggaggcagagctcaggcggaaatgcaagcaatgggtagcagctgcaaatacagatgaagctttgctggctagcctgccacaacct

SEQ ID NO: 619285 - DNA, 372 bp, Homo sapiens
gacatatctccagagtggatgacaaatcccatgcagtctggtctgcatgtcaaagtgtccgttaaaagacatagacactcacttcatatatggtggaccaccataagtcctgatacaaccacggatgaacagtcaggagcaaggatagattactttcattgttccggtcttctccttgggggtcacccgcactcgatctccagtgagctgcacattgggtggtgtccactgggcgctcaggcttgtgggtgtgacctgagtgaacttcaggtcagttggtgcaggcatcgtggttcctgcagtctgcaccagaggctgactctctccgcttggattctgagcatagacactacccacatactccactgtggg

SEQ ID NO: 619286 - DNA, 695 bp, Homo sapiens
ttcatccctcctccctaactttccccccacgactattttatccgctcaacataatgtcactccccgcaccacaagggttcttctcacactcaacagagagcccattgtcagacatcatgtgtgtgtccccaactggcgcacacccacatctgccgacgagacatatacctttttgtggcacacacaccccacacccctccgccactttatgttttgtatccctgactggcaaacacaccccggccagaggtcctatctttgagcagtcgtttcgacccccgcgctacatagttttctacctaccccccacacaccacagaactagataatcagttctgattacataataatcatcatcattggtctccccccccccacacatacctctatacttgtgatcgctcccaccacacaggccagattcagtaaagcgcctcaccccactgtataaaaatatactttctctggcagaagcgggctgtagctgccttccccacgcctcctgcgtacgccggcgggtcttccccgcccctcacgaagatgggaaataggtgcgcacgacggttatcgccgagcgagagccggtccacgcacaccaacggagcaacaacagaggcgaacaagaacaatacacgaggaaatacaaccaaacacaaaagacaaaaaaaaaaccggaaaataaaatagaacgagac

SEQ ID NO: 619287 - DNA, 284 bp, Homo sapiens
accccactgatattcgtgtcaccattcatccatgaagtatgaatgggcgatgctctgtgttcatgtgaactcctcaatgctggctggccaaccatgtgcctgagccacttctgcatgacgcgtgcgttgaacttcatgcaggtctgtttcaggcaggcgcttacactcttcccagaggcccatcatggtctcattgcacactcctgtgagctccttcagctttgtctctgattccctggtctcattttgaccgaaatatcgtggggcatcctctaagagtcgac

SEQ ID NO: 619288 - DNA, 555 bp, Homo sapiens
  misc_feature (6)..(6): n is a, c, g, or t
  misc_feature (130)..(130): n is a, c, g, or t
  misc_feature (133)..(133): n is a, c, g, or t
  misc_feature (165)..(165): n is a, c, g, or t
  misc_feature (223)..(223): n is a, c, g, or t
  misc_feature (385)..(385): n is a, c, g, or t
  misc_feature (446)..(446): n is a, c, g, or t
  misc_feature (452)..(452): n is a, c, g, or t
  misc_feature (535)..(535): n is a, c, g, or t
tgtggnttttcaaaacgttcacacattttaatgtttcgtcgatgtttttaaatagtacttacagggagggtggtacagagcaaaggcccgcaggccctcgtagcaccgcagttcaggtaggatgctgggnggnggggggtggtggagggggttctatttacagtntttgggctttgacttcacttactgtgggttttgttttcttttttaaaccttttccttnaagtttgggagcctgtggagggcctgtgaccttaaaggcaaggtttccttgtttgcaccaggaagataaatgttaaaccacgaccccaggggctgcactaggcgttgggcccagaagcccccggccatccagccccgactcttttatgccttttcccctgangaggggacccagggtaccctcaaggggacatagaagggaggctgcatcctagtacagtttnaaagtnaggggggcgctgcaggagcctggacaggaccacctagcccagccagggacaggagggtgagaacacctggaacaaaggcacanaggctggagaaaaggcggca

SEQ ID NO: 619289 - DNA, 898 bp, Homo sapiens
aatcaacctgtggtggccccttaaaatagtggggccaccctgttattggatgggggcgccccaacgaggggggttcatcagcgggttgcttcctagcagctgttgttaacccaccgggggtaatttggacactgtctccccgtttagaaagaagcccggggctatttatcaccacgcccaaatattgctggtgtgtgagaccccctctatgggggagcgtcttaaaagtctttgatatgtaaaagcgcgccaccctcgtggtgttcgctgtaaccgaaaccccccacaggggggttctctaatgattggagccacaaaagcggctgggccattgttaagaaaattttttcggggtttgggggccgacaaccctctgggggagacaacgaacccctcaactctttccgagccacgtaacactcgactataggaagctttcacccacgcttctcaaggcggatctatcctataagactttcccactgtgattcgcacccagtaaaactgtgagcccccaccgggggaacaacgtctatacgcccatgggagttacacgcggcaatctctattttttatgagtgcccataagtcgacacacaataaggggttacgagcctccgactgtgtgggaaatcacggagcatcccgaatgcgtgcaccccgcctatattaaaagggtttggttttgtttcaaccgagattataaaggtccctaccgtgaattctgaggttcacgaccggggtaaaccacgggcggtttttatttacttcaaattcctccctgtacgaaaggacaagagaaataaggcctattttacaaagggcctttccccggaaatgatattatctccacttagtattaaaccccccccccccccaggaacaggggtttttttta

SEQ ID NO: 619290 - DNA, 519 bp, Homo sapiens
  misc_feature (62)..(62): n is a, c, g, or t
  misc_feature (69)..(69): n is a, c, g, or t
  misc_feature (117)..(117): n is a, c, g, or t
aaaaaataaatgaaattatgtctacagcttaagctgattggacttgtttaatgccaaatgtnctaatgngttcttagatgcctaaattgcagttcctgtagtatataatcctgctcngtatatttagttacgtatatgctttctgaggagaccttaatcatttggttaatcatttggcttgctgtttacccctctgtagtttttaattaaaactttaagatagtctacttaaacatgatcacatctaagctttatctttgtgtaatctaaggtatatcgtgagaaatcagaattggcataatttgtcttagttgatattcaaggctttaaaagtcattattcctgggcttggtaagtgaatttatgagatttactgctctagaaagtatagatggccaaaggaccgttttgtattgcttcctgattaccagtctgattataccatgtgtgctaatatactttttttgttatagattgtcttaatggtaggtcaagtaataaaaagagatgaaataatta

SEQ ID NO: 619291 - DNA, 287 bp, Homo sapiens
atcccctaggtggaaagcacgtattccttgtttggcaccgtgtactggtaggagtaccgctgcttgcactcttgtcctcataaacctgtgggcacaatcttcaggatgtagtcgtgggaggcaggtggttggaggtgagtctgtctgctcccccgagacgcattgaaagctccgtggatgttctggacctgtagcgtgtccccaaaggagagcttgtggattgaatgcgtcatgtctgggttctgtggctgggctggtggactgtgtgtggacacgtggaagtttgc

SEQ ID NO: 619292 - DNA, 220 bp, Homo sapiens
gcgattatggcagcatggtagctcaccctgtaataaagcatagggcagtgagcgggcagatagcttgaggttgggagtacgagaccagcttggccaacatggtgaaaccccgtactctgctgaaaatgcaaagattagccgggcatggtggcaacatgcctgtaatccccgctaccaaagtggcttaggcaggagaatcgctggaacccgggatgtgcat

SEQ ID NO: 619293 - DNA, 121 bp, Homo sapiens
ggttgttgtggaggccaaaatggcggctcaggcggcggcagcggcccaggcgtttggcggcccaggctgcacaaaccgctgcggccgacttgttgtacctggcgcttctggtcttcgctga

SEQ ID NO: 619294 - DNA, 194 bp, Homo sapiens
caatgtaaaaaaccctttttgacccattggcttaattttttcctagaaatgtatatatacatataaattcctttgttattaattaagcaaatggttcaaaaaggaatttatatgtatatatccatttctagtaaaaaatttttggaacccttgactacccaatattaattaaaatggctaatagttggaatcta

SEQ ID NO: 619295 - DNA, 611 bp, Homo sapiens
aatactatttgcctcgtctccgagagttgcatcatgatggccagtgtcccccggaaatgagtacagtggtgtcacactctgcacagaccccctggtaaagtcaacagcacacatgcactctaaatactggagccaggtgtggtgcacgcagttgaggtcccagctacttgagagacggaggcaggaggatcacttcagcccagcaggtcgagactgcagtgagctgtgatcacgccactgtgctgccgcttgggtgacaaagggagaccccatctttgttttgttttgttttgttttgttttttttgagatggagtctcactccagcctgagcaatagagtgagactctgtctcaacaacaacaacaacaaaaatattctttccttctttaggacagatttatagtagttttactgtatcatttctaaggttcttaaactgtgctaataaaattgttctccaaagattgtctccttcacctgtgtttagtaaggctggcttttgtcagaagccatttgctttgatgtttcctggtgcgtggcttggatcactgccctgtgtgtccctgggtgtgacccgtgtctggatcgttcagctatctgagccctaat

SEQ ID NO: 619296 - DNA, 582 bp, Homo sapiens
acgggagacttgagccagcttctgactgcattcagccctctctagtgactgcagcagcctctccccagcacatgagtcccccctcctttgtgtgtcccagcacccttgtgctgagtgctggggagatggccacccagctggacactgggagacttgatgcccagccttctgactgcattcatgccctctctagtgacatgcagcatgcctctccccatgcactgatgtcaccccctccttttgtgtgtcccagcacccttgtgcctgagtaaacttggaaagtgggctcccttccacagagaagggacatactcatcattccacccctattatatccatgctgtcctgacaccccaagaccaccacaaactcccaacccattgaccccctatgactccacatggagtagggtgaacagggcgctcagcaatgcgcgccacatggtcatgatgttgtagatgctgaagcatgtcaactgttgttctgatctactgtgcacatttacgttcacccactacctgcacaatccccttccaccaattcttgcccccttttactcatcaccctgatttagtaaactca

SEQ ID NO: 619297 - DNA, 699 bp, Homo sapiens
actctgaagaacgggttacggtagcatgttactcccccatctttgcggggctggagttcaaggttggacctggtgcttcaaattttgaatgagtgccacagaaaggcagcccagccctggtggaggcactgttacaccaggccgccatgcccgtccatctatacacatctaggatgacctcctccggccaagtatggggacaaatagtaatctattgttgcctgccccagtgctcctgaagacaggggaacagaaatcctggtgtcagccatggaacctccaagcccttaggggagggcctgcggtatgacttacatgttactccttgggtatttaatgtgtatgtagcctctacgattgaccgtcataggggaacagccagggaagggaccctccttggggggatatatgtactgtctgtgtggcctgttgtgagctctcctgtgactttggcacaagtacaagacccaaaagaaccacggggagccgagaaggtgtggtttcatcacccagggcagaagcccttggtggctgcatcgttatccagagatgaaaagttagcctgtatgttgcctgagggacgtgacttgcactgttagttcctgtgcctgttttgtcttccagtggtgattgggggctcaacagctcgtacatgggccccccttagccgaggggccatggtccctgtgggtctggcgc

SEQ ID NO: 619298 - DNA, 998 bp, Homo sapiens
  misc_feature (22)..(22): n is a, c, g, or t
  misc_feature (25)..(25): n is a, c, g, or t
  misc_feature (731)..(731): n is a, c, g, or t
  misc_feature (915)..(915): n is a, c, g, or t
  misc_feature (935)..(935): n is a, c, g, or t
aaagtgtcgccatcatgagcangancgagactatcaggatccggagacggaaatgtccgaaggccgcagtacttgaccctgtattttgggagtcgaacggagaatggaaactgaaagtggaaatcaggaaaaggtaatggaagaagaaagcactgaaaagaaaaaagaagttgaaaaaaagaaacggtcacgagttaaacaggtgcttgcagatattgctaagcaagtggacttctggtttggggatgcaaatcttcacaaggatagatttcttcgagaacagatagaaaaatctagagatggatatgttgatatatcactacttgtgtcttttaacaaaatgaaaaaattgactactgatgggaagttaattgccagagcattgagaagttcagctgttgtagagcttgatttggaaggcaccagaatccggaggaaaaaacctctgggggaaagaccaaaggatgaggatgaacgcacagtgtatgtggagttacttcccaaaaatgttaatcacagctggattgaaagagtatttgggaaatgtggcaatgttgtttatataagtataccacattataagtctactggagatccaaagggatttgcgtttgtggaatttgaaacaaaagaacaagcagcaaaagcaattgagttcttacaccccacagagagacagatacctgatattctaacaggaaatagcatcagctagagtggagaagaaagangagagaagcatgaagagcattcagcagagaactgccagacacgtcgtatgaagcagcaattaagttcatggcctacaaagggtagaagaacgcaatacttgtctaggacgaggagacataatcactatcgcatagattcaccttgatagtcgatgatattcagagctgtaaagtgaagagaatngcaggaatcagtagggtganttccccgttttaataaggagaggccttaaaacggcatacccgggtgacccacttttttgggct

SEQ ID NO: 619299 - DNA, 1468 bp, Homo sapiens
gtctcaaaaaaaaaaaagtcacagtggggaagctactgtcccatgaggttggcgtggggactcaggttagtttgggtgggggagtgggcaatgggcctctgccatttgcatcatgtgacttccataatctgggcttcaaggtaactgagcccttagtaggacattacccagccagggcaagacgaggtgtggaggtgcaaagcagtccctaataaaaaatgtgtgtccagaacttgcacaagttgccaggtagcagtggcctcacatctagtaaccccagcactttgggaaggccaaagtgggcgcatcacttgaggccaggagttggagaccagcctagtcaacatggctgaaaccccatctctactaaaacatacaaaaactacgtatggacatgttggtgcacgcctgtagtcccagatacttgggaggctgaggcacaagaaatggctggaacccggaaggtgagagcatacacagatgacctgaggtgagagccacttgaacactagcctgggtgacaacgtgagacctgttcccacaaaaaacaacaacacaaccgaaacgcccaggccagaagaccaccccaggaaacacaacgagcaagaacaactcctcacgcaagagaatacacaaacaaaaaaaactcgtgtgacacagccagagaagactgacaccaaagagcggacgagcgcacagagaacagaacaggacggtacacaagaatcgcaaaaagaggagcgacccacaacacgcgggacgggtgacaccaggctggactgctaacgagacaaaaaccggggagcgaaaacaaagacaaagaagaacacatagcatccccatcgctggaaaaagagaagaaaagaatacacagaagaaaaaaaccaaaaagaacagacacagaagaaaagaaaagagaaaaaagaaagaaaagagaaaaaaaaagaacaacagaacataacgacaacaaaaagagaagaaaaaaagagacagagcatgaaagaaaacaaaacggcagacgaaccaaccggaacgacaacagagagaaacgcagacagaaaaggaaaaaccaggaagaaaagacaagaagaacgaccacgagagagaaaggggagagcaagaagagagagaaaagagaaaagagagaaaagagagagagagcagagagcagaaggagaggaggagaaagaagcgaaagacaaggcaacacaaacagaaacagaacagcaaacgcgaaggaaggagagaaaagaaaaaggaagaaggaacagcaacacagagcagaagagaacgaaaagaaaacgatacaaaaaaacaaaaagaaagacaaccaagcgagcaaagaagagagacacgaaagcggaagaaaaagaggaaagaacagaagaaaaagacgagacgagcgaagagaagcaaaaacgcaagagaaagagaaaaaaagaaagggaagagagacagaaaaagaaag

SEQ ID NO: 619300 - DNA, 733 bp, Homo sapiens
  misc_feature (662)..(662): n is a, c, g, or t
ggagagaagcagtagtcaataaagagagtgccgtatttcgcagatggagctgagctgtggctgccagaagatagcgaacgaatggaaactgaaagtggaaatcaggaaaaggtaatggaagaagaaagcactgaaaagaaaaaagaagttgaaaaaaagaaacggtcacgagttaaacaggtgcttgcagatattgctaagcaagtggacttctggtttggggatgcaaatcttcacaaggatagatttcttcgagaacagatagaaaaatctagagatggatatgttgatatatcactacttgtgtcttttaacaaaatgaaaaaattgactactgatgggaagttaattgccagagcattgagaagttcagctgttgtagagcttgatttggaaggcaccagaatccggaggaaaaaacctctgggggaaagaccaaaggatgaggatgaacgcacagtgtatgtggagttacttcccaaaaatgttaatcacagctggattgaaagagtatttgggaaatgtggcaatgttgtttatataagtataccacattataagtctactggagatccaaagggatttgcgtttgtggaatttgaaacaaaagaacaagcagcaaaagcaattgagttcttaaaaaccacagaagagcacagaanactggatattctaaaagggaaaataggcatcagctaaagtggggagagaaaaaggaaggagagaaaggaga

SEQ ID NO: 619301 - DNA, 951 bp, Homo sapiens
  misc_feature (22)..(22): n is a, c, g, or t
  misc_feature (25)..(25): n is a, c, g, or t
aaagtgtcgccatcatgagcangancgagactatcaggatccggagacggaaatgtccgaaggccgcagtacttgaccctgtattttgggagtcgaacggagaatggaaactgaaagtggaaatcaggaaaaggtaatggaagaagaaagcactgaaaagaaaaaagaagttgaaaaaaagaaacggtcacgagttaaacaggtgcttgcagatattgctaagcaagtggacttctggtttggggatgcaaatcttcacaaggatagatttcttcgagaacagatagaaaaatctagagatggatatgttgatatatcactacttgtgtcttttaacaaaatgaaaaaattgactactgatgggaagttaattgccagagcattgagaagttcagctgttgtagaggtaagaatcaagaataactactgtttatatttatagtttataattataaagaatgttaacgtaatgattattatatgattatagcttacaattataaataatatgagtggttattaatgtaatatactattttaaaagcttgatttggaaggcaccagaatccggaggaaaaaacctctgggggaaagaccaaaggatgaggatgaacgcacagtgtatgtgggtaagccttagaaccggtccccagtcagaaaacggcacgaaccatatataggtaacattattggggctctgatgggaacactctattttggctgaatgataaatcgactactccagaatgttaatcccgctggttgaaagtttggcaaggggcagtggctttaagcttccatattagctcggaaccgagttcgcgcggatagaaacaatacgaaggggttttagcaccgaacaaagcgttgcaagaagccctgcagcggacaaagaaagtagagaaaatagactgatttcatacatacactgtcacacaagacaccgcatcg

SEQ ID NO: 619302 - DNA, 2118 bp, Homo sapiens
  misc_feature (22)..(22): n is a, c, g, or t
  misc_feature (25)..(25): n is a, c, g, or t
aaagtgtcgccatcatgagcangancgagactatcaggatccggagacggaaatgtccgaaggccgcagtacttgaccctgtattttgggagtcgaacggagaatggaaactgaaagtggaaatcaggaaaaggtaatggaagaagaaagcactgaaaagaaaaaagaagttgaaaaaaagaaacggtcacgagttaaacaggtgcttgcagatattgctaagcaagtggacttctggtttggggatgcaaatcttcacaaggatagatttcttcgagaacagatagaaaaatctagagatggatatgttgatatatcactacttgtgtcttttaacaaaatgaaaaaattgactactgatgggaagttaattgccagagcattgagaagttcagctgttgtagagcttgatttggaaggcaccagaatccggaggaaaaaacctctgggggaaagaccaaaggatgaggatgaacgcacagtgtatgtggagttacttcccaaaaatgttaatcacagctggattgaaagagtatttgggaaatgtggcaatgttgtttatataagtataccacattataagtctactggagatccaaagggatttgcgtttgtggaatttgaaacaaaagaacaagcagcaaaagcaattgagtttcttaacaacccaccagaagaagcaccaagaaaacctggcatatttcctaaaacagtgaaaaataagcccattccagccttaagagttgtggaagagaagaaaaagaaaaagaagaagaaaggccgaatgaaaaaggaagacaatatccaagccaaagaagaaaacatggacacaagcaacaccagcatcagtaaaatgaaaagatccagacccacatctgagggctctgacattgagtccactgaaccccaaaagcagtgctcaaagaaaaagaaaaaacgggacagagttgaagcatctagcttacctgaagtcagaacagggaagaggaagagaagcagctctgaagatgcagaatccctagctccccgatcaaaagtaaagaaaattattcagaaagacatcattaaggaagcatcagaagcttccaaggaaaatagagccccatgtcttaacggcagcagcttttttatttattctccaagcatatcagcaaatctctacgtgcaagaggcaaacaggctactggcagatctcaaaagcttagctctctcttggcacaccacacaacggaacaccataagcacacaacaacatacaagcagcagcacattacacaatgggaccacgcagttaatacccaattaagcagtgctatcaaaagcagcgacttggatgcgatttggacacacaaagcagtacatctaggcgctcaccacacaaggctagccagtgggctttttacaaagcagacacaccaaataatcccaaaatttaaaaactccagcaggtccagcacaattggaaacccatgaacagttgcgagtactcttccaataaacacttgcgcaattgaaacacctattgcacacacaagcagccaaaacagggggacgaacgtggtccgcaaccccaagggaagcaacagttatagtggaaaccaggaacccaacaaggttcggtgaatttggaggtgaatgggtgaaaggactcaattaagcacaagaggccttattaacttggctaggcaacccaaagtcccggggataatttggggcccagcaatctcccgcaacgctctcaagtgtcagacttcggccacacaccgtggcaattacgcaaatgcccattgctagactttacaacacctccttgatgggattcgcccaaccaggtaactcaaatggcctatatacaggaacattaaccagagaccagcgtgttggaaaacactgagcaaccctacttctggggtactccgagacacacgcgtacttgaccacaaacacattagggagacacccaccgggacacgctaactaaccccggaacacagacacgcggctaaaagtaataccccacgcgccgagatttatgcgaacaccaccaggcgataaaattatagttcgtctttctgtaaaaacaccttaataaacagagtagtgagcaaaccagtacag

SEQ ID NO: 619303 - DNA, 1509 bp, Homo sapiens
  misc_feature (22)..(22): n is a, c, g, or t
  misc_feature (25)..(25): n is a, c, g, or t
aaagtgtcgccatcatgagcangancgagactatcaggatccggagacggaaatgtccgaaggccgcagtacttgaccctgtattttgggagtcgaacggagaatggaaactgaaagtggaaatcaggaaaaggtaatggaagaagaaagcactgaaaagaaaaaagaagttgaaaaaaagaaacggtcacgagttaaacaggtgcttgcagatattgctaagcaagtggacttctggtttggggatgcaaatcttcacaaggatagatttcttcgagaacagatagaaaaatctagagatggatatgttgatatatcactacttgtgtcttttaacaaaatgaaaaaattgactactgatgggaagttaattgccagagcattgagaagttcagctgttgtagagcttgatttggaaggcaccagaatccggaggaaaaaacctctgggggaaagaccaaaggatgaggatgaacgcacagtgtatgtggagttacttcccaaaaatgttaatcacagctggattgaaagagtatttgggaaatgtggcaatgttgtttatataagtataccacattataagtctactggagatccaaagggatttgcgtttgtggaatttgaaacaaaagaacaagcagcaaaagcaattgagtttcttaacaacccaccagaagaagcaccaagaaaacctggcatatttcctaaaacagtgaaaaataagcccattccagccttaagagttgtggaagagaagaaaaagaaaaagaagaagaaaggccgaatgaaaaaggaagacaatatccaagccaaagaagaaaacatggacacaagcaacaccagcatcagtaaaatgaaaagatccagacccacatctgagggctctgacattgagtccactgaaccccaaaagcagtgctcaaagaaaaagaaaaaacgggacagagttgaagcatctagcttacctgaagtcagaacagggaagaggaagagaagcagctctgaagatgcagaatccctagctccccgatcaaaagtaaagaaaattattcagaaagacatcattaaggaagcatcagaagcttccaaggaaaatagagatatagaaatctctactgaagaggaaaaggatactggagatctaaaagatagctctctcttgaaaacaaaaggaaaccatagaaaaaaccataagagagacataaatgcgagaagaagtataccattaagagtgtatcaagagcgatggtgggtttgacacaagttttagcgtacaaaagctagctgcttcttaaaaaagattcccaattaatccgaggcggattggacgccgtgggtcccaaactgggtgaaatggaaaacgccgggagggtgccccggaatatgtccggccttcgttggtggtgggatataaaagcctctgcggaaacaggtttgcgccacatttgtgtaggaagctcatcactcagggtaaaaacaaactcgcaatgggcggtgccacacatatag

SEQ ID NO: 619304 - DNA, 299 bp, Homo sapiens
tggtggaaggggaagcaacacattcttcttcacacggcgtcccccatgctgtgctcatgatcgtgagtgagtcttaggagatctgatggtattataaggggctttccccaactttactctgcacttctctttgctgccgccgtgtgaagaaggatgtgtttgcttccccttccaccatgctttctaacttctcctcaagcagctcctcagctctgccgaaactgtgagtcagtcaaatccctttcctttttaaattcaccctgtgtcaggtatttcttcatagcagcatgagactgaag

SEQ ID NO: 619305 - DNA, 304 bp, Homo sapiens
tgagccaggagtgattagtttggaaacagtccaggggcagagagggtggggctggattgtatggagtggggagaaacactgctcagctgggtttttacaagtcagaatgggtatttgaagaggacgctgctttcatcctgctgggttcaaggtcagctgcagatgctctttcattgtttctttctaatcagcttctaagaatgtggcttaaacgctcagctatttccaggtggttggcatcatttattgagttgtctgctagagttatttcatacgctgcctaaaatgactcaaaaaacaaaaa

SEQ ID NO: 619306 - DNA, 1580 bp, Homo sapiens
  misc_feature (22)..(22): n is a, c, g, or t
  misc_feature (25)..(25): n is a, c, g, or t
aaagtgtcgccatcatgagcangancgagactatcaggatccggagacggaaatgtccgaaggccgcagtacttgaccctgtattttgggagtcgaacggagaatggaaactgaaagtggaaatcaggaaaaggtaatggaagaagaaagcactgaaaagaaaaaagaagttgaaaaaaagaaacggtcacgagttaaacaggtgcttgcagatattgctaagcaagtggacttctggtttggggatgcaaatcttcacaaggatagatttcttcgagaacagatagaaaaatctagagatggatatgttgatatatcactacttgtgtcttttaacaaaatgaaaaaattgactactgatgggaagttaattgccagagcattgagaagttcagctgttgtagagcttgatttggaaggcaccagaatccggaggaaaaaacctctgggggaaagaccaaaggatgaggatgaacgcacagtgtatgtggagttacttcccaaaaatgttaatcacagctggattgaaagagtatttgggaaatgtggcaatgttgtttatataagtataccacattataagtctactggagatccaaagggatttgcgtttgtggaatttgaaacaaaagaacaagcagcaaaagcaattgagtttcttaacaacccaccagaagaagcaccaagaaaacctggcatatttcctaaaacagtgaaaaataagcccattccagccttaagagttgtgggtgagtatttttcaatatttaaataggtgtagttgaagtaagatgaactaataatgatggcacttttacagaagagaagaaaaagaaaaagaagaagaaaggccgaatgaaaaaggaagacaatatccaagccaaagaagaaaacatggacacaagcaacaccagcatcagtaaaatgaaaagatccagacccacatctgagggctctgacattgagtccactgaaccccaaaagcagtgctcaaagaaaaagaaaaaacgggacagagttgaagcatctagcttacctgaagtcagaacagggaagaggaagagaagcagctctgaagatgcagaatccctagctccccgatcaaaagtaaagaaaattattcagaaagacatcattaaggaagcatcagaagcttccaaggaaaatagagatatagaaatctctactgaagaggaaaaggatactggagatctaaaagatagctctctcttgaaaacaaaaggaaaccatagaaaaaaccataagagagacataaatgcgagaagaagtataccattaagagtgtatcaagagcgatggtgggtttgacacaagttttagcgtacaaaagctagctgcttcttaaaaaagattcccaattaatccgaggcggattggacgccgtgggtcccaaactgggtgaaatggaaaacgccgggagggtgccccggaatatgtccggccttcgttggtggtgggatataaaagcctctgcggaaacaggtttgcgccacatttgtgtaggaagctcatcactcagggtaaaaacaaactcgcaatgggcggtgccacacatatag

SEQ ID NO: 619307 - DNA, 179 bp, Homo sapiens
cctatcatattgataacgatttgtcacatccatggggccgaattagaacaccttatggtcgccaaggttcgcagtgattttgtagacgctatcgtttcgcctatggtcattgcacctcaaccgtccattacacataagccacattcaggcaatggcgatgctgagacttatcgtccgcg

SEQ ID NO: 619308 - DNA, 1658 bp, Homo sapiens
  misc_feature (22)..(22): n is a, c, g, or t
  misc_feature (25)..(25): n is a, c, g, or t
aaagtgtcgccatcatgagcangancgagactatcaggatccggagacggaaatgtccgaaggccgcagtacttgaccctgtattttgggagtcgaacggagaatggaaactgaaagtggaaatcaggaaaaggtaatggaagaagaaagcactgaaaagaaaaaagaagttgaaaaaaagaaacggtcacgagttaaacaggtgcttgcagatattgctaagcaagtggacttctggtttggggatgcaaatcttcacaaggatagatttcttcgagaacagatagaaaaatctagagatggatatgttgatatatcactacttgtgtcttttaacaaaatgaaaaaattgactactgatgggaagttaattgccagagcattgagaagttcagctgttgtagagcttgatttggaaggcaccagaatccggaggaaaaaacctctgggggaaagaccaaaggatgaggatgaacgcacagtgtatgtggagttacttcccaaaaatgttaatcacagctggattgaaagagtatttgggaaatgtggcaatgttgtttatataagtataccacattataagtctactggagatccaaagggatttgcgtttgtggaatttgaaacaaaagaacaagcagcaaaagcaattgaggtaagtccagatcctaaaaaaaaaaaaagaaagaaaagaaaccaagtattaaaatagtaacttttgcaatcatttcagtttcttaacaacccaccagaagaagcaccaagaaaacctggcatatttcctaaaacagtgaaaaataagcccattccagccttaagagttgtgggtgagtatttttcaatatttaaataggtgtagttgaagtaagatgaactaataatgatggcacttttacagaagagaagaaaaagaaaaagaagaagaaaggccgaatgaaaaaggaagacaatatccaagccaaagaagaaaacatggacacaagcaacaccagcatcagtaaaatgaaaagatccagacccacatctgagggctctgacattgagtccactgaaccccaaaagcagtgctcaaagaaaaagaaaaaacgggacagagttgaagcatctagcttacctgaagtcagaacagggaagaggaagagaagcagctctgaagatgcagaatccctagctccccgatcaaaagtaaagaaaattattcagaaagacatcattaaggaagcatcagaagcttccaaggaaaatagagatatagaaatctctactgaagaggaaaaggatactggagatctaaaagatagctctctcttgaaaacaaaaggaaaccatagaaaaaaccataagagagacataaatgcgagaagaagtataccattaagagtgtatcaagagcgatggtgggtttgacacaagttttagcgtacaaaagctagctgcttcttaaaaaagattcccaattaatccgaggcggattggacgccgtgggtcccaaactgggtgaaatggaaaacgccgggagggtgccccggaatatgtccggccttcgttggtggtgggatataaaagcctctgcggaaacaggtttgcgccacatttgtgtaggaagctcatcactcagggtaaaaacaaactcgcaatgggcggtgccacacatatag

SEQ ID NO: 619309 - DNA, 263 bp, Homo sapiens
cctaagtaaattctcgtccactttcctgttaggaaacacagcagcaatatactttggcagtaaaccagagcatatgatgtaacttgctcaaccttatcttcctttccaaattctatactaatgcatctgactgttttttacgaataatttccatttggaaagccaagtgagacaaacaaattaggacagagagagactgtgagaaacttgtctgcatggctgacggaacacagatgcttaaagatctgaagtggacagtattt

SEQ ID NO: 619310 - DNA, 2096 bp, Homo sapiens
ggagagaagcagtagtcaataaagagagtgccgtatttcgcagatggagctgagctgtggctgccagaagatagcgaacgaatggaaactgaaagtggaaatcaggaaaaggtaatggaagaagaaagcactgaaaagaaaaaagaagttgaaaaaaagaaacggtcacgagttaaacaggtgcttgcagatattgctaagcaagtggacttctggtttggggatgcaaatcttcacaaggatagatttcttcgagaacagatagaaaaatctagagatggatatgttgatatatcactacttgtgtcttttaacaaaatgaaaaaattgactactgatgggaagttaattgccagagcattgagaagttcagctgttgtagagcttgatttggaaggcaccagaatccggaggaaaaaacctctgggggaaagaccaaaggatgaggatgaacgcacagtgtatgtggagttacttcccaaaaatgttaatcacagctggattgaaagagtatttgggaaatgtggcaatgttgtttatataagtataccacattataagtctactggagatccaaagggatttgcgtttgtggaatttgaaacaaaagaacaagcagcaaaagcaattgagtttcttaacaacccaccagaagaagcaccaagaaaacctggcatatttcctaaaacagtgaaaaataagcccattccagccttaagagttgtggaagagaagaaaaagaaaaagaagaagaaaggccgaatgaaaaaggaagacaatatccaagccaaagaagaaaacatggacacaagcaacaccagcatcagtaaaatgaaaagatccagacccacatctgagggctctgacattgagtccactgaaccccaaaagcagtgctcaaagaaaaagaaaaaacgggacagagttgaagcatctagcttacctgaagtcagaacagggaagaggaagagaagcagctctgaagatgcagaatccctagctccccgatcaaaagtaaagaaaattattcagaaagacatcattaaggaagcatcagaagcttccaaggaaaatagagccccatgtcttaacggcagcagcttttttatttattctccaagcatatcagcaaatctctacgtgcaagaggcaaacaggctactggcagatctcaaaagcttagctctctcttggcacaccacacaacggaacaccataagcacacaacaacatacaagcagcagcacattacacaatgggaccacgcagttaatacccaattaagcagtgctatcaaaagcagcgacttggatgcgatttggacacacaaagcagtacatctaggcgctcaccacacaaggctagccagtgggctttttacaaagcagacacaccaaataatcccaaaatttaaaaactccagcaggtccagcacaattggaaacccatgaacagttgcgagtactcttccaataaacacttgcgcaattgaaacacctattgcacacacaagcagccaaaacagggggacgaacgtggtccgcaaccccaagggaagcaacagttatagtggaaaccaggaacccaacaaggttcggtgaatttggaggtgaatgggtgaaaggactcaattaagcacaagaggccttattaacttggctaggcaacccaaagtcccggggataatttggggcccagcaatctcccgcaacgctctcaagtgtcagacttcggccacacaccgtggcaattacgcaaatgcccattgctagactttacaacacctccttgatgggattcgcccaaccaggtaactcaaatggcctatatacaggaacattaaccagagaccagcgtgttggaaaacactgagcaaccctacttctggggtactccgagacacacgcgtacttgaccacaaacacattagggagacacccaccgggacacgctaactaaccccggaacacagacacgcggctaaaagtaataccccacgcgccgagatttatgcgaacaccaccaggcgataaaattatagttcgtctttctgtaaaaacaccttaataaacagagtagtgagcaaaccagtacag

SEQ ID NO: 619311 - DNA, 2152 bp, Homo sapiens
ggagagaagcagtagtcaataaagagagtgccgtatttcgcagatggagctgagctgtggctgccagaagatagcgaactcaagcaccacataccgacagaccgcatgtatgacagtggtcccataaaattataggaatggaaactgaaagtggaaatcaggaaaaggtaatggaagaagaaagcactgaaaagaaaaaagaagttgaaaaaaagaaacggtcacgagttaaacaggtgcttgcagatattgctaagcaagtggacttctggtttggggatgcaaatcttcacaaggatagatttcttcgagaacagatagaaaaatctagagatggatatgttgatatatcactacttgtgtcttttaacaaaatgaaaaaattgactactgatgggaagttaattgccagagcattgagaagttcagctgttgtagagcttgatttggaaggcaccagaatccggaggaaaaaacctctgggggaaagaccaaaggatgaggatgaacgcacagtgtatgtggagttacttcccaaaaatgttaatcacagctggattgaaagagtatttgggaaatgtggcaatgttgtttatataagtataccacattataagtctactggagatccaaagggatttgcgtttgtggaatttgaaacaaaagaacaagcagcaaaagcaattgagtttcttaacaacccaccagaagaagcaccaagaaaacctggcatatttcctaaaacagtgaaaaataagcccattccagccttaagagttgtggaagagaagaaaaagaaaaagaagaagaaaggccgaatgaaaaaggaagacaatatccaagccaaagaagaaaacatggacacaagcaacaccagcatcagtaaaatgaaaagatccagacccacatctgagggctctgacattgagtccactgaaccccaaaagcagtgctcaaagaaaaagaaaaaacgggacagagttgaagcatctagcttacctgaagtcagaacagggaagaggaagagaagcagctctgaagatgcagaatccctagctccccgatcaaaagtaaagaaaattattcagaaagacatcattaaggaagcatcagaagcttccaaggaaaatagagccccatgtcttaacggcagcagcttttttatttattctccaagcatatcagcaaatctctacgtgcaagaggcaaacaggctactggcagatctcaaaagcttagctctctcttggcacaccacacaacggaacaccataagcacacaacaacatacaagcagcagcacattacacaatgggaccacgcagttaatacccaattaagcagtgctatcaaaagcagcgacttggatgcgatttggacacacaaagcagtacatctaggcgctcaccacacaaggctagccagtgggctttttacaaagcagacacaccaaataatcccaaaatttaaaaactccagcaggtccagcacaattggaaacccatgaacagttgcgagtactcttccaataaacacttgcgcaattgaaacacctattgcacacacaagcagccaaaacagggggacgaacgtggtccgcaaccccaagggaagcaacagttatagtggaaaccaggaacccaacaaggttcggtgaatttggaggtgaatgggtgaaaggactcaattaagcacaagaggccttattaacttggctaggcaacccaaagtcccggggataatttggggcccagcaatctcccgcaacgctctcaagtgtcagacttcggccacacaccgtggcaattacgcaaatgcccattgctagactttacaacacctccttgatgggattcgcccaaccaggtaactcaaatggcctatatacaggaacattaaccagagaccagcgtgttggaaaacactgagcaaccctacttctggggtactccgagacacacgcgtacttgaccacaaacacattagggagacacccaccgggacacgctaactaaccccggaacacagacacgcggctaaaagtaataccccacgcgccgagatttatgcgaacaccaccaggcgataaaattatagttcgtctttctgtaaaaacaccttaataaacagagtagtgagcaaaccagtacag

SEQ ID NO: 619312 - DNA, 2166 bp, Homo sapiens
tcgtacagcatgcaattaggggttgccgaccacaataagtaatctgaaaatgataatgccgtgattcctaagatagtcctgtgtacattaatggtatgccctatgaagtatatccgcaccacagtagaatgagaaacgctcgggagtggaaactcagcggataaatggtacatggtccgaaataagagaaggtttggagaggcaataacatgagatcgtatcaaccagagagtggtaagcaatttcgaatgtgcttgcagatattgctaagcaagtggacttctggtttggggatgcaaatcttcacaaggatagatttcttcgagaacagatagaaaaatctagagatggatatgttgatatatcactacttgtgtcttttaacaaaatgaaaaaattgactactgatgggaagttaattgccagagcattgagaagttcagctgttgtagagcttgatttggaaggcaccagaatccggaggaaaaaacctctgggggaaagaccaaaggatgaggatgaacgcacagtgtatgtggagttacttcccaaaaatgttaatcacagctggattgaaagagtatttgggaaatgtggcaatgttgtttatataagtataccacattataagtctactggagatccaaagggatttgcgtttgtggaatttgaaacaaaagaacaagcagcaaaagcaattgagtttcttaacaacccaccagaagaagcaccaagaaaacctggcatatttcctaaaacagtgaaaaataagcccattccagccttaagagttgtggaagagaagaaaaagaaaaagaagaagaaaggccgaatgaaaaaggaagacaatatccaagccaaagaagaaaacatggacacaagcaacaccagcatcagtaaaatgaaaagatccagacccacatctgagggctctgacattgagtccactgaaccccaaaagcagtgctcaaagaaaaagaaaaaacgggacagagttgaagcatctagcttacctgaagtcagaacagggaagaggaagagaagcagctctgaagatgcagaatccctagctccccgatcaaaagtaaagaaaattattcagaaagacatcattaaggaagcatcagaagcttccaaggaaaatagagccccatgtcttaacggcagcagcttttttatttattctccaagcatatcagcaaatctctacgtgcaagaggcaaacaggctactggcagatctcaaaagcttagctctctcttggcacaccacacaacggaacaccataagcacacaacaacatacaagcagcagcacattacacaatgggaccacgcagttaatacccaattaagcagtgctatcaaaagcagcgacttggatgcgatttggacacacaaagcagtacatctaggcgctcaccacacaaggctagccagtgggctttttacaaagcagacacaccaaataatcccaaaatttaaaaactccagcaggtccagcacaattggaaacccatgaacagttgcgagtactcttccaataaacacttgcgcaattgaaacacctattgcacacacaagcagccaaaacagggggacgaacgtggtccgcaaccccaagggaagcaacagttatagtggaaaccaggaacccaacaaggttcggtgaatttggaggtgaatgggtgaaaggactcaattaagcacaagaggccttattaacttggctaggcaacccaaagtcccggggataatttggggcccagcaatctcccgcaacgctctcaagtgtcagacttcggccacacaccgtggcaattacgcaaatgcccattgctagactttacaacacctccttgatgggattcgcccaaccaggtaactcaaatggcctatatacaggaacattaaccagagaccagcgtgttggaaaacactgagcaaccctacttctggggtactccgagacacacgcgtacttgaccacaaacacattagggagacacccaccgggacacgctaactaaccccggaacacagacacgcggctaaaagtaataccccacgcgccgagatttatgcgaacaccaccaggcgataaaattatagttcgtctttctgtaaaaacaccttaataaacagagtagtgagcaaaccagtacag

SEQ ID NO: 619313 - DNA, 205 bp, Homo sapiens
ggtgtatgacggcgagtatcccggaacgagccagtgctgtaggaagaaatgttagatgtacgccgatcaatattagtagtgagatggattaaggcgtaggtatgatctagggtgtagcctgataataggggacatcagtgaatgaagcctcctatgatggcaaatacagctcctattgataggacataaagaaagtgagctacaa

SEQ ID NO: 619314 - DNA, 973 bp, Homo sapiens
agcgtgcggcgggcccgcagaggacgctgctttccgcgctggatggaccaagcgagggagggtgcgaggggaaaccggaaggaagaggcggcggcgccagccttcctcggcggaggcggaggcggagaccccaggcgaggcggggcgggagggccattgcccccgacgccgcgccggaggggcccagttgtggactggggccacggttggagcggatcccacacctccggaaccgaggggacggcggcgcccatgtttatgatgtggcctacgtgaaagcaaaacaaaccattgtacaccttgaggaattgtcgaatgctgccaccctttacagattaataatactttatgcatacaccggggtaacttggcaattgaatgaccagcactgttagaaccaggctttagtgaaaccagcttgctttcctacaggtagaagatgtgtaccaccgttctgtcgacaactttctccttcaccacacctactcagtgcgaaccactttgtgtccgatgttgagtttgctgatctctctcacttgtggaggaattacccaccgacgtgcttaacaacgaattggtggaccccactgttcacctgctgtgtatccatcaaggcacgcgttcaatgccagctggtcacagtgacgcttacgttgataggaatattcctcgagtaggtgaccaactctacagtggctcgaacggggaaggaacacccggttcgtagaaagctgcaatggctgttcggcttgaacgattaacaacggaatccggacccaggatgttggctgttggttcttagcccgaccataagtttttgctcctttccaagttcaaccagtagcgtgtgtccgggttgcgcccataaaacctccaggtgctacgcctgtgttgccttcgcacatttacaacacatgttagcataaacgaggtatgttcgtccgccactacactgttgtccttgtttgtacca

SEQ ID NO: 619315 - DNA, 191 bp, Homo sapiens
acctcgaggatccccaaacacgcaatctgaacagttctttcttgagacagactatactgagacacaagtagtcaccagcagaagatagataatatgactttattatcttgatgaattaagcttaacaagagggtatttgaagtgtactatttatcctaacactttctgtgtctgggtaccctcttcagtaa

SEQ ID NO: 619316 - DNA, 135 bp, Homo sapiens
acaagcatcgactattactttatttatattactatgctttagttacatgataaagactacccagcagttctgtcccatctcggagaaagttccctagtcaacaccaattattttgtgacaaattactaggaatgg

SEQ ID NO: 619317 - DNA, 112 bp, Homo sapiens
aatggcaacgtcacattgcggggatggttctcttttcatgagataacaatggaggttacatttgtgtgtggccaattctgagtctgcgagtgagggacacttgttgacttct

SEQ ID NO: 619318 - DNA, 835 bp, Homo sapiens
  misc_feature (309)..(309): n is a, c, g, or t
  misc_feature (320)..(321): n is a, c, g, or t
  misc_feature (327)..(327): n is a, c, g, or t
  misc_feature (334)..(335): n is a, c, g, or t
  misc_feature (338)..(338): n is a, c, g, or t
  misc_feature (340)..(340): n is a, c, g, or t
  misc_feature (343)..(343): n is a, c, g, or t
  misc_feature (361)..(362): n is a, c, g, or t
  misc_feature (442)..(443): n is a, c, g, or t
  misc_feature (446)..(446): n is a, c, g, or t
  misc_feature (463)..(463): n is a, c, g, or t
  misc_feature (518)..(518): n is a, c, g, or t
  misc_feature (523)..(523): n is a, c, g, or t
  misc_feature (571)..(571): n is a, c, g, or t
  misc_feature (772)..(772): n is a, c, g, or t
tgggtcagttgcgtcataggatcatactctgagtagattatgaggtcgtcccaactgccatgggtcgctcgtgtccttctcgagtggtcaacgactcctggggcttgactactaacaatccttgctagtgcagcaactattgttgctatgtaatcatggtgtcccaaacgtgcatctagtctcagcccttgtctcgtaggcctttcacctttgtctggttcttcttggtacctttgttctagttcagggtttttatcctacccttggagcactattacatgagggcagacttccccccgtcgccaattntgaatctgtcnntgcacngggcccnntgncntanggatgtgatgaccaacanntgcacgtcaatgagccagcctctcttttgcgcgggaatcaagcatgtgcttcctctagactacagcagccgaaacgggannganacaatctgactgtctcnactggcagcatgaagcccattctaggtactatgcaaagggcagaggactgggagncttgnacgcttagctcctacaccctgtcatacctcaccggggcactttcaggngccaggggcctctgaagtctctaggcctatatgggacaatcaattctgactagagctcccccattcccctcgggtgaggtagactgttatttttgtagctgagaacgtggaatcccacgggtttttactgcccttcacccaacctctcccacctccaccccacatatgaatgtatttattgtgagaatggctacacttctntaggaatgcccccacttacaaccaggtgggtggaacaggtaacgaccaggtgggagccttggg

SEQ ID NO: 619319 - DNA, 107 bp, Homo sapiens
gctctttccagcaccttcctgcattagtgcagcagttccccagtcgttccatcaatgcccagcccacaccgtttgtggcaggcacacatcagtcacacctccaagca

SEQ ID NO: 619320 - DNA, 151 bp, Homo sapiens
  misc_feature (13)..(13): n is a, c, g, or t
  misc_feature (42)..(42): n is a, c, g, or t
tcggggctcacancacagggtaaaaatggttataaggcgcgntcacaaatattgcgcttgtgtaaaacacagtatgtctttaaaagcgacagactatgctgcgtaaaagagctacatacacacatctccccaaaactctaaaaagataccc

SEQ ID NO: 619321 - DNA, 122 bp, Homo sapiens
agacacagaggaggtggacaggacagagggaggtggagacggctccttcacatggcaaagtactgggaagccttccttcctgaggcaaaggccatctcctaatggaccaaggaccccagagc

SEQ ID NO: 619322 - DNA, 205 bp, Homo sapiens
gtagaagcccaagttgagaacaataatgaacaatgattgtatgaacaattgttagaaacagctaatcacaaacaacctgcgggcacaagtgacctcattccacacgtagcaccctatcagctaggaccctataaaactttcctccagaaccttgcctctgttgcaggtagaccctaactctgctgaggctgtccacgtgcaacat

SEQ ID NO: 619323 - DNA, 297 bp, Homo sapiens
gagacgcgtgatgcaatcaaatgcgagaacgaatggagtcacatgggtaaaccatgaatatacgagatctctagtatcagggaggatgaaatcatatgcgttattgaccgtaaacctggttattatactactggtaatggatgaagcctatcattaagaaagttagtcgtacagcgtgggtgcgcatacagtcgcgcgatgtagggatacttgacccagcatatgctcgccaggaacttttgtaccgatggctttaaatgctcgacgcaccgataatggcggcgagccatcggccgt

SEQ ID NO: 619324 - DNA, 469 bp, Homo sapiens
cctcgtgttcggctgcggatacttatgcaggcgccatacccaatgcaagatgcagagcggttgcaaagggaaaactgtggtacgaacgtacaggaatgtcgcaattatgaaagtttcgacacaaaagtgcctgtttggagggttttttcggtgcaaatggcgcaccaaaaaagcccagccgaggcgtctagcgcactcggttggggcgcggctgttacttatctagacccacaccgtagaacggcgttagcccaaacgggctgatcttgaagtcacgcacttgcttgcgcataggctggaaaaccgtcgagttcgcaataggcgttataggtacttgttccttaaggattttctgtgcctgctgataccacttgatgcgctgctcgcggtcgctgctgaccttggttgctgcaccagcttgtcataggccgggtacaccagactctgggcatcattcacgggtaccgag

SEQ ID NO: 619325 - DNA, 391 bp, Homo sapiens
ttacggggagagagaagcatacactccaggtgatgcgtacaagcggagaaacaaggtctgtgcatgccccatgatcctgaggaacggagatggatgaatgtgagcaggcgctggctgatgaccccaaggccaatgaccccttcgctcacctgcccaaggagtacctttgtgtaggatgaatttaagcgcaagtactccaatgaggacacactctctgtggcactgccatatttctgggagcactttgataaggacggctggtccctgtggtactcagagtatcgcttccctgaagaactcactcagaccttcatgagctgcaatctcatcactggaatgttccagcgactggacaagctgaggaagaatgccttcgccagtgtcatcctta

SEQ ID NO: 619326 - DNA, 727 bp, Homo sapiens
gcctccggttgtctgtgttcctactttgcttcagtgtttttcacttgatcaagggagatgtatgtcgtgtggttaaagtgctagtgtactagccataaggtaggtgctataactttggggcgttatggaactgcttgtttagcagttggatacaatgtgccttgtgtcctgcacgaatgagtcaattccttgttgggtgatcaggctagatgttactgtttgaggagatatgatgcgtgaccgattacttactttctagaacgccgaatagactagcgtgtcaaaggacgatatttctcagtacataaagtacgatgcacttttcatgtctaaagagagtatgtcttcagctgttccttcgtttgcttataagtctctatggttgtgcactcggtgaagctcagaacgtgtagttctgttggtctagaattgtacccgtagattcttatctaatgtctgcagtagcactgaatgtttcgtgtgcaccgagaattctacatgttgaaatctcatttccaactgtgatggtatttggaggtggggcttgttggtaagctgataggtcagcgagagtaacagcggctcatgaatgggattagtgcccttatataatagagacccagagagctccatcaccccttctgccatgtgaaagggagaagacaatacatctcacgaagccaggaagtggttcctcaaccagaaaacaaatcctgtaagcacctta

SEQ ID NO: 619327 - DNA, 295 bp, Homo sapiens
tgaaaaatgaaattaaaggggggcaaacatgtccaaggaaaattggggggatttgacccctttatgacccttgtgaaaaatgaatggggggaaagggcgactaggggccaccaaaccaatattggaatggtggtaaaccgaggaaaaagtttcctcatgttaaaacccttggaacgggtataaaaaagggcggttcaccaaaaaaccccatgccctctccccaaagggcctgttttactataaggtaaaaattgggtcagggccattttcaaattagcctttttgttaaaaaaac

SEQ ID NO: 619328 - DNA, 175 bp, Homo sapiens
atctcccgggttcaagcgattcttccgcctcagcctcccgattagctaggattaccggcacctgaccagcatgcccagctaaattaaatgtaaagatagggattctcccctctgatacctctttataataaattatatttttttatttataattataataaaaaataaaaataat

SEQ ID NO: 619329 - DNA, 203 bp, Homo sapiens
agctggtaccgtgagtgagtggtgactctcaactcactgcagtcgcctcctgggttcacaccattctcctgcctcagcctcccgagtagctgggactacaggcgcctgccacctcgcctggtaattttttatatttttagtagagacggggtttaccatgttagccaggatggtctcgatctcctgacctcgtgatccaccca

SEQ ID NO: 619330 - DNA, 661 bp, Homo sapiens
  misc_feature (3)..(3): n is a, c, g, or t
  misc_feature (78)..(78): n is a, c, g, or t
  misc_feature (84)..(84): n is a, c, g, or t
  misc_feature (88)..(88): n is a, c, g, or t
  misc_feature (110)..(110): n is a, c, g, or t
  misc_feature (139)..(139): n is a, c, g, or t
  misc_feature (141)..(141): n is a, c, g, or t
  misc_feature (152)..(152): n is a, c, g, or t
  misc_feature (180)..(180): n is a, c, g, or t
  misc_feature (191)..(191): n is a, c, g, or t
  misc_feature (200)..(200): n is a, c, g, or t
  misc_feature (240)..(240): n is a, c, g, or t
  misc_feature (269)..(269): n is a, c, g, or t
  misc_feature (355)..(355): n is a, c, g, or t
  misc_feature (433)..(433): n is a, c, g, or t
  misc_feature (502)..(502): n is a, c, g, or t
  misc_feature (505)..(505): n is a, c, g, or t
  misc_feature (575)..(575): n is a, c, g, or t
  misc_feature (631)..(631): n is a, c, g, or t
ggnaaaatacctggtattacaggccccagtacctttctactctacaatgaggctcagaagcccagtgtaccaccccanccccangtgnggtgcccacatagaccagaaancccaagttccaatagccaacaggtctgtnanttcagggacancggttgttaacaaagaagttggtgagantgaaccactantcccctgantttttttttcctttttttttttttttttgtagacctaagntcctcacctccttgttcccccaggctggnagtgcaatggcgcgatcttggtctcactgcaacctccgcctctacaggttcaagaagattctcttgcctcagcctcctaactgggntaacagacacctgcaaccatgcccggctcatttttttttgtatttttagtagagacggggtttcaccaagttggcccngcagggcccgaacacccgaccccaggggttccgcccgccacagccccccaaagtgcagggagtacaggngtnagcaccgcacccggccaaaatcccgaaattaacaaggaaaaaaaatctgtcaggtgtgagaactttcctnaaagatattttttctggacatctctctctactgactgaaagggtgaggctcagaanaggcttcttccaagctcagagaggctgaga

SEQ ID NO: 619331 - DNA, 215 bp, Homo sapiens
gagtgtgtacagctccatggttgatctggttgttgatggctgtgcctctgagtcctggtggtagttcttggcgcacctgcgagttggacgcggtcgtcatggcggcgactaagtgagaggcggcggcggctggcgaattcctggcaccaccacgacgaattcctgtgcaccacgacgacgaattccagcgactgacgacgaattccttgcgctgt

SEQ ID NO: 619332 - DNA, 355 bp, Homo sapiens
aaaaaaaggattttttaaaaaaaagcctgcaaacccaggttttcaaagtggggttggccaagtccatcccccacgcttgggtgttgatcccccagccccaaataagggtccgcaaacaggtggtgaaaatcccgtccttcattgtccgcctggattcccaaaagcaaatggatttttttttgggctctccctacggggggggccccccgggccgggtaaaaagaaaaaattccaaaaagggccagggtggggctggggttggaacccacaaggaggaggattaagtccccctgtccctcctggggtggtggattgtttcgttttccccccaaaaaaacaggatcagcgctttcca

SEQ ID NO: 619333 - DNA, 110 bp, Homo sapiens
tagtagtgtcagttcgagaatgctcttcctttgttcactaacatttcacttaggggtgaaggcgcttaccctgtcgtatgtcaggatgccaggggagttgtcatctgcag

SEQ ID NO: 619334 - DNA, 387 bp, Homo sapiens
aagcagcagaatgatgcgaagaagaagtggaaacctgatagagccatcaaggtctcgatgagactgtatgcactatcagtgagaatagcgactggagtaaaggctggtcccgcagtgtttcgatgacctcccccgaggtccctcccacaacacatgggaattctgggagatataattcaagttgagatctgggtgggtgcacagttaaatcgtatcatgtccctagtgtactgtgagaaaattgtcacctcatgtacccagcgtgttcagatgaagctctgatcttcgagtggaagggtgtctgtgctgagcagatgtctagatggtcgatggccccttcacgtgtctgagcctgtcatgtggtgctgtgtcctccatctggcactg

SEQ ID NO: 619335 - DNA, 232 bp, Homo sapiens
tccccactaaggtacaactgtcgccattttcagactgatgaacaggttcacacccaaataatttgcggtgtgtttttagggtggtggtggtgttaatcttatcactggccattctacacgagtgctatctgtgtacgctctgtctaccagtagtgaaatatccaacactgcaaccagcgaacatgaactctagctggaaatgcattctcagggctgccccaggaccgtgtgt

SEQ ID NO: 619336 - DNA, 396 bp, Homo sapiens
  misc_feature (159)..(159): n is a, c, g, or t
  misc_feature (162)..(162): n is a, c, g, or t
  misc_feature (180)..(180): n is a, c, g, or t
  misc_feature (190)..(190): n is a, c, g, or t
  misc_feature (198)..(198): n is a, c, g, or t
  misc_feature (201)..(201): n is a, c, g, or t
  misc_feature (373)..(373): n is a, c, g, or t
  misc_feature (380)..(380): n is a, c, g, or t
  misc_feature (384)..(384): n is a, c, g, or t
attcactagtaatgttgactctctgaggtaagagttataagataacaatgagattccaacatcaaaaacctaattcgtctcagcttctcatactaaaacagctagggtggaggagcaaaatcgtcttaaagtagcataacccttttccctgttttgaanatnaaattaaaacaaaagttnaccatgaagnaaaacggnagnaaggtgccaggggaacccccgtcacatttttttttcaacttcccgtaactcataattatctcgagataaaattttaaaagatagcatcacacatcaaaatcttgtactatttggtacttaattcatttttctttttttaaagtgtagcttattggactgagaatggaatttnaagattnaaanactacgcacaaa

SEQ ID NO: 619337 - DNA, 108 bp, Homo sapiens
gatatcttcccagctgtgcgtgcctttcggcgtcatctcgttggtgatcagcgccgagcccctggcgtcgacgaacggaccggtgggcgaatccgacaccgcgaccgc

SEQ ID NO: 619338 - DNA, 110 bp, Homo sapiens
ttccccccccttttttttttttgggggcccaggggtttggggtttaaaaaaaaggttttttttttcccccccccccccaattaaacccccccatttgttttgtttgggga

SEQ ID NO: 619339 - DNA, 906 bp, Homo sapiens
ctgctgctttggcatgacgttactaacgcggctcgatcgggttttctgtgtggcggccctgttgctgccttccttttctggctgttctttccttacgctcttgcggtcgcggcgcttccgcgtattccatcccagccaagcttttcttagtagttgcggttgtcgccctacaaccgtcttgcaggtgttcctggcggtccccgcgggttttatgcccctcccggcctcacactaggttgcgcatgtccacctagtccgggacctcgcaatcttttgcgaccgcctttggctgattgcacactaaagcgggtgacgacttactcccggcacgggactgaggattacacttcaatattgaggatccagctacggtcgtcatgaagaccctgactactgttcagggcattgcagatgattatgaccaaaagaaacttgtgagaagctttctaaaagaaatttgcctgtaatggtactgttgattgaacatcctgaatacggagaggttattcagcttcaaggtgtacccaagaaaaaacatctgcccgtttctcttggaggttggcattgtaaaggaggacagcttaaggttcatggattctgaaatgtacctaatacgtggagaatttcttgaatagttttgttctctaaacccggtttggctgccttgtgaaatgattccctgcagtaacggacttttcatttatttaatcattgcgaacttccattcacatctgcatgattacagatacactggggtatgtagactagtacacataagaaaattgccgtaagatggtaccaaacctcatattgtctttacaattggttcccatggaaaatgttttgagtgtttattgttccgtttattacgtttcacttgattaaattttttttgttgttgtatta

SEQ ID NO: 619340 - DNA, 898 bp, Homo sapiens
gcccctcgagtgatccgagcctgtgctgcgcatgtcaacctttcagctgctggtagctaggggaaccaccgaatcacttcatatagtatgacgccatagcataccgttgaggtcagccagagttgtcaagtttgacttccctcgcgtgggacacctcagggggcatagctcgataggggcttgtggacaaagttggttggatcacgaaaccttcgtgaagcgccaacatgttcctacgagagagaggctagactctccggggagattttaagctattagtgatattacagagcctccagccgggggcaagctataacctaacatagatgtagcagagcaagaaccactaggaagtgtcgtagtgcgagcccacttcatcgtaggggctagctagcagattgacagtgggcacagagtggtagggaaatgatcgctctctcttcggtcggcgatacacttggctgcgcatttttaggcactccttggtggagccccttagtcactcatgtacgggcatcatgcgatccatttaaggaacaaaaatctttgaaggaggcaggcactaacctttttgtagtttgggcgtccctgcatgggggcaaggtatagcaacttggtggctcaaatatggggtccacctagcaacaggaagaggcttgcgcgactgcttgcggttagaataccattgtagcgtaagaattgtaggggtaccgagacaagggagatgcatgacacatgcctagttgcattgtgccgtaggtttcggcttgtttccacaatagcagacagacctcgacttagttgccccaagagacaccctggatgctcgtcaagaagtggtgtccatcggaccgtgattgaacttagaaatcccgggaaagatagtaccccttgactt

SEQ ID NO: 619341 - DNA, 1123 bp, Homo sapiens
ttccactttgtcccttctccttccatttcgcgtcttgttttgtcgtgttactctgcccaccgccctctgctcactctgctctcgcctctctctcggtcgtactaagcttgtgtgctcttactcgctcgcggggtctggctccgtggttcaccccttacatcgcgttctttgtcttattttacgtgttcctgtcttagtgcctgtctcgggttttgtgtcacctccttgttcgtcacgttttgtttggtgcgcactgctctgctctcccgtgtcccaccttgctcgttttcggcgtcacggaagtaagtaaatgaatcataaccagtaaaatgtggctctgatggagggtctatagctcccaaagtagtaacagagcaactctatgaaatactacagatgcagcaggtaatataatagctagactatgatagcctactacccctggatactgtagattaaatgcattctcttgcccttagctgagatccagacctgtccttagacgagatcacagtccagtggacgagtcactctatggcaggaaagtattcatgtattgcccttacaggcagcactagctgaatactccgaacctctggcaattatctggaacccagcattctagaacttgcctggtatacccaccctctggaattggcctgtatagagtgcctgtagaaggatgttcatagtgtgaaatgtttcagtcagaggaactgctactacagcaaaccacatagaggtgagggtgccacggggaagcggcctggtgtctattgaaactgcaaacacagatagccagcctactggagagtagctgcacaagctgcaggtacaccctaccctagtaagctggccagaaggagggagcaaaaccttttctctctgctaacatctttcctagtttcctctactggaaaagcttcattgccagctgacaaaaggaaaaatacgttaaagtggactcacgatccattttcacagagcagtcaataatggtgaatttggagatgataagcaacaaattgatgaactggcacaacttcctagctactttcgttgacttgtaatgcctagatagggtataggaaagttattgaaatactgctgtgtgcccatgaaa

SEQ ID NO: 619342 - DNA, 241 bp, Homo sapiens
ttttataccctacagtcagacaggaaaagaactgaaaatggcccccttttgacattttgaggcagctggactggcagccaagtaaaggaaagtgattaggtggtgtggggagggtggggaggcagcccaagggtgctttccccagcaggtaggagcaggcaggagtggggacaaagggaaagcttgtgactgggacagtgaaaataaacgattggcttttatcaatcccttgcccccccca

SEQ ID NO: 619343 - DNA, 432 bp, Homo sapiens
  misc_feature (29)..(29): n is a, c, g, or t
  misc_feature (67)..(67): n is a, c, g, or t
  misc_feature (132)..(132): n is a, c, g, or t
  misc_feature (163)..(163): n is a, c, g, or t
  misc_feature (172)..(172): n is a, c, g, or t
  misc_feature (258)..(258): n is a, c, g, or t
  misc_feature (273)..(273): n is a, c, g, or t
  misc_feature (278)..(278): n is a, c, g, or t
  misc_feature (339)..(339): n is a, c, g, or t
  misc_feature (421)..(421): n is a, c, g, or t
aggaaaactgtcccagggcggggagcggnatagggcccccacatctcagactctcctaccctcaagnagttaattctcaccccctgccttcctctgtcaacggtgggggtgattccaataactcttctcagnttccatacttcaggtgctcttcgtgaatgcngggtggctntaacccttgggggtcccagacaagtgttgcgcatgaatcccactgtgcgcaccattgctgctccccaaagaatgtgtcccaagtanaaggttgtatagttnccgtngtttttcacggcaacacgggcataagcagcaattatcgcacgaagtttccctagggtggtnggggatccgtctcctgccactcctggggcccttttttgtctgccttaaggtcaatgctacctgttttgaggtgctgtgtcanggttgtgggct

SEQ ID NO: 619344 - DNA, 198 bp, Homo sapiens
gagcagatctagcaggagcttaattctgcacccaacagccattctgccagggtttctaagtggaaccccagccctcggccggactcctcactgcaagaacggggatgctttccctacccaaccatgcagccccgggcccctcatgaggccactatgtgcccagggaaagggaaactctaatccgcgattataaaacac

SEQ ID NO: 619345 - DNA, 171 bp, Homo sapiens
tacgagcggtctcgtgtaaagagcggtctccacggagacggatgctgatctcgcagctgaggtccgcacccctctggctattccctgcgccatgccagtggagtctgctacatgctaatctgaccgtgttgttcctctgcctaaaaccttgacctggctccccagtgccct

SEQ ID NO: 619346 - DNA, 320 bp, Homo sapiens
attgcctgccaaaccacaggaggctgaaaatagctgaagaactgcctaaggaacctcagggcatcatagcttgctgcaacccagtaccgccctttgggcggcagcggatcaacgaaaggcaccttttaatccagcaggcccgagagatgcccctgctcaagtctgaagttgcagccggagtgaagaagagcgcaccgctgcccagtgctgagagattggagaatgttcttttgggacctaacgactgctcccatgcccttcgggatggttatccaatcatccaaaccagtggatctgtgccagttcagaagcaggcgagc

SEQ ID NO: 619347 - DNA, 392 bp, Homo sapiens
  misc_feature (203)..(203): n is a, c, g, or t
  misc_feature (205)..(205): n is a, c, g, or t
tcacgtattaattaacaactccctgttgctgtttgaaggctcattagccattttaagataagtcccagcgcagcttgcaccatggcagagtttacatggaacttagagtcagtatgatgcgaaagtctactgagtctgagttcttacctgtttcacctcaaagtgattttgagtatacctcataagctgagaggagtagtganantatctgaatcattacctgttggtttactgacacttaaagcctgtggtacttgaggagtagagtaatagggcaagagaaatttaattttactatgtagataaagaatggggcaagctgtagtaattcctttatttttaatcgaggatttaagttatataagtacacattaagattctgtttttattgc

SEQ ID NO: 619348 - DNA, 411 bp, Homo sapiens
gtcgacatcgtcgccatcgcccctgagctgctcaacggtgtgtatggcgggaccaaggcttttgtactggccttcactcagtccctgcatcacgaactgagcgaaaaaggcgtcaaggtccaggccgtattacccggggcaatcagcaccgagttctgggatatcgccgggttgccgatacagcatctgcccggtgagatcgtgatgaacagcgaagacctggtggatgccgcgctcgccgggctggctcttggggagctggttactatcccgtcgctgccggatattgccgattggcaagccttcgaacaggcacgccaggccctgaagcccaacctgtcgcatcaggtgccggcggctcgctacacagtaaaaggctgaccttgcaacctgccaccagactcggtcgac

SEQ ID NO: 619349 - DNA, 751 bp, Homo sapiens
  misc_feature (120)..(120): n is a, c, g, or t
agactggagtgcagtgagctgatatccccccattgcactccagcctgggggacaagggtgaaattccatctcagagaacaaagaaaaaaacagaatgttgttatgctacttgtcactgtngggttttttttttttttgggagatgggaggtctcgccctgttggcccagggctgggaggtgcatgggcttggatcccggccccctggcgggcctcccgactccccccgggttcaaggggattctccctggcgttctggctctcccggatatagctggggatctcacgggcacttggcgcaccacgcgcccgggctaattttcggggtaatttctacagctaggagaatggggcgcgtttccaccacaatgtgtggagccacagagaagcgcgcccccgtgcgatccccctgtggaactctgcggcgcaatctcggcccctgccctcctctaaaaggtgacatggggccattacgcgcgggtgtgatggaaggcctcaaccggggggtctccccgagggccaccagaatctctcactcaaatcggaacgaagaaaacccaacccaacaaacgtggggtgccacaagttgcgcaacagcaggggaacacacaagggccagcgaggttacacgccccccacaaacacttaacagagggacaaaggcgccgatgcgacgagctgggcgggggacaaccaacaccccaaaaggggcgccagaggaggcatgtaaagaacgaaccaaaagaccacgg

SEQ ID NO: 619350 - DNA, 944 bp, Homo sapiens
tggggtaaagttggttttttctaaagaaatttgcaatgcaaggtctccttgaccccttgccaaaccctgaaacagctggcccgtggggtccccgtgttttcaggggttctccgggaccacccattgtttctcccacaacccgtgatgcgctgacattccctttagcaccagttgtcccacctccaggttcctgaccaggtcagagatgtccccttgccatgcaaagaaggaagcctcagtgggggccgtggagtgtcccgtgttccagcctgtgccgagggcacgggtttcatcccgtggatactctgtggcccaccgaagaatctgtagccagtcaaaggaggaggaaaaggagcccctttagcaacaatggctgcaagatattcagatcagaagttgtgtctccttgtggcttcaaacccaagagaatatccctgcagggggcctataagcatttccaggggccggggcaagtggggaagccaccaatccctttacaacaccgaccaccaattaaaccagagtgtggggccttcgtgaacatccgcgaatactaggtgctttgacccccaatactacaggggaaccatgaatgttcaacagataaattccagaaaggacaataccacaaaagaggggacaacatacgctggtgaaaaaaggaggcaacactggatcttcgagaggcccccgcaaagaacaatgtgattcacatgggcaaacgaatttgacaaaacaacaacaaccatagcccgtgagtatgggttccacccaaataggtgattaccacaaccaaccagatggattcggatccgacaccatatatcgacaacatgacgaggagaaaacggagggagagaataatactcgaggacccacgcacaagtagacgaatggaaaatcgagggagaggtagagaaacacatcgaggggaaaatagagag

SEQ ID NO: 619351 - DNA, 140 bp, Homo sapiens
tcagctcgtaccccacattacaaatgcttgtatatgaggttaaagaggggctgtgcgtggatatcatgcatttgccattcctggaatcaatgaatcctgagtctgggcaatgaaaccaaatgccaggagttgactggggt

SEQ ID NO: 619352 - DNA, 421 bp, Homo sapiens
ggtagcttcaggttgacctgcttatcaggcctacgtcctttttgatttaagtacagctggaaagtattatctaattaagttcatgatagtgcttttggagaacttgtcaaattacagccaatgagaaaataaggacctagcataccgtggagaaccattaaaaatttgagaagaaaccaccagtattatgtccacctacctccaaaggggaagttttgggaatttaatccagtaaagattcccctgttttatgattgttccttgaaagtcaaatgggggacctgtccattgtgctctattattctggtcaaaaaccggtccccaaaccaaaatttgagtttgcccttgttctagaagttactgggtagttgtaagtataatttttattaaatataatgtaaaataaaatgttaagagactt

SEQ ID NO: 619353 - DNA, 353 bp, Homo sapiens
gcctgggtcctaccccttccaattatgggggggcaacgcccctttttccggggacccctttttcggaaaaaactcttccctttttttaataatttcccccccaaattcctttatttttacctttccaggccccgggcttattatttttttttttttttttggaacccccctttttccccccttggggttttttccccggtggggggaccaggccggaaggctggaggggggggcaaactttttttttttccccctggggggggccccttccccacttcttgggcttattttcccttcccaccccctgggggcccttaaccttttttttctcccccctcccccaccggtttgga

SEQ ID NO: 619354 - DNA, 307 bp, Homo sapiens
  misc_feature (2)..(2): n is a, c, g, or t
gntctctaccggggaggcgggggaggaggggtggagtgtatgggtggagagcgtggattctgaagcccaatggccggggctcaagtcccagctcaacctcggccactggtctgtgatctcagacaagttatctaatacggcggggcctcagcgtactcatttatctaagggggataaaacagtaaatacctcataggttggtcatgtggactagataagttagcaaaggtagggtacttagaacaagtccgggcacataatagggggttcgcttacaaaagttcaggtggaagagaaaggtagagag

SEQ ID NO: 619355 - DNA, 544 bp, Homo sapiens
gttggaacaaatgctgttttttttaatagctcttttgggcagcaggattcgaccggtgcaacctccacaatgatgttttgaaaggtggacttcctctcataaaaaactccgatgcggaaaatgtgaaatacaacagggatagaagtcccctcttgctcacttgtaagattgttgaaaccagtctatctgagacaaatatcatcaccttctagaaaggaatacatcgctatagttatcgaagagcgtgccgattgcataatatatgcgagaatcgcgggcaacaaaaacgcgctctatctgataaccctttaagacaggagggactacgtgtgatcgagagttgataggatgatgagcggtgaaagatcgatccattctcttatcgttcacattggtctgtgcatcctagaagtcgaaaatctgccgactgagcactatggctctgtgaagcaggctctgaccttcgtacttatgtggcgcaaggagcatattgactccttgctgtatagagatagtttcaataagctgtgccctgctttgcatg

SEQ ID NO: 619356 - DNA, 680 bp, Homo sapiens
  misc_feature (516)..(516): n is a, c, g, or t
  misc_feature (533)..(533): n is a, c, g, or t
  misc_feature (596)..(596): n is a, c, g, or t
tcagtggaatatttgattcaattaggggattaggattccagtaaactgaaaccttgtccacagggattaccacagtgagatagtggaaaacaagtggaacagaaaggatagctcatgcctatgagcgttcaggcaaaaagagaagtgaataaatagaagtaatgagattaaataagaaatgatttcatagatttctatttccacagagccagaaagaaaaatcgaggaagatgagcaaatttagcaaaatagcaagaaagaagaatagggagatagagaaaaaaaaaaggagagagaatgaagcatcaagatggaaaatacagccaataagcccactattgtgatcattattttttaggtgtggtatcctgtggtagacattcaacttggtgctccttttctcattacacacactgatcagtagtggtcctagaggataggatgaggcagttgtttttggcacattgtagaaggtgttttctcttctctgcctgcacaggtagatccacacccctntctgtgctccttccttnccacaaactctgtacatacctctcttttcctctgctgctgcatttacccagtccaaaccaccnagatttgtaaaagataatacttctgttggtctttaggtgaatcaagatatcaacaaattttgtctacaggtttgctttgctcac

SEQ ID NO: 619357 - DNA, 146 bp, Homo sapiens
tctcccacctcagcctcctgagtagctaggactacaggggcacaccaccatgcccagctaattttttaaaacattttttatagaaatggggtactgttctgtcaccaaggctcatcttgaactcctgggctcaagcagtcctcccg

SEQ ID NO: 619358 - DNA, 121 bp, Homo sapiens
atgagatgtaagctcttagcttactgttccagcactatgcatgcctgcttgctgctatgttctctgccatgatgatcatgaatggactcaccctctgaaactgtgatgaagcaagccccag

SEQ ID NO: 619359 - DNA, 523 bp, Homo sapiens
  misc_feature (185)..(185): n is a, c, g, or t
  misc_feature (190)..(190): n is a, c, g, or t
  misc_feature (194)..(194): n is a, c, g, or t
  misc_feature (211)..(211): n is a, c, g, or t
  misc_feature (248)..(248): n is a, c, g, or t
  misc_feature (280)..(280): n is a, c, g, or t
  misc_feature (341)..(341): n is a, c, g, or t
  misc_feature (363)..(365): n is a, c, g, or t
  misc_feature (413)..(413): n is a, c, g, or t
  misc_feature (419)..(419): n is a, c, g, or t
  misc_feature (489)..(489): n is a, c, g, or t
gtttatcgactgccacatctgcatgtgtcattcgtccacgtgtgagtcgtccacgtgtgagtcatctgcatgtctgtcagtcgtccatgtgtcagtccacatgtgtgtcagtgtctacatgtaagggtcagtcatctgcatgtatgagtcagtcatctgcatgtctgtgagtctgtcgtccacangtatnagtnggtcatccatgtcagtngtctgcgtatgtatcagtcatccgcatgtgtgagccngtcgtccacatgtcagagtcagtgtccacatntgtgtaaagtcagtcgtccagatgtgtgtgtcagctccagggccctctcttttgatgcatngatctgcatatctgcctttagnnnagtactgtcctttcttgactgatgtagctttacagtaggtcttgcaanatcatntttctcctcccaaacttgatactgctattctcctatattttacacatatatatgttctgaacaccataanagccctgtagttattctgtttgaacagtcagtgg

SEQ ID NO: 619360 - DNA, 88 bp, Homo sapiens
tctccacaaggcttcatgtggccccttatagggcaggcctgccctctgcgaaggtcccttcatgctggaggcacacagctttaaggaa

SEQ ID NO: 619361 - DNA, 870 bp, Homo sapiens
aacaataacatagcaacaacaccaattaggtcatgtacgaggctcgggtgtgtatgaatcccatgcggtgacagagtggagccatggctagatggcatgaagatgtccaatgccccgcgcggtggagtgcggctggcggctgtgctgtgctgtgctgtgtggcagctgacgtgccctgttgccctgtgagatggtgtgagctgtgatgtggtgcccggggaggcccctgcacctgactgtgttgttgatgaactgtatttacctgtgtgcagtcaaatgatctattcctacatgagccctgaacaaatgctctggaatgctgtttcccccttcagtgaagagaactcatgttacacatcacgaatgtcaaatgccagtggtgaaaccatatagcctggaatctacagtgaaactgatgaatgatgaaaagaaatgcttgggaatcgcatgtactgtgatgctgccatgaatgtcctgagtgaacatgaagatcaaatgacgccatggaaatgtgtcccctgtgtaccttttccaaaccaaaaatctgaatgcatgcatgaacctccaaaagactccaccctcatcttgtgattccaccaatgcagccatctgccaagcaatgccctgaaaaagcccatcaaggtgcaaacatgtgcccccctgaaaaaaagctcatggaaaaactgcaacagaatctgcagacttacggatttctaccctgtcctgaaggagctccagtgaagagcaaaagccgagctgcagtctgaagaaatggacagaatagatgattgtttgaacgtgggcagtgagatgcatgatattgcctcatcgatggcaggcggggtgtgttcccccacagttcccgtgtat

SEQ ID NO: 619362 - DNA, 258 bp, Homo sapiens
gaggacacctcacagaaccccactcccagcccagaacttccagatccctggaacctcatagggaccaactgggactcattatggaagaatggggtgagcggagaaatgaggaaagaccctcttatttgtgattctctgtgtacatgttgctgtttatagttgcgcggcaagtgggggaccatcccccttctcaccactgttcctcttgcacgtttaccctcattcatgtggctgtacttaaccttctccgcgctcgaa

SEQ ID NO: 619363 - DNA, 90 bp, Homo sapiens
gcttcgggccttctgggcatgtctgccgtatggctccaggtttgtttttctccccgggactctgacggggagggctcccgtcatctcctg

SEQ ID NO: 619364 - DNA, 289 bp, Homo sapiens
cccttaaaagaaatgaaactatcctcataaggcctgatggctcacaccatccaggagatctcctctgctaccaactcccagcagctgattcagcggtccttcatgaacaataggcaactgaacaagaaaatgagtttatattgttcaaaagaaagaagaatgcctcttttttcccttgaacaagggaggtggagactaacaaaagattctttgcttgaccaaactttagtcaggcttctaaatcttcccctcggcccgtctgtgcacttccttgtgaaatccagtttta

SEQ ID NO: 619365 - DNA, 924 bp, Homo sapiens
tccagcggtagataataaaaattaaatagcaatatcataaaataacccccctttttaaaaaatcaagtattagttccggattattagaaataataatccttaataaatccaacatactgatagggcggcaaaataaaattaattttcaaatacttatttatgccaccccagccggcttgggcactccaggaggttcaaaacacttggctttttattcacgcaaaaactatcgggcactggttagcacacctcttaacgaaaaaccgaggtttatactgggctattatggtgtattgacagcgggtgtgtatccacacaattctttaatgacctaactaatatcctctctataacagaaagaagtccaacgaggcaaaactatttccctccctcaggtatcctagttcaccaaaaagcggtccacgggtagtcaaaaaaaaaacaacaaaaaaaaaaaagggggggcgccggcccatcaagaatctttcccccccgaggagggggccccagcgttcagcgcggctaacccccgattttctcgggacacaaggggggcccctaaagaggaggagcggtcaaaaaaaaagccagaggacgagggccacgcagcaaaaaaacaacgtccgccgcacgggaacaaacgggcccaacggcgacaccctgggggaaggcaccccccaacccccgggcgggcggagaccacattgggacaaccaccacctgcaggagagatacaacggcccaaggggaaacctcaaaccttcacgggcaccagggggcaacccaacacgcatttcggcggggcgacaaactggcaccggcaactatttagcaaattatcaggggagacaacccacccccacaccaccacaccagcgtccagcggcgaccgacaccccacatcaccacacaccgcgaacaagc

SEQ ID NO: 619366 - DNA, 250 bp, Homo sapiens
tactcaagtctataaagactcgatttggattacactttatggctgctgctttacatttctttgataatgtatattttttctttcaatacccagaacctggcttggctcacacgggaaattgttgcattactttggataccgattgctttaatggctcctcgtgccgtagatttaatttatacaggtaaagtggagtacgctttcgcaataattcatagttttgtattagcccactggattccctttgggg

SEQ ID NO: 619367 - DNA, 361 bp, Homo sapiens
  misc_feature (273)..(273): n is a, c, g, or t
  misc_feature (299)..(299): n is a, c, g, or t
cttcctccagttacctctccctcacccaactcttcaccccctctggggagccttccccacccttatctgtctcctcccccagggagggatggaggagataatttgctatatattcttaaacgaaacatgtctgagccaggagtttgggacacagcctgggctatatagcaagaccccatcactacaaattttttacaaattaactaggtgtggtggtgcgacacctgtggtcctcaactactcgggaggctgtggtgggtggattgattgagnccaggtggttgagactccagtcagcngagattgcacctctgccctccagcctgggcaacagagcgagaccctgtctccaaaaaaaaaa

SEQ ID NO: 619368 - DNA, 122 bp, Homo sapiens
cccgaggaaaggtatcgcctcaccattgctgaagagagagacaaaagactggatcagagtagtgggtgaaatgggtccctgggtgacatgtcagatctttgtacgtcatttaaaatattgtg

SEQ ID NO: 619369 - DNA, 300 bp, Homo sapiens
cctctagacgcaaacgaacagcgccaggctcatctcactaaccagtatacgcagagaatggtatgtgtacgagctgttcccaagcctgttatcaacccctaccatccaggacctccttcgaggttacttcatggctggtatcccacatactcaaaaccgtgctgcatactattctcctagctatattgctcaattaagagcaagtcctcgctggactggtcaggatgccagagctcatccattccataatatgcccggtgctatccgcccagttgctcctagagcaccctcctctttcga

SEQ ID NO: 619370 - DNA, 330 bp, Homo sapiens
gcactttgggaggctgaggtgggcggaccatgaggtcaggagttcaagaccatcctggccacatagtgaaaccctgtctctactaaaaatacacaaaattagcccagtgtggtggtgtgcgcctgtagtcccggctgctcaggagggtgaggcgggagaatcgtgtgagcccaggaggcagaggttgcagtgagccaatatcgcaccattgcactccagcccaggcgacagtccgagactcatttaacaacaacaacaaaggttatttactttctaccctttcaatcggtcgtccagggcctattatagggttccctaagatgttatatc

SEQ ID NO: 619371 - DNA, 1434 bp, Homo sapiens
  misc_feature (450)..(450): n is a, c, g, or t
  misc_feature (454)..(454): n is a, c, g, or t
  misc_feature (458)..(458): n is a, c, g, or t
  misc_feature (701)..(701): n is a, c, g, or t
  misc_feature (787)..(787): n is a, c, g, or t
  misc_feature (805)..(805): n is a, c, g, or t
  misc_feature (819)..(819): n is a, c, g, or t
  misc_feature (823)..(823): n is a, c, g, or t
  misc_feature (830)..(830): n is a, c, g, or t
  misc_feature (842)..(842): n is a, c, g, or t
  misc_feature (844)..(844): n is a, c, g, or t
  misc_feature (909)..(910): n is a, c, g, or t
  misc_feature (935)..(935): n is a, c, g, or t
  misc_feature (963)..(963): n is a, c, g, or t
  misc_feature (973)..(973): n is a, c, g, or t
  misc_feature (975)..(975): n is a, c, g, or t
  misc_feature (989)..(989): n is a, c, g, or t
  misc_feature (1007)..(1007): n is a, c, g, or t
  misc_feature (1021)..(1021): n is a, c, g, or t
  misc_feature (1033)..(1034): n is a, c, g, or t
  misc_feature (1060)..(1060): n is a, c, g, or t
  misc_feature (1071)..(1071): n is a, c, g, or t
  misc_feature (1075)..(1075): n is a, c, g, or t
  misc_feature (1078)..(1079): n is a, c, g, or t
  misc_feature (1081)..(1081): n is a, c, g, or t
  misc_feature (1102)..(1102): n is a, c, g, or t
agcggggcggaacgggggcgtgtccccctttgaccccgcccccgaatggatgttccattcaattggctatcatcttccctcattccctagccaagcagtgttctcttcgtccccctcccccaaactgaggattgggcaataccacagaacctcaggaaaggggggaagagcgagcttcggccccactaatgggggagtgggcggaggctggatttcccacctcggctgcacctgggcactggaggctgaagaggaaagtgagaatctgaagttttgagacctctgactggccaggaatagctcctggggcggggggcaaggatgggaccataggcggaaagagtctcgcggtcccccctgcttctggcgcgggtccctgcgcccggttgtggagcgtctcgcgcggggagggggcggggggaacggcagctcgcggtgttgttcactcgngcgngagnacacggtgggtccggcggcgggttggcgccccaggcggcgttccctgtggcctggcgcctgggccgctgccctgagcgggttccgccccagagcccgacctcctgggggctctaggcggagtcccgcgagccgagggggaccggcgaccgctgccgaagcatgaagaaggggtaaggcgtgagcccccaagatttcacggtgaactggcacaaaggttaatctcaagatgccgctagtgaacnagaaacatcgatcctaggcacttgtgccacacagcactgcctagaggcattaagaatgaactggaatgtgtaaccaatatttcctnggcaaatataattagacnactaagtagcctangtanatatgcngaagatatattngnagaattattcaatgaagcacatagttttccttcagagtcaactcattgcaagaacgtgtggaccnntttatctgttagtgttacacaggtngatccaaaggaagaagaatggtcttgcnagatataacnanggaggaaagctttncgaagttctacaattcangaccagcagctttncgatcgcaagannttgctattccattacaggagacgtangatgttgtgancagnctnnanctctcaatatactcactcctnatagagatgatggtaaagagggcctggcagatatgatcccagctccttcgaaattctatgagcgacggcagagcacgggtgccgagtccgaggctccgagcaggaccagcggcgccgaagcgcgcaaaatctgatggtctctgtacgcgaaaaggtgcaggccctcatgcatggtgcgcggaaggagaacacggccaggcacaacgtggcgacaagcggacagcgcgacaaagaagtacagagcgtggcggcgcaacgtggacacacggacgcgctaagggacgccccggcgctggaacgtggctgacggggaggagccaagccccccacga

SEQ ID NO: 619372 - DNA, 193 bp, Homo sapiens
gctcgacaaactgcttaaaaataagtaatgtattagacatttttcatatcccttttagcccatagtatagtgctaggccagagtcggctcttattaatagtggtggctctttctggaagcttcctaagtttttgtgctgaggattttaaccctcctgtaaaacagataatgccttcccaatggcctttttttt

SEQ ID NO: 619373 - DNA, 104 bp, Homo sapiens
cgtgaaaggccctggcgacgcggccaggcgcgcctgcagcttctccacaacttggagcgccgactccgccgccatcgctgtcactggcgccgaggctatagttg

SEQ ID NO: 619374 - DNA, 536 bp, Homo sapiens
attcattctgaatctgctggtgtctagggaatagaggtcccagtctgaatctggcgacgtgacgaggaggaatcacgtggcgccagtctggagattaggcaagtgtaccagggtaacagatgccccattctggagttggctgagtgttcgagggagatagaggccctgactcctggagttggtgagtgtacgagggaaacagaggccccactcctggagttggcgagtgtaccaggggaacagagactccactctggagctggtgagtttacgaggggatgagaggctccaatctggagtctgggagtgtaccaaagggaatagaggccgcaatctggatttgacgagtgtacgagggcaatagaggccccactctggagttggcgagtgtacgaggggaatagagtccccactctggagttggcgagtgtacgaggggaatagaggctccactctggagctggtgagtgtacgaggggaatagaggcccgatctggagttggcgagtgtacgagggcatagaggcccatctggga

SEQ ID NO: 619375 - DNA, 1544 bp, Homo sapiens
  misc_feature (450)..(450): n is a, c, g, or t
  misc_feature (454)..(454): n is a, c, g, or t
  misc_feature (458)..(458): n is a, c, g, or t
  misc_feature (811)..(811): n is a, c, g, or t
  misc_feature (897)..(897): n is a, c, g, or t
  misc_feature (915)..(915): n is a, c, g, or t
  misc_feature (929)..(929): n is a, c, g, or t
  misc_feature (933)..(933): n is a, c, g, or t
  misc_feature (940)..(940): n is a, c, g, or t
  misc_feature (952)..(952): n is a, c, g, or t
  misc_feature (954)..(954): n is a, c, g, or t
  misc_feature (1019)..(1020): n is a, c, g, or t
  misc_feature (1045)..(1045): n is a, c, g, or t
  misc_feature (1073)..(1073): n is a, c, g, or t
  misc_feature (1083)..(1083): n is a, c, g, or t
  misc_feature (1085)..(1085): n is a, c, g, or t
  misc_feature (1099)..(1099): n is a, c, g, or t
  misc_feature (1117)..(1117): n is a, c, g, or t
  misc_feature (1131)..(1131): n is a, c, g, or t
  misc_feature (1143)..(1144): n is a, c, g, or t
  misc_feature (1170)..(1170): n is a, c, g, or t
  misc_feature (1181)..(1181): n is a, c, g, or t
  misc_feature (1185)..(1185): n is a, c, g, or t
  misc_feature (1188)..(1189): n is a, c, g, or t
  misc_feature (1191)..(1191): n is a, c, g, or t
  misc_feature (1212)..(1212): n is a, c, g, or t
agcggggcggaacgggggcgtgtccccctttgaccccgcccccgaatggatgttccattcaattggctatcatcttccctcattccctagccaagcagtgttctcttcgtccccctcccccaaactgaggattgggcaataccacagaacctcaggaaaggggggaagagcgagcttcggccccactaatgggggagtgggcggaggctggatttcccacctcggctgcacctgggcactggaggctgaagaggaaagtgagaatctgaagttttgagacctctgactggccaggaatagctcctggggcggggggcaaggatgggaccataggcggaaagagtctcgcggtcccccctgcttctggcgcgggtccctgcgcccggttgtggagcgtctcgcgcggggagggggcggggggaacggcagctcgcggtgttgttcactcgngcgngagnacacggtgggtccggcggcgggttggcgccccaggcggcgttccctgtggcctggcgcctgggccgctgccctgagcgggttccgccccagagcccgacctcctgggggctctaggcggagtcccgcgagccgagggggaccggcgaccgctgccgaagcatgaagaaggggtaaggcgtgagcccccaagatttcacgtgtcggagaaatcagcatgttaaaacaacttgtcgcatgatacgctggtgcagttaccagtgcagtggaacgctatggctgcacaatcgtttaaaatccttcaaggtgccgtgaactggcacaaaggttaatctcaagatgccgctagtgaacnagaaacatcgatcctaggcacttgtgccacacagcactgcctagaggcattaagaatgaactggaatgtgtaaccaatatttcctnggcaaatataattagacnactaagtagcctangtanatatgcngaagatatattngnagaattattcaatgaagcacatagttttccttcagagtcaactcattgcaagaacgtgtggaccnntttatctgttagtgttacacaggtngatccaaaggaagaagaatggtcttgcnagatataacnanggaggaaagctttncgaagttctacaattcangaccagcagctttncgatcgcaagannttgctattccattacaggagacgtangatgttgtgancagnctnnanctctcaatatactcactcctnatagagatgatggtaaagagggcctggcagatatgatcccagctccttcgaaattctatgagcgacggcagagcacgggtgccgagtccgaggctccgagcaggaccagcggcgccgaagcgcgcaaaatctgatggtctctgtacgcgaaaaggtgcaggccctcatgcatggtgcgcggaaggagaacacggccaggcacaacgtggcgacaagcggacagcgcgacaaagaagtacagagcgtggcggcgcaacgtggacacacggacgcgctaagggacgccccggcgctggaacgtggctgacggggaggagccaagccccccacga

SEQ ID NO: 619376 - DNA, 579 bp, Homo sapiens
gtggagaaccctagcatgagtgtatgtagcccactgtcgacctaggaattgaaagtcatgaagtgatgcgaggacaaagcctgcggagtatctcaccctgtgactcatgctctacccacagccgcgtgcagttggaacacccatggctcatcgtcagactccggagagacctgccccatttgcaagccagccgtgttcctatcggggtcactcgggacgaagaccaacaggaagaaactcaagggcaagaggagggcgatgaaaggggagccaagggaccacccgtgccatcagaaaggaccccacttgatgggctgtctagccccactcttcccacctcctttggttccttagccccagctcccattgattcttattacctgggccttcaacagatcccccagcatgtcccctccgctcttaccccatgtgtatcctggtctaataaccccgcacacaaaacacctctggtgacgcatactttgacacagaccgtcgtcttcacctccagtcttctgagggataggggacattccatccaaagcttctccctacctacacctatcctttgaggggctt

SEQ ID NO: 619377 - DNA, 339 bp, Homo sapiens
ttccccgaatagggggggcaaatgggctcgagccccccgggccttccccctccctaagctttcgggatgggccccccctattggccggtttggatccttgcctaggcccttttcccccccagatgggtttttcctccagggggccccccctggcccccccccattggcccccctccccctggggtttttccttcctttgaacttttttagggggcccggcttgggggggtcctggggcccttaacccatgcctttgggggccgcccttttttttttttttttttttccaggtttgggagggggggggggattttttaattaatcctggaatccatccca

SEQ ID NO: 619378 - DNA, 153 bp, Homo sapiens
  misc_feature (1)..(1): n is a, c, g, or t
nagtggaaagatgcttagagcctcatgtaccgacaggaaaagatgtacacaccagagtattggcagcaaagttttttcaagtccatctgctgtgagctctcttttattgaccatgcaacctgcattattgtatcacgaacatggtagtttatg

SEQ ID NO: 619379 - DNA, 370 bp, Homo sapiens
gacccacctaggattatataataaaaggggtaagcggtataataggaatgtctgttcagacggtttgaaaacagttaccttgagaatttgtattccttgacccagcaatcccacttgtgaaaatctgtcccaaggaaaaaaattagaaatacagttaaagccgcctgggcacagtggctcacgcctataatcccagcactttgggaggccgaagcgggcagtgcgggttgagtgcgggagtttgagaccagccagagcaacatagcgagaccctgtctctacacaaaatacaaatagtttgctgggcatggtggtgtgcaccagtagtcccagctatctgggaggccaaggcgggaggatcgcttgagcc

SEQ ID NO: 619380 - DNA, 122 bp, Homo sapiens
gatacgactctcattctgttgccaggtgagtgagtgggtgatctcagctcactgtagccttgggctccaggcttaagtgatctcccacttcagcttcccgagtagctgggacgcacaggcat

SEQ ID NO: 619381 - DNA, 625 bp, Homo sapiens
  misc_feature (543)..(543): n is a, c, g, or t
  misc_feature (549)..(549): n is a, c, g, or t
  misc_feature (583)..(583): n is a, c, g, or t
cagtgtttccctgtctcctgcccatatcactggaggtgtctgtgagggtgtgcaaaaggagattaacatttgagttagtggactgggagaggcagacccacactcaatctaggtgggaccatctaatcagttgccagagcggctaggataaagcaagcagaagaacgcggaagggctagacttgctgagtcttctggacttcatctttctgttgtgctggatgcttcctaccctcaaacatcagactccaagttcttcagcttttggactcttggacttagaccagtggtttgccagggactctcaggcctttggccacagacagaaggctgcactgtcagcttccctacttttgaggttttgggacttggactgatctaccactgacttccttgctcctcaacttgcagatggctttaccttgtcatcatgtgagtcaattctccttaataagctccctttcatatatacgtatatcctattagttctgtccctctagagaaccctgactaatacaataggatgcacacacacacagaaaancaaaancaaataaaagcaaataaaacaaaagctcaggttnctctccagttgacattcaaaaccagaaaaatatgtaaccatg

SEQ ID NO: 619382 - DNA, 585 bp, Homo sapiens
  misc_feature (279)..(279): n is a, c, g, or t
  misc_feature (323)..(324): n is a, c, g, or t
  misc_feature (327)..(327): n is a, c, g, or t
  misc_feature (355)..(355): n is a, c, g, or t
  misc_feature (363)..(363): n is a, c, g, or t
  misc_feature (389)..(389): n is a, c, g, or t
  misc_feature (396)..(397): n is a, c, g, or t
  misc_feature (399)..(400): n is a, c, g, or t
  misc_feature (405)..(405): n is a, c, g, or t
  misc_feature (412)..(413): n is a, c, g, or t
  misc_feature (422)..(422): n is a, c, g, or t
  misc_feature (424)..(425): n is a, c, g, or t
  misc_feature (441)..(441): n is a, c, g, or t
  misc_feature (449)..(449): n is a, c, g, or t
  misc_feature (451)..(451): n is a, c, g, or t
  misc_feature (490)..(490): n is a, c, g, or t
  misc_feature (493)..(493): n is a, c, g, or t
  misc_feature (496)..(496): n is a, c, g, or t
  misc_feature (507)..(508): n is a, c, g, or t
  misc_feature (519)..(519): n is a, c, g, or t
  misc_feature (527)..(527): n is a, c, g, or t
  misc_feature (535)..(535): n is a, c, g, or t
acgcggcaccgcgcgtttcaaatgcaggcgattcctgaggacgccatccctgaggagagtggcgatgaggacgaagacgaccctgacaaggcgcatctcgatctgctcctctgacaaacgaattgcctgtgaggaagagttctccgacttctgaagaggagggagaggggggccgcaagaactcttccaacttcaaaaaaagccaaggagagtcaaacacagaggatgaacaaagagaaagacccagaggagaagaaagaagtcacgaagaggagaaancaaggaggagaagccagaagccaaaggggtcaaggaggaggtcnngtnggcctgaatggacctctccagctctggnttcctgcngagtccctcacgtttcttccccaacncctcagnntnnatatnttctatnnctctgtgtntnnatatcaaatttattanatataatntnccccagggacagaaaccaaggccccgagctcagggcagntgngcngggtgagctcnnccaggagccancttgccanccattctncccgtacttaactttgaaccgggcggagcgacgtgcggtaccgagctcga

SEQ ID NO: 619383 - DNA, 129 bp, Homo sapiens
ggagcatcagcagtgcacatcacgatttgcacagcacatgttttcattcacatcacagcacagcacacagtggcaggttgcacagcagcatcagcatcagttgttcagtttgcacattcacacagcatg

SEQ ID NO: 619384 - DNA, 853 bp, Homo sapiens
  misc_feature (16)..(16): n is a, c, g, or t
  misc_feature (65)..(65): n is a, c, g, or t
  misc_feature (79)..(79): n is a, c, g, or t
  misc_feature (83)..(83): n is a, c, g, or t
  misc_feature (85)..(85): n is a, c, g, or t
  misc_feature (104)..(104): n is a, c, g, or t
  misc_feature (112)..(114): n is a, c, g, or t
  misc_feature (125)..(126): n is a, c, g, or t
  misc_feature (132)..(132): n is a, c, g, or t
  misc_feature (146)..(146): n is a, c, g, or t
  misc_feature (163)..(163): n is a, c, g, or t
  misc_feature (170)..(170): n is a, c, g, or t
  misc_feature (175)..(176): n is a, c, g, or t
  misc_feature (181)..(181): n is a, c, g, or t
  misc_feature (185)..(185): n is a, c, g, or t
  misc_feature (190)..(191): n is a, c, g, or t
  misc_feature (194)..(195): n is a, c, g, or t
  misc_feature (197)..(198): n is a, c, g, or t
  misc_feature (201)..(202): n is a, c, g, or t
  misc_feature (207)..(207): n is a, c, g, or t
  misc_feature (209)..(209): n is a, c, g, or t
  misc_feature (215)..(215): n is a, c, g, or t
  misc_feature (229)..(229): n is a, c, g, or t
  misc_feature (231)..(231): n is a, c, g, or t
  misc_feature (253)..(254): n is a, c, g, or t
  misc_feature (261)..(261): n is a, c, g, or t
  misc_feature (271)..(271): n is a, c, g, or t
  misc_feature (273)..(273): n is a, c, g, or t
  misc_feature (284)..(284): n is a, c, g, or t
  misc_feature (296)..(296): n is a, c, g, or t
  misc_feature (299)..(299): n is a, c, g, or t
  misc_feature (306)..(307): n is a, c, g, or t
  misc_feature (320)..(320): n is a, c, g, or t
  misc_feature (341)..(342): n is a, c, g, or t
  misc_feature (344)..(344): n is a, c, g, or t
  misc_feature (346)..(346): n is a, c, g, or t
  misc_feature (350)..(351): n is a, c, g, or t
  misc_feature (358)..(358): n is a, c, g, or t
  misc_feature (370)..(371): n is a, c, g, or t
  misc_feature (377)..(378): n is a, c, g, or t
  misc_feature (384)..(384): n is a, c, g, or t
  misc_feature (387)..(387): n is a, c, g, or t
  misc_feature (390)..(390): n is a, c, g, or t
  misc_feature (396)..(396): n is a, c, g, or t
  misc_feature (411)..(412): n is a, c, g, or t
  misc_feature (432)..(432): n is a, c, g, or t
  misc_feature (441)..(441): n is a, c, g, or t
  misc_feature (446)..(446): n is a, c, g, or t
  misc_feature (455)..(455): n is a, c, g, or t
  misc_feature (457)..(457): n is a, c, g, or t
  misc_feature (468)..(468): n is a, c, g, or t
  misc_feature (480)..(480): n is a, c, g, or t
  misc_feature (512)..(512): n is a, c, g, or t
  misc_feature (538)..(538): n is a, c, g, or t
  misc_feature (562)..(562): n is a, c, g, or t
  misc_feature (570)..(570): n is a, c, g, or t
  misc_feature (583)..(584): n is a, c, g, or t
  misc_feature (588)..(588): n is a, c, g, or t
  misc_feature (606)..(606): n is a, c, g, or t
  misc_feature (608)..(608): n is a, c, g, or t
  misc_feature (613)..(613): n is a, c, g, or t
  misc_feature (620)..(620): n is a, c, g, or t
  misc_feature (632)..(632): n is a, c, g, or t
  misc_feature (670)..(670): n is a, c, g, or t
gggtcccttccctgcngggcgcggactcggtagaccccccagaggaaggggcctagggagggggnggttccgccgcccnggananccgggggccacgcggtganggcaaagnnncggggcccagnncctggnaaaggggtggaggngaggggcgcggggcggngggcgcngggcnntgggnagcnccacnngcnngnnccnnggaangngggggntcaaaggggggggngngggggcgggaggggggggcggnngggcggngggagggggngnggggggacagngggggggggagnggnggggcannggcaaaggggganggggagggggggggggggggnngngngcgnnggggggncaggggggggcnngggggnnggggcnggnggngggggngggggggggagggcnnagagcccccagggagggggngggcagggncaggncagagccangnaggggggccanaggggcgcccanggggggggagcgaccccaaccgacggaccganggggggaccacagggccagcgagggnaaaggaggcccagaaaggagaaangcgttgcncaacagccacagnnggcngacgtaaccgagtgtagngnagggncaggggnggcctgagggangagccaggggggtgggcaggggacacaccagggccccnccctggcctctgccccacccagccctctcctgcacggctaccagaagatgtccgggaagaacagactagccctgagtagggagtgtggtcaggtgcagaggagggcaggggcccggatcctggcccagaaacactctaaaacagaatccgatcctgagatgatccaaatcaaacagaaacttg

SEQ ID NO: 619385 - DNA, 1226 bp, Homo sapiens
  misc_feature (907)..(907): n is a, c, g, or t
tgaggggtgagcagagtgatgacgtgctgaggggcgggtctgttcgtgttgtctcgggaccaccccagatgtcgctcgttggcgcgccgctcggcagtatcagctctgtctgtggtggacagagggagatcaaattagaagggtctgttcatacaaagtgtgttgtgcatcgtcgtggagaacacacctttgggggagttgtgtggttagagggagttgtttgtagaaacaccagcgtgcagaccccccttctgttggaatggggtcttttctgtcgggaagagaggacagtctttgtccaaacccttgcggcgagagaggagaagacttcttgtctgtttaagaggccgttgacgcctttacacccccccgaggggggaaacctttataggacccgtgttttaaaaataattacgtggctccccgtgagtgttcccccggtgggtgcttcaacgtgttcctgttcccgtgtctgttgaaaccgaatgtgagaactcttgggaggaaccggcgtggtccttcgacaccagtgtccctgttggcccctgggcctgggcccggggaaggtggccaacggcgacccggactgaccctgccagtgacccccggattgcccgccgccccgagggaccacttttatggcttcccatttcgcagaagctcgctcgccccaagacgccctcggcgaacaccccacccttcgcggggctcggctttcggagaggacccccgccctgcgcttcccgggttcgtgtgtccccggggactgtgttctgtacacgggccataagtttctggataatcgcacacatccccggggcctgtgtgtctgtgagctgcggtctcgtttctcgataatcccaccacaccctctggtgtggcccgcccttacattccctgcgttcgnagaaagtgataaccgtggagaatacccaccgggacccaaatattcttcgccagaggccttgcccggatggttgtcccataaacctgtagagtcttaattgcgtgatcccactcaccagagaattaatcgttccagttgaaagcaagttactgatagacttttccaaaaccaaatggacccccgtgagctgaccagagaacccgtatcgtagaggtttcgtagtttagtgcttttattttgccatagttgatagttgactagctaatataacttgtaaatgtataaccatgcgaatataactgcgttttttatttttcca

SEQ ID NO: 619386 - DNA, 499 bp, Homo sapiens
aatcatatcatatctggacacatgagcgataaagccaagatactcaacccttgcagaagagaagtacttccatacagtgaatcaggaattttcaaaggtaatattggaactagacgccatttctgatttgcgaaaaaggacttctactatacaactatgacagcaatactcggcactggactagacctcccactgtaaataacgggaaaaagcgcaaatacattaaacaatactagtacgccaatagataatcggcagagtgcgactgtgatctctctgagaaggaagccagtcaggtgagcactacaatcatctcagctataaacttggagatgtttaccaaaccaagtacaggtcggaggaacccaaaataagcacggatattttactaaactccgcaactagtgatcaggagttcagtgacagtggggcagctagaacttgctgaacaaagtacccgagaagagaaggaatgtagaaaatagaaaaaaaattgaat

SEQ ID NO: 619387 - DNA, 119 bp, Homo sapiens
ggaggcgccgccatttttgctgcccggacgcggagcgagaggctgagagagtcggatacactatccgcttccatacagatcgctgaacctgctgtttccgctgccgctatggatgatcg

SEQ ID NO: 619388 - DNA, 407 bp, Homo sapiens
  misc_feature (246)..(246): n is a, c, g, or t
tacatgttccatggaggcacaaattttggcttcataaatggagccatgcattttggtgactacaaggctgatgttaccagctatgactacgatgctatattgacagaggctggagattacactgccaaatacaccaagcttcgagaactctttggaaccttctcaggtacaaacaaggaacagattcaagcatccacttgggctcgtgcttttgctatgagcccttggagtttttgctgtcttctncctatcctacctcaactctagctaacccatattcaagaatgtcctagactgctgtgaaacgtatctcagtgtgtgcataaggccctgtattccacccaccccactgccaaaaataaataagtaaataagcaaataataaagccaatcttgtagataaagta

SEQ ID NO: 619389 - DNA, 665 bp, Homo sapiens
ccatagtggttggacgaaagctgtccctgacacagaaaccaattggctgtatcaggctgctgatgtcggcccaaacagaggcagggccggatgagattatatgataacttgcttgtgggaaggaatgaaaaagcctgtactaagacctgttaaattttctaaattacaagaagtcacccaggagccgtctgagaacctcacccttttccaagctagattggtggaggccatgcgtaaatatgtaaatttagaccctgaaagccctgaaggccaatccattctcgctgtacattttgtaagtcaggcttacccagacataagacaaaaactccaaaaattagagcaaggcccacaaactccctttcctattttattaaatacagcctttgaggttttcaataaccaggagaaaacatcaaaaataaaaaaggctgaattggaggaggaagaatgccatcactaagctaattacatggcaacagccttggcacattctttttcttcatctaataaccccaaggctcatccctacactactaacagaatgggggcctgtcattgctgcagaatccaggacactggagtagagaatgttccaaccggcaggttcaagccattccaggacctgtctcttgcaacagaggtctggagagcaggtctctctc

SEQ ID NO: 619390 - DNA, 329 bp, Homo sapiens
ttttttttttttaaataataatgcattgtatattttattttgttttgttatttattatttttgagacagagtctcacaatgttgtctaggctggtgtcaaacacctaggctcaagcgatcctctggccccatcctcctgagtagctgggactacaggcatgtaccaccataccacaccatttgtatattttaaaattgcttgtgtacgatgctcacgatctggctgacaggatcattcataccccaaacctcagcatcacacaatatacccatataggcaagcctgcacatataccccattaatctaaaggtaaaagttaaaaatactt

SEQ ID NO: 619391 - DNA, 175 bp, Homo sapiens
gttttaactttggcccgggggggggttacctttttcccccgggaaccccttttgccctttggccttttttggtggcccttttaaaccagttttttccaaaaaaccgggtgggtccggtccgggatttccggggtttttttgccccccgggtccccccccgggtccggcctttcca

SEQ ID NO: 619392 - DNA, 444 bp, Homo sapiens
caagtggcttcaaatatcaggtgaacaacactatcaaagagatagtgctgtcatccaggctatatagtactatcaatagagcagaggcagagcagatatcgtagtcactctatcaggacccaaggatattcagaatggtcaatgaacatggcttcaaagtaaccagcggagttaacccctcacaaggaattcagctagacctttgaagctttgaagccaggaatgaacttctcgtctagctcagcaaagtcctcacagagtatcttccaatataaggctgtatagtctacgtagaaaatcgggtttagtgagtgtagccatcttcatgaattacctcagctagatcttctcaaagaacttgctgcagtttctacatcaaacacttgctgctttaccttgcacttttatgttatagagactctgtctttccttattttttctttg

SEQ ID NO: 619393 - DNA, 969 bp, Homo sapiens
taatacgtagttataaatatatttggtcaaaatatttgatcaatatggtcaaaacatttgcacgtaaagctataaaataaggtcaagggtgaagtgtttagggattttttcttttttttttttttgtaaaatataaaagctccagtatatataaggaagcagtcgtggtgataggggtggtggaaatgtgtgtgtgtgcccgttgtgtgttgttgtgtgtgtggggtggtggtggtgtgtggtgttctcgtggtaaccctctcgtgtgtctccccagtggatacagtgtcccacccgtgtgctccccaaagactccaccttatttcccctccaaaaataaaaaaaacaacccccacaggagaactcggaggagaaaggacagaagagacaaaatccgcgcggggagcccccccaagaggaccattatatggtagagcacaaaaaaaagtgggaggggcacaacaaatttaaaacaaaaaacacaaacaacacaacaaaaaaaaacaaaaaaaacaaaaaaaaagaagaaagaaacaaaagagaagaagagcaccagagccgcgaaaaagagggcagacaagagaaggaagagagaaaaggagcaccagagaggaacagaaagagcagaaaagagagaggaggagagaggaaaaagagacagccaacggggggggaagagacacacgcacgaaaagaagagacagaaggaaagaaagaagccaacaaagagaagagaaagaaagcggaggaacgaagggagagagccacagacagagggcagggagaccgagagacggaagcgaggcaaaaagagacgaaacaaaaaaacgagggacgggacaaaagaaaggacgaacgcgagagaagaagaaaacagcgaaagacaagaagaaaaaaaaagaaacagaaaggacaacacaaaaagacgacagaagggaaaagaaagaccagaaagcgaaaaaaacaacg

SEQ ID NO: 619394 - DNA, 241 bp, Homo sapiens
gtagctcaagcactgcctgccttggcctccaaaagtactggaattgcaggtgtagagccaacatggctggccctatcatatagatcttacacataattttttcgacttacaactatttctttttggggggtgtaaatgtaaattacatggttttaaatttctttctttttttcttttttgagacagagtttggctcttgtggcccaggctggagtgaaaaagcgagacgagactccatctc

SEQ ID NO: 619395 - DNA, 256 bp, Homo sapiens
ggcgctgcaccgggcccaggagcgcctggatacagccctgcagacgctggcggaggcgagacaggcggctgatgcgacgcgagagcggacactgcaggtcactcgacaaaccgggccatgacggctgaggagcagatggaactgcaggagatgcagctggagggggccgcgcgccttctcctcctaacacgcctcaccatgccctcaccctaccttgcctggtctccttctcccatcgctggatgtggggctgcgc

SEQ ID NO: 619396 - DNA, 130 bp, Homo sapiens
  misc_feature (77)..(77): n is a, c, g, or t
gagggccaaggtttgggaagcataacaagggcttaagcactgcctttttaagttggataagccaacaaagcgtttgnggcaaaagtacttgttggcagccgcacaaaagaaaggtgttgtcccagggaaa

SEQ ID NO: 619397 - DNA, 325 bp, Homo sapiens
ctggttgctcatagttctgcctcagcatcccaagtactgggattatatgtgtgaacaccacagcttgccagaagacaatttatctatagatagtggaagggagagaaaggagacctgggtctcccaggaagcaaaggggacaggcgccttaaaggagattgcaggagtcatagggcctcctgtgagcccacgggagtaaaggtgacttcgggaggacaggcccaccaggtttggctggttttcctggagctaaaggagatcaatgacaacctggactgcagggtgttccgggccctcctggtgcagtgggacacccaggtgccaa

SEQ ID NO: 619398 - DNA, 152 bp, Homo sapiens
ttttggggggggggaaaaattttatttggggagaattttaaaaaccccaagcttttttatttgtttgaaaccaactttttgcccgttacctttttggtttttacccattaaaaaagcccagggcctttttgttttttattgggttttccccc

SEQ ID NO: 619399 - DNA, 127 bp, Homo sapiens
aggttaggcattgagcagacttacagcctaagattacagatgctgcttctgactcaatgtaaagcacctgcctcaatgtaaagcgtccagcggcagtgcgacctgctgctggcttcgatgattttga

SEQ ID NO: 619400 - DNA, 795 bp, Homo sapiens
tacatggtattgtgaagacgtgactctttctctgtgtctagaaacaaacacggatgtgaacctttggagttcccattggttgcatattaaacaaccaccggatggtcacacccacgtgagccgctacacttacacttcatctggcggacgtaatgcatttagcaccaccacgggagcgtggcaccatatgttacgccagaagacctatatacatcactctatgcgtgcggttgaatagaaaattggcgcctcgttattttagtgggcgccgcacattgtgggaacaccctcctgtgggtcaatgccctccctctctggacgttctaacgacccccttcttttagaagagtcataacctctcgcactcgctccacgacagcctcgctccccgagtggggagagacatgacgcacgccgctccgccacaccccttgggtgggtggagccccgctcacgccgcacgggagaaagtcatgtctttatttaacaaccacgcgtctctctatagaacaagatgaatcactcactcttgtattcaaagaggcatctttatattatgcacccaagagagtaatacatagattatgctcaccattatgcggcacacatgcctcgtcacgaagagttcatccttctcgatgttatacgacacctcaagatgacaccccccattttcgagaacactccccatcacaccttcttctacgcatggtagtagagtttattgtaccatacgccgatcctctctaataaccacccttgcttcttcgtctacaaaccagacaaacaaaacac

SEQ ID NO: 619401 - DNA, 161 bp, Homo sapiens
  misc_feature (139)..(139): n is a, c, g, or t
caaagtctcctctcctcccattcaaaaacaagtttattttccttctgcattgggaatcttgtcccagagatctaaagtaccttagttttgtgtatctttctcccgctttctggagcactcctagaaatattggttgccnacagacttagaatctgtgctta

SEQ ID NO: 619402 - DNA, 1028 bp, Homo sapiens
gtgtcatcacttcctctcaagctaggggtgtgttaggtggggttacacaacgggttcaccatggcgtatcgcaagaagtgttattatctagtctcggggcccgatctatcctgggacactggcatgatgttcagtccagcaaacgattgccaaggtgttcagattttagcaaatctaaatgtccatacagatagactttacaatagagcaagcgcaatcctcgcaaagttagcgtggaccaacagcattccggataagcagttggtaaagagcttacagtggataattcatttgaatttgatgtagatcgtagtaaatgagacctatctaaatacgcagcgagagctatgcgaataaacacgtatctgatgcgatgtaagagagttgacagaaagtcaaatcagaagcgccaagcttaaatttataatgaacagattgtccgacaaaatgaaagagctacagaacagctccaggatatcagggaagtcacgcataacatccatcttatccgagcccctcttgcaggcaaagggaacacagtttggcaagagcaacatggtacagtcagttacaagaggatgtggacatggaagatgctccttaaaaatctctgtaaccatttcttttatgtacatttgaaaatgccctttggataacttggaaactgtaaatcatttcatcttttacataaggtcacttaacatgaaaagcgattaaaacgacatctctttcctggcattgtgcatcttacgttattatcagattattacgggatgtacagaatgcatctcagtgttcaaatctttacgtgtgtagcatgttcttcaggtacatctccatgaacacttctactttgtaactctcgacccgcaattttcgccgttaaaactgtgttgtgccccttgggacaagtggactagccgcattcgcattagcacccaaaggcgcaacacttctggcacacgggttaacaaagatacttcttcgcacacaatccgcctgtacgggtcacaacggggccacaacag

SEQ ID NO: 619403 - DNA, 291 bp, Homo sapiens
actgactacgaagctagcacctaccatctgcttggaccacatgacctacaaagggaaggggatgccgattgtggcgagagagcgggcgaggcgcctttactacatgtgtgatctgaaaaccctgcttggttctgagctgcgtctatgcgaattggtaaagcaataccaatggctttttatcatttccttcttccctttaagtttcacttgaaattttaaaaatcatggttatttttatcgttgggatctttctgtcttctgagttccatttttctaaatgtttaaaaatat

SEQ ID NO: 619404 - DNA, 350 bp, Homo sapiens
gacctccttgcctacattttaaaaacctagagctgggcatgatgccccagcctgtaatcccagtgattcaggagactgaggtgggaggattgctagaagccaggagttcgagaccagcctgggtaacatagctagaccacatctcttaaaataaaatagttaatttagccaggcatgatgatatatgcctgtagtcccaactacttggaaggctgaggtgtgaggatctttgagcccgggaggtcgaggctacagtaagctatgatctcaccactgtactccatcctgggtgacagagcgagacccagactcaaaaaataaaaataaaaaccctgaatatcttccttcta

SEQ ID NO: 619405 - DNA, 296 bp, Homo sapiens
acgataccgcatcctcgtgttcagcatcacacacgaagatatgccataaagaaggtgagaagagcaaaactactgctgctattaacaaaactgacgacagagagaacaagtggcagaaaggatggattggaaccattgacaacagaaaagcctgaaacacgagaggcatctagcagaaacgcaaacgaaaacgcccttgatggacgacacaaaataaagcactcagactactacgtgaactaccgtaaactcagacaaaacggcaacaattacagacaccaacgaccagggacgct

SEQ ID NO: 619406 - DNA, 138 bp, Homo sapiens
tgctgcggtgatctagaggatcccagcgggaacatcactttggctagcactagcaaaagtgaacaaataggattacatgaagtgaaaaagcttatgtacagcaaaggaaacaatcaacaaaggtgattgttccccgct

SEQ ID NO: 619407 - DNA, 207 bp, Homo sapiens
  misc_feature (63)..(63): n is a, c, g, or t
  misc_feature (70)..(70): n is a, c, g, or t
  misc_feature (103)..(105): n is a, c, g, or t
  misc_feature (112)..(112): n is a, c, g, or t
  misc_feature (115)..(115): n is a, c, g, or t
  misc_feature (127)..(127): n is a, c, g, or t
  misc_feature (135)..(135): n is a, c, g, or t
  misc_feature (153)..(153): n is a, c, g, or t
  misc_feature (159)..(159): n is a, c, g, or t
  misc_feature (185)..(185): n is a, c, g, or t
  misc_feature (189)..(189): n is a, c, g, or t
  misc_feature (194)..(194): n is a, c, g, or t
  misc_feature (198)..(199): n is a, c, g, or t
agataatagtgaattgaatgaaaatatcattctatttacccaacctcatataaaccgttaaangtttccngtgagtctcttctgtaaattcatttaacaaatnnnggactcntcngcggttttgcangtttcacngtttcccacggtaatccngtctgncagcatgtattcacaaactcaacctnttcngttgntcannggctcaag

SEQ ID NO: 619408 - DNA, 1109 bp, Homo sapiens
taggttagagaggccgtgttatcggacgagggcacccaccgagttgactgaaagtgtgggtggggatcatgctgcctgtgctgggcattcaagtctctgtctccctttgccagcacatacctggatcggctgcgtcctgatgcatcccaaccttaccaagggcttcggcagtgatatggccccaaggacttcttcccacttctggactttgcctatatgccgaacagactccctgacacccagcctgcaggagcagctgtgtcagctctacccccgactgaaaatgctggcatttggagcaaagccggattccacctctgcataccttacttcccttcttgcctgtccagagccacgccctagctgtcccccatgagatgaagaaagagctcctgagcaagactgactgagtgcctgacggtggaccccctcagtgccagctgtcgtggaggccagctgtaccctaagcacctgtcacagtccagcctatctgctggagcagattgctcagctcctgggaggccgattgcccgagacggtcagaggtctttgccggagaccattcacatccctcaagcttaccaaccatggagctgctgcggaagggttgcgtagcacccaggatgtcgtccctgtgacatggcctgcatcggcctgtcgcagcaggtgccgggttctcggctgcctggacgcggctcctcctgtgctgctgctcttcgctgtggcttcctgtgcatggtcccggtccacagctcgttccagccccgcttactgcccgattgcttcgatatctggcttctcaccggctagcaacaagcgtgtggccagttatctcaagctggaaagtcacgcaggtggaggaacacggcgtccgaagaaccagcagatcacggcggcgcccacttacaggctgggccccaagcacagagtacataggccaaggactcactcaagtagggacgacacacactcacaagcagacacacccgcgaatcacgcaacagagcactgaccaaggcgcagactcacccgccaccaaaaacggtccaacttcgcctctgttgtccgctagcctctccgtgcccccccacaccacaaccacaacaaca

SEQ ID NO: 619409 - DNA, 126 bp, Homo sapiens
agtattgagatccaggaaggttgaggaaggttggttattcaggtggctggcatgtagtatcagacctggagcgtgattggctcacgtatggagagctgtcgttaattggtggagtattgagcagag

SEQ ID NO: 619410 - DNA, 236 bp, Homo sapiens
ttatgatagctgagtagtatcatggtatggatgtaccacagtgtgcttaaccattcacccactaaaggacataagagttgttttcagttttttgccctaataaagctgctgtgaacattcatgtacaggtttttatgtgaacatacattttcattttctgggataaatgctcaaaagggcaactgtagggttgtatggtaaacacatatatttttgtaagacaactaccctactct

SEQ ID NO: 619411 - DNA, 137 bp, Homo sapiens
tggtggaacgctgcaagagcacccctccaccccattggctcgcagtatcctagaatcttggtgctctcgctgcagttcccgttggggttccatgttttcctggtcccctcccaggctagctggatggcagcgtgcca

SEQ ID NO: 619412 - DNA, 460 bp, Homo sapiens
ggcccctgtgcttgctcaggtctgtagcgatggggtgtcgcctggttgctcaggtctggctgaattttctgccctgaggatctgggcttatgtggttgatacttgagagaccttcagtgtagatccagatggccaatctgtccttgttatgttacttgcttcttgggaatcagtgtccccttctgagctgaaatggaaatggattccaaatctcttccaacctttaaggtgatagatagtttgatgcaagactggagaatggacaacactatgaagctgtggctagaaagggactgtctatgtcccatcctttggtcccgatttgactggggatgtccggagcagatggcctgcctgggtggggagggccacatctgcacacaagccagtggctgtttgccgctcactgctgtgatgccagagcgtgttgcaaggtcactctcctgctcttctggactct

SEQ ID NO: 619413 - DNA, 635 bp, Homo sapiens
  misc_feature (335)..(335): n is a, c, g, or t
  misc_feature (366)..(366): n is a, c, g, or t
  misc_feature (487)..(487): n is a, c, g, or t
  misc_feature (584)..(584): n is a, c, g, or t
  misc_feature (594)..(594): n is a, c, g, or t
gttgcatgtcttccttagaaagcgtacgcatggttgcatttgtcacctgtggtgacatgaccagacaggatgtactaggcctgggtatccagcgaggctctgcatccctgctgtagggccctaactagagatctagagtttctgattctggtgctcagtagaccttttacaggctggctatacttgatctgcttcaaggaggtcgaccttctaatgtatgaagaatgggatgcattagatctcaagaccaaagacagatgtcagagagctgctctggccctgatgtgcacggctgtggcagctgctgatgctcagtgcctctaactcatgctgtncttgtgattaaacacctctatctgaattgangataagcacatacaggctgaagctctacgatagatgagtgtatgatcttataccatcgagctacttccgataagtaccactgatgatacaacactcttcacccacctaccatacgcaaggngatgtcgatactacggccacagtaactggtggtaggcatcttacaaacatgaccacttatactggactgctgaggcatgagatcacagcacgatctngaacagcctntgccctggagatcgttcatgatcccgtattgttcacagttt

SEQ ID NO: 619414 - DNA, 596 bp, Homo sapiens
  misc_feature (16)..(16): n is a, c, g, or t
  misc_feature (73)..(73): n is a, c, g, or t
  misc_feature (79)..(79): n is a, c, g, or t
  misc_feature (128)..(128): n is a, c, g, or t
  misc_feature (130)..(131): n is a, c, g, or t
  misc_feature (144)..(144): n is a, c, g, or t
  misc_feature (151)..(151): n is a, c, g, or t
  misc_feature (181)..(183): n is a, c, g, or t
  misc_feature (186)..(186): n is a, c, g, or t
  misc_feature (226)..(226): n is a, c, g, or t
  misc_feature (231)..(231): n is a, c, g, or t
  misc_feature (240)..(240): n is a, c, g, or t
  misc_feature (254)..(255): n is a, c, g, or t
  misc_feature (261)..(261): n is a, c, g, or t
  misc_feature (264)..(264): n is a, c, g, or t
  misc_feature (294)..(294): n is a, c, g, or t
  misc_feature (315)..(315): n is a, c, g, or t
  misc_feature (321)..(321): n is a, c, g, or t
  misc_feature (333)..(333): n is a, c, g, or t
  misc_feature (340)..(340): n is a, c, g, or t
  misc_feature (359)..(359): n is a, c, g, or t
  misc_feature (366)..(366): n is a, c, g, or t
  misc_feature (384)..(384): n is a, c, g, or t
  misc_feature (401)..(401): n is a, c, g, or t
  misc_feature (407)..(408): n is a, c, g, or t
  misc_feature (427)..(427): n is a, c, g, or t
  misc_feature (434)..(434): n is a, c, g, or t
  misc_feature (445)..(445): n is a, c, g, or t
  misc_feature (458)..(458): n is a, c, g, or t
  misc_feature (474)..(475): n is a, c, g, or t
  misc_feature (502)..(502): n is a, c, g, or t
  misc_feature (512)..(512): n is a, c, g, or t
  misc_feature (517)..(517): n is a, c, g, or t
  misc_feature (521)..(521): n is a, c, g, or t
  misc_feature (524)..(524): n is a, c, g, or t
  misc_feature (527)..(527): n is a, c, g, or t
  misc_feature (534)..(534): n is a, c, g, or t
  misc_feature (539)..(539): n is a, c, g, or t
  misc_feature (543)..(543): n is a, c, g, or t
  misc_feature (565)..(565): n is a, c, g, or t
  misc_feature (582)..(582): n is a, c, g, or t
actgcactcagttgtncttccggcccagtgccgcgtcagatactaaaccatgggagaaagttcacaccctggnactggncacccatcttcagctctctcctgtgagtcaggacgcatgctggccccangnnctttactcaacanggatggntcctgggaggaagtgggcacagtaaattgnnnggngctcatggcaggggatcattagtcctcagcaaagctctcntctcngatgtcttngtcgtcgacaccannctcggngtnctcaacctcctcactgtcctcttccgagtncgtctcctccagctacttctntttttnttggttcatctncaaaaangaattccacgcctccatcntgtgcangttcaagtagtgcaggtngctgaaggtgtactggnggtagnnggccataaaaacatgcccncatagangtagagcaccncatgcttcaaagncagaatggtgttgganngtggaaaaggaccatgtgaggggctgncggcctcctnaaggntgtnttngtntcagacnggggntganccgacgagttggtgtggtgagnactgcttaatggtgatnatggtgtcattttt

SEQ ID NO: 619415 - DNA, 1084 bp, Homo sapiens
agaaaacacaacgggtttgaattctggaaacagctataaatcacagatggccgacacagagatgactcgcattgacaggcatctgctagtttgcgtagtaatggcgagaacacacatcgtgaacaagcaccaccattggttaacaggacgtagccaacaggatggcttgacttcaacagtatggatattaacgagatgactctgacacatacaaaaagaagctggtaggcatggacctgtgacttggttggtagttatcacaagtatcaagcaactaagctgtagtttctccgaagatggtgtctttactagtgagttagttaggaggaaatagtcagaatatgggatgctgtaagatgggaacttgaaatgtacattatgtccaagcgaggctgggaaaataaggcagcgttagcttggggagattgagcgtgttcaaagtatctacttggtgctactgaaaatggcattctttgctgtgggaatctgctgagctgtgcattggagtggaatgcaaagattcaatgttagagttatggaacccgagtcctaattcagagaatattgctgcaatctctcagtcttcagtgggttcagacttgttggtatttaaacctagtgaggcaaagccattgtatattccacaagggtatctccagagagaaagtccagtggggagagttggtccacgaggatgtgcctgaatccttcagctcagaagcttaccagtgggtaaatagatgccaggtttattccctaacaagatccagacggtattggcattcagacacaagtctccgaaagaaaatccgcaaaaggcagcagtgttacgagaaaagtctcccaagccatttattcactcgcggaaacagggacaccgggggtgaaaacaagcgaaattagaaaggagcgggggaaaccctcagaaaaaaacgcccgaagggggggtcacacaaatcagttctgcacaggtacgggcccagctaaaaaagggcctgaaaaaacacacggcccgatgtgcgagcagcgacgaaacgatgacagacactgctcgcgcatgatgtacagcgaggcgatcacagaa

SEQ ID NO: 619416 - DNA, 131 bp, Homo sapiens
ctctaggtttgaaatttagtcagaaatccatcatacttatttagtatagagttatgtccattactactactaataaatatacatttgattgataacgtctagatctgagattttaatcgttttcctacgat

SEQ ID NO: 619417 - DNA, 462 bp, Homo sapiens
cacagcaggacactgcaaacgacatggaatagagatccctccaaggaggatatgcaaatggccaacaagtatgaaacgatactaaacatcactaccaatcagagaaatgcaaatcaaaaccacaatgagagtactgtctcatatctattaggatagctaatcaaaaaaaaatatagaggccagatgaggctagatccagcagagagggaggcgtgaggtgggcaacgtcacctgaggtcaacagtacaagactagcctaggccaggatggtgacaccccatctctaccaaaatacaaaaataagccaggtataggtgatgcgtgcctgtaatcccagttactggggaggctgaggcagaagaatcgctggagcctgggatgcggaggttgcggtgagccaagatcatgcgactgcactccagccggggcaacagagcacgcacccatataaaaagaacaaca

SEQ ID NO: 619418 - DNA, 128 bp, Homo sapiens
ccctctatgttatggggcagacttctatataaatcaccaatcactgtgctggtgactggactgagaaactgtcgtgctcctgtgaaggtaaatgagaatgtattacatgaatctatatgtggatatgc

SEQ ID NO: 619419 - DNA, 318 bp, Homo sapiens
ccgttagtaggaagtcatctgcccatccctcatctgcgtctgaaggaagtcatacacccgttcctcatctgcgtccctgaaggacgcctaaactcaggcatgggtgaataacttccttcaggacgccatactgaggcatgggtgaattacttccttcaggacgcagataaggaacgggtggatgacttccttcaggaggcaaataagggacgggtggatgattcccttagagaaggcatattaaggaatggttgtttgattccttacggaagcacataagggatgggtggtttacttccttcgggacgccaataaggg

SEQ ID NO: 619420 - DNA, 370 bp, Homo sapiens
  misc_feature (304)..(304): n is a, c, g, or t
ctgaacgcagcctgctgagtacaagtttagatgggagacaaagatctggatgttgatttgccgcaggcatttgaaacgatgggagttgataagatccaccagggaggctgtggagagagagaggagcaggaggctgggtttggggccctgaaagatgccagcatctgaggatcacaggaaatagatctagcaaaggaactagaatgtgcagttacagatgagaaaggtcagtgtagtgtacttgccagctcaagggtgtggcctctgtgaaccctctttctgtagtggatctttcccatcagcngaaaacatcctgttatttccccttttaaataaaacctcagtttgtttaatgcctctcttttactgc

SEQ ID NO: 619421 - DNA, 388 bp, Homo sapiens
atagaatccaggtgaccggtagagcggtctagacgcggtgctgtaactacacacagctcacagcaaggtcggatccttaacccactgagcaaggccaggactgaacccacaacctcatgaatcctagtcggattcgttaaccactgcgccacgacgggaactccctcaagtatggaataattgaaagtattttgcatatctaatcttcctctctattttcactgccttacttggtgtcacttagagaccgctcttaccgagaccgctcttaccgagaccgctcttaccgagaccgctcttaccgagaccgctcttaccgagaccgctcttaccgagaccgctcttaccgagaccgctcagaccgctcttactgagaccgctcttaccg

SEQ ID NO: 619422 - DNA, 233 bp, Homo sapiens
tatttaaatacactcgtgattttttttttgaaccattagaaagttgcagatatgagactaaaacaaaaaagttcagaccgctgttaccgagaccgctcttaccgagaccgctcttaccgagaccgctcttaccgagaccgctcttaccgagaccgctcttaccgagaccgctcttaccgagaccgctcttaccgagaccgctcagaccgctcttactgagaccgctcttaccg

SEQ ID NO: 619423 - DNA, 736 bp, Homo sapiens
agcgtggtcttaccctggcagcgcgaatcgcgcgtaggcggatgcttggttagcgttcaccattcagctttatccgtaacccaccgctatggactaagaacgacttgctgctgtacgtgtattgtactttcataatgtttatcaagaacgttctgaagaatgccctctttcacgatgttctagcacgtgtaattcgccgatagcatgccaaaagcgcttatcgagtagaggctgccaatcgtcctatctttctgtcgtcgcttctgcattccaaacttgtcgctgacgcataattgtaattgtcatagagtccggctggaagcgtccctatttgtgcatgataacactcagactcacttctaatattacgggttgagttgacagcactctgagacctaggaacaggtagagggatacagccatttcggtgcatagttgaataggaaaatggggaaaatcccccgtaaaaggatgccttcgagtcagctagtttggtcctacgcatattagaggggacttaattgggcaacggcatatcgtcaaggccgcacggatagtccattttgacacgacgtactatttcacacatagcctggcgataatttgatgacctctaatggtctaacgggctcttagcatagagagtatagagacataactttcttactctcaattgtttccataccgagcgacgggaacccgagcggtcactttacgccgaattaccatagagggg

SEQ ID NO: 619424 - DNA, 316 bp, Homo sapiens
cgatccacccatccatccatccatccttccatccttcttccatccacccacccatccatccctccactctccttccatccatccatctgaggaccagctgccttcccatctgagcaccagtgtatgccccactttactgcacaaacatgaagagtggccatgggaccgcccgagaccgctcttaccgagaccgctcttaccgagaccgctcttaccgagaccgctcttaccgagaccgctcttaccgagaccgctcttaccgagaccgctcttaccgagaccgctcagaccgctcttactgagaccgctcttaccg

SEQ ID NO: 619425 - DNA, 275 bp, Homo sapiens
taagagcggtctctcaatggaataaagggactggtcgagagaacaaaatagggaatcagtaaaataaggattcaaaaaaatagaataaatcaataaaaaaccagaccgctcttaccagaccgctcttaccgagaccgctcttaccgagaccgctcttaccgagaccgctcttaccgagaccgctcttaccgagaccgctcttaccgagaccgctcttaccgagaccgctcttaccgagaccgctcagaccgctcttactgagaccgctcttaccg

SEQ ID NO: 619426 - DNA, 283 bp, Homo sapiens
aattgcccttgctacctcagaagatatatcaagggagcaaagaccctaagtgccatatcaacacctccaataagctgcagttgacccaaagaacaagccagtccatctcccatgggtaccacacaccctccactactcatcaccagacagggaactctggcttgggcccacagcacagaccctccatcctgggccgattacactaagtgattgctaactcacatgtctctgggatggagcacccaggagacaagcaaagtgttggagccgcgtagtcagatcg

SEQ ID NO: 619427 - DNA, 349 bp, Homo sapiens
  misc_feature (97)..(98): n is a, c, g, or t
  misc_feature (127)..(127): n is a, c, g, or t
ttcatctcaatagatgcacagaaagcacatcagttcatgattttaaaaatcagaaaatggccgggcgcggtggctcacacctgtaatcccagcactnngggaggctgatgtgggcagatcacgaggncaggagtttgagaccagcctggccaacatggtaaaacccattctctactgaaaaaatacagaaattagccaggcatggtggtgggcacctgtagtcccacttactcgggaggatgaggcaggaaaatcgcttgaacccgggaggtggaggttgcagtgagccaagatcatgccactgcactccagcctgggcaacagaccaagaccgtgtctcaaaaaaaaa

SEQ ID NO: 619428 - DNA, 112 bp, Homo sapiens
tatccctgggtcgttcttacaggattagaggaggcggctgaggctgagactgcgcaggacaatagtcaagctcaggaccaggaagagaaagaagatagctgagaaagaaaac

SEQ ID NO: 619429 - DNA, 133 bp, Homo sapiens
gcgttgctgatcatcgtcttgctcgatgtcgggcgtcctctgcttcttccaggtcctcgagatcgtcatcatcccctgccccatcctgggcaccgcgtctccaggaatttgttaagagcatccagcgtgtgca

SEQ ID NO: 619430 - DNA, 366 bp, Homo sapiens
  misc_feature (33)..(33): n is a, c, g, or t
  misc_feature (74)..(74): n is a, c, g, or t
  misc_feature (79)..(79): n is a, c, g, or t
  misc_feature (85)..(85): n is a, c, g, or t
  misc_feature (87)..(87): n is a, c, g, or t
  misc_feature (142)..(142): n is a, c, g, or t
  misc_feature (198)..(198): n is a, c, g, or t
  misc_feature (224)..(224): n is a, c, g, or t
  misc_feature (283)..(283): n is a, c, g, or t
  misc_feature (300)..(300): n is a, c, g, or t
  misc_feature (322)..(322): n is a, c, g, or t
aaataaaaactctgattaaacaactgcaacaanttgtaaaagcaaggcaataataaccctgatccgtccaactnatgcnctgtancnaagacctaagaaggcgagggacttagtaggtatcttcagggtcagagcctgagtnctcgccttgttggttctgaatctgactttgcttccggtacaaacaggccacctgancactggtggtggcctgctccggctgnttgtattcacggactcgaataaaccgagggaagcgaagggagatgcccttgtcactatncaccaggccccgcgcanagggtagatgggagataggganatgtcagcgcacttcacctcccacacagcgctggggtccagcca

SEQ ID NO: 619431 - DNA, 153 bp, Homo sapiens
tcagagacacccaaatctacacagaagcagatgcagccacgtatatgccagtacaggatctatcattgccactccgagggaaaagaggcctggtgcatggccggggctggtttctgcgtgaatactctactgtgcccaattgacatccagcaa

SEQ ID NO: 619432 - DNA, 105 bp, Homo sapiens
ttacctcctggatcttcctaacatatatcttcataacatacttgagaggctgaggtgagtcaatcgatttagcccaggagtttgagatcagcctggacgacaggt

SEQ ID NO: 619433 - DNA, 224 bp, Homo sapiens
tggcgaggctctctaccttctggccttctggtctcttaaatctggaaccacaaacagcaccgtccatactccacttccctctcgagaacttttttttttttaaaagacggggtctggcgctggggcacgggggctcaggctggtcatctcagcattggggaagtccgaggcggccagaacttgaggtcaaaagtacggaaacctatcggggccaactaggctgg

SEQ ID NO: 619434 - DNA, 861 bp, Homo sapiens
  misc_feature (679)..(679): n is a, c, g, or t
gggcagaggtgggaggatcgcctgaacccagaaagttgagggtgcagttagctgtgatcgctcccctgcacttcaggctgggcaacaggagtgagaccctgtttcaaaaaaaaaaaaaagaggcaaaacccgggcatggggtctaatgcctgtaatcccaaacactttgggcaggctgaggcaggtggatccctgtgagaatcaggagtttcaagaccagccgtggccatgtgtgtggttgaacccgcattgtcgtactaattaatagaaaaaattataggaccgggacgcgggtggactcacagccgtgtaaatctacagaactttgtggaaggccaagcgcggggttggattcaccaagaggtcaggggatgttagaacagaccacgccttgggccagggcttggggtagaacaccccgaatcgtctaagtaaaagaattaccgaaaaaagcgctttaacagcacggcgcgtgtggcagtcgcgcaggagcagccttcgcaagtcccccagagctgtacctttggccgagacggcttaaacggcgcacggcgaagacaacttgcgttcttttgaacacccccatgggctaggggacgacgaagtgtcttgggcccaggtggagagactgtgagagcgcattctgttgcccgactcgtgtgcgagacctcccagaagngctgttggtgtcttgcacccggcacagttagaggaaactccccgagtcgttgcgggatcgacgaacgacacataaccagtagaggaaccaagcgacagaacacagaaaacaactcgtcctggaggtgtccccggagcacctgggagagccgaccacctgacagaataagagcatgcattgag

SEQ ID NO: 619435 - DNA, 499 bp, Homo sapiens
  misc_feature (282)..(282): n is a, c, g, or t
  misc_feature (300)..(300): n is a, c, g, or t
  misc_feature (311)..(311): n is a, c, g, or t
tgaagataaaagatattttataattagaaaaaaatatatgtaaggttataaaaaaaattttattttatagaaggagctggtgttatttcagagataggctggctagctgtatagtaggtgtttaggtggaggtattatagttggtatcctgtgtttaattctgtagatttagagatttaatgtattagtttatttagagtaaattaggtggaattttcatgataaagccccatgagcttttttatatctgttcagtctgagcagtgttacaagtgaagggantgaagtattttgataaanttaggccaagntgaatgttgttcattttttgtccagtttgggtcgtggacacttgattgttccaccttgttgggggtatcacatggaaccaggaaattttcaagtggcttaaggatctctgaaatgccagtaactcagatcttgtggtatttgacatgttaaacttggaatctgaatatgccgttgccaagattggaca

SEQ ID NO: 619436 - DNA, 312 bp, Homo sapiens
aaaaggggtccccccctttaaaaaaaaggaaaaaaccttttggggccccagggtagggctatctttttaaaaaatggcccccaaggggaaataaaccatccgcttggatgggcccttgaataaaaaatggttatacccaggggtattggtaaaatttttttcccctttgggtgggttgcatcttttttcccaattgttaattttaaacccaaatgttaaaaatttggattacctgaattttgctcttggatggccaaaaaattagtgggtttaaaaaaaatctatagtttcccataaacccctgaaaaatta

SEQ ID NO: 619437 - DNA, 208 bp, Homo sapiens
agaggttcccgcgaaggactctgtgggctacgagtaagcacatgctatgaacatcacccagcgcggcaacgtcgccctgacctcggagtaaatgccccctaagagaaggcgtctgatagaccctggttattggctctcttcatttttgttgtctgtggttctgcaagttttccagaattattccaagttatcagcgatggcgcatgct

SEQ ID NO: 619438 - DNA, 265 bp, Homo sapiens
  misc_feature (65)..(65): n is a, c, g, or t
  misc_feature (153)..(153): n is a, c, g, or t
  misc_feature (161)..(161): n is a, c, g, or t
  misc_feature (198)..(198): n is a, c, g, or t
  misc_feature (220)..(220): n is a, c, g, or t
  misc_feature (262)..(262): n is a, c, g, or t
ttattgattccaaaaatccggactccgtggagctggggcagcttggggataagcacgctcatcanggacaccgtgttgggcacaaaatggatctggtcgtacttagtgtagaagctggtgaaggaaagtacagcacgatgggtgtgatggtcnagaacttncgagaggcccgtgaactggaccccataatccatctgntccagtggggttaacaaccttngctttgcctggtcccggggtctcaaaagggtggtcccctttnccc

SEQ ID NO: 619439 - DNA, 382 bp, Homo sapiens
catctacgatccctctggatgacgagcagactccatctcagtaaaaaaaaaaaataaacaaacaaacaaaaagacttggactccaaaagggaggtgggaaaatggttaagtgagcttggttctcatttgccatcacagggcttaaatgaaagttgataaaacaagaaatagcagtataagaaagctacccaggctgggcatggtggcttatgcctgtaatcccagcacttgggaaggccgaggcgggtggagcctctgaggtcaggagtttgagaccggctggccagcatggtgaagccccgtctccgctaataatacaaaaattagccgggcatggtggtgcacgcctgtacgtcccagctactctggaggctgaagtgaa

SEQ ID NO: 619440 - DNA, 264 bp, Homo sapiens
  misc_feature (216)..(216): n is a, c, g, or t
caggtgcagtggctcacatctgtaaaccccccactttgggaggcaggaggattgcttgagtccagaaactcaagaccagattgggtaacatagagagaccctctctctacaaagaattagttgggtgtggtggcacacacctgtagtcctagctacttaggaggctgagtgggaggatcgattgaacacaggaattagaggctgcagtgcacctantgattgcaccactgtcctccaagccctgggtgacagaagaaagactgt

SEQ ID NO: 619441 - DNA, 141 bp, Homo sapiens
gcaggtgactatgaccatctcccagaacaggccttctatatcgtgggaccattgaatgaagctgtggcgaaagctgataagctggctgaagagcattgattgtgaagggtctttgtcctcgggtctgtttctctccttgtg

SEQ ID NO: 619442 - DNA, 326 bp, Homo sapiens
ctaaatatagtataactaggccgtaattataacataaaggcagacagcgaacataatctatattctatatcctagtgcgaagctaaactagtaggcaaacgtaatcatcatcacacgcgtgaggaaaccgagaagcagaacgactcaatgcaggactttatttcctattctacaccctagacaggatccctaccactgctagtagcactagtttatatccaaaacaccacaggctcactaaacttcttaattatccattactgatcccacccattatccaactcttgatcaaaaatttaaaagaaaacttgtctccttagcattta

SEQ ID NO: 619443 - DNA, 743 bp, Homo sapiens
gttaagtctgtgtgatttgtaaactcatgatcatttcaggtttgtcagtgttctagactggatgaagatgacaggctagggagtggagtactggctagtgtgagttactgtcctgcatgaaggctgaggcttggaatagtgtagtttgtctctttgaagctgcatgtgggcctgggcattccaggtagaaattatattattgctgtaagtagccccctgggatttccttcccccctggtaggaaatttttttaaaaaggtttttttccttccaaaaaataaaaaaaaaaaaaaaaaaaaaaaaaaaaaaaaagaaaaaaaagaagagaaggagaaaaagaaaagagaaagaagaaaaagaagagaagagagaggggaaaagagagaggagaggaagaggaaagggcgggggcgaggagggagaggaaaagggggcacgagaaagggcggggggggggaacgacgcacccccagaaagggccacggaacgggagagaaagaggaggtgcaggggcggagaggccgcaaacgccaggagcggggcgaccggaggcgacgagctggagaggaagggaataagaagaagtggcaaaggaggcggaagtcaaagctgcgagggagagagatagaacggtacgagacgagaacgaccggcgcacgtaccgagcaaaacgaccacggggagagagagcgacgagaacgacaagagggcacgcggcgcggaggaccaccacacgaacacct

SEQ ID NO: 619444 - DNA, 107 bp, Homo sapiens
ggctcacagcttctccggcgcacagcttctccagtcctgggtgacagagcgagactccgtctcggaaaaaaaaaagaaagttttaattttttccctgaaatatctca

SEQ ID NO: 619445 - DNA, 178 bp, Homo sapiens
tgtgccagctctttagtatcttcaagatgagtcataatgaggatcatgctgttcagcaatgaagagcaagccccgtatggcaatgacagtgccaaatgccagccgggccaggaccaaaggccggtgatctccgagatacaggcatcttccttagacttgaatgcacctagaatgaaac

SEQ ID NO: 619446 - DNA, 372 bp, Homo sapiens
tggtgatggatgacgggatgactgctgccgactgactccggcgagctggagtgaggagctgctccctggagtgaccactgctccccagtcagctggccaggccaggtccagtcatgacccccagaccacccagtcctccgaggccggctggtccagactgagctgcatgagctggctgtggatcatgtttcccacgcaggctctgcaggccaccctcaacgactaaagcacgacgagttctgtggacgctgattccgctggcccccagtgccccaggcatcggggcggtcgtccaagactaactcgtcgacttcccggacatgctcctcatcctcgagtctgtctcgggttcctgcatcccgaacacaaccc

SEQ ID NO: 619447 - DNA, 871 bp, Homo sapiens
  misc_feature (16)..(16): n is a, c, g, or t
  misc_feature (75)..(75): n is a, c, g, or t
  misc_feature (84)..(84): n is a, c, g, or t
  misc_feature (98)..(98): n is a, c, g, or t
  misc_feature (104)..(104): n is a, c, g, or t
  misc_feature (122)..(122): n is a, c, g, or t
  misc_feature (125)..(125): n is a, c, g, or t
  misc_feature (130)..(130): n is a, c, g, or t
  misc_feature (139)..(139): n is a, c, g, or t
  misc_feature (215)..(215): n is a, c, g, or t
  misc_feature (247)..(247): n is a, c, g, or t
  misc_feature (253)..(254): n is a, c, g, or t
  misc_feature (274)..(274): n is a, c, g, or t
  misc_feature (293)..(293): n is a, c, g, or t
  misc_feature (346)..(347): n is a, c, g, or t
  misc_feature (454)..(454): n is a, c, g, or t
  misc_feature (459)..(459): n is a, c, g, or t
  misc_feature (461)..(461): n is a, c, g, or t
  misc_feature (464)..(464): n is a, c, g, or t
  misc_feature (466)..(467): n is a, c, g, or t
  misc_feature (592)..(592): n is a, c, g, or t
gccccacacttcggcnacctcacatcccttacctgccagtcacctgcggttattactgctgcgcatcttggcgcntgtggggcnggggggggggctgntggtanggggttgggttatgtgtnggnggggntgcgggggngcctttttggggctttttcttcctcctcccatccaatggctttgctttgggggagtcacattacttggggctagtntgggtggcggcggcgcccggggggcgtcggtncttgtnngggggcgatgcctgtgtggngcacttttgcaccacaggngaaggggggggccactctcgtgtgagactcctgcggggtcccttaataggggnngggggcgttccatcaagttcttctgggtggtgttattgctgtgcatttgttggtgagtcattttctgtgctgtgtttgctttgagggggtcttccaatgtatctccnatgtngnggngnngtggtgtccttttctttggctggggtttcacataactctaatgctttattaagaatgtcttccttattgtcacactgattttctagcatgtcttcatagatatccacaagaaaggcaattaggtngggggaactatgacttggttgtaaatcaagtaattgatttaacagattaggatatttggaaagaccacgatcctgcaaaatccctttcaaatagttccatgcactttcattatgtggtactagtttaatcatttccagagtgtattggacttctctctccaatacagcacgatcattgtagccagtggtgttagaaataacgaagtatctttggttccagacagagttatttctcacatcctctttcagaagttggtccacatactgcagctcattatc

SEQ ID NO: 619448 - DNA, 313 bp, Homo sapiens
tgatctagaggatcccttgagcagacgtgatggcaatgaactctgagagtaggctattcaggtaggacagtcccatgcctcagatcgaattcttatatgcttttcacttgcagtcttacccttcgtgatagcagacctagcagacactccacctcctattctgtgcaggagacgcggatcaaacatccccctaggaatcacctcccacttgccgataaaatcaccttccacccttactacacaatcaaagacgccctcggctttcttctcttccttctctccttaatgatcatgccacacggtctctcaggga

SEQ ID NO: 619449 - DNA, 378 bp, Homo sapiens
ccacttccaggcatgcatgagaggacgaaaatacggcttaggacaagaataaaaatcagtcaagagctgcctcttattagcaaccatggaggccaaaagaaagtggaccaacatccttaaagtgctggaagaaaaataatgtcaactccaaatactatatccagtgaaactatcatttaagaatggaggtaaaataaagacattttaagatataagataactaaaagaactcatcactacaagaaatgttgatgatggttcctggggaagaataatagtgacaccagaaggaagctcagaacataagggacaaacaaagagtatcagaaatggtaaatatctgaataaattcaaaatactatttttcttttttgcctt

SEQ ID NO: 619450 - DNA, 258 bp, Homo sapiens
atccctttgggattttttaaaaaaaaaattgggggttttttaaggtgaattttttgggttttttgaccccgttttgtttgggcccaaaacccggtttgggccaaggatttagccaattttttttttttttttaaaatggggggggggggctttgggtaataagggaaagttttttttttaaccccttttttttcccggataatttacatgtttacccctggggtaaaacccccccataaaaaatttttccaattttta

SEQ ID NO: 619451 - DNA, 986 bp, Homo sapiens
agacactattatggcgagcaattacatttgtggcaatatgctaggttcagcaggccagactagcgatcccttgaacaatagctgatggacgaccacacttcaggataccggagatgagcgtggactcaaagcccagctttgtcatttactcatgtgcagcctcagtaaagttgcttcagtaccgccctaactgaaaataatagtcacgctgctgtccccatacagaggggctctgcggatgacaggagctgatgtgagcagagcctggcaccacagagccaggcatgaagtcaagcacatccataaatagtggacaacagtgaccacttgctgaccaggcgctctccaggtgggataagagtagtatagggcatgaatactctgaacttctctggataaggggctcactgacctcatctatgcctgggttgcacattataactctaatcttaacaatccaccaaatcaagaaaagatctcacaggttggagttttgccaatcatcactggcctggacctgaaaatagacgttctaccagagagggttagttcaagcattctgccatgtgatctgggagacacagatcctgaaaataccttggggatctgctgcatggtgtgaccccaagtgtgaaacccagctatggtctactgatcagagcaggggactttcccctataatccccttacctcgacagggcaagaaataaaccctgaagactacctgcaggaccaccaacatgggagaggaacataagctaataccaggaaaggaaagaaaagcctaaaaataacggccaaccacacaaacgacaacaacacaagaccacaaaaactacagcgagaatacgagaaaaacagagatcagacaacaagagacgaacaaacagacaaactataaaaagcagaagaaagaagagacaacacagagcaggaaagagaaaaagaacaagaggaagccgagcgagcacggagaaaacaaaaac

SEQ ID NO: 619452 - DNA, 510 bp, Homo sapiens
  misc_feature (66)..(66): n is a, c, g, or t
  misc_feature (96)..(96): n is a, c, g, or t
ccgcaacaactacgcgctggtcaagcagtccgagcaggagcgcgagaatgctgcagccgaccaggnctggcagctcttgcccaaggcaagcgcatncccgaggcgatcctcgcgcagatgcccgggcgcgagcgcgtgcagctgcaggagtcgatgcgcgcgcgggccgagcggttggccaagggcggcaaggtcgaaacggactgggatctgtacctgcagttgcgcgagcaactggccgcgggcgacccggtgaacctgcgcgcgtacaccgagcgcatcgcgccggcccagctcgagcaactggtcgacatccagaccaaagcacgcagccccggcaagcaacccgaggtggccaccagcgagcagcaattgtcggcctacacgtcgcggctggagttaaagggcgaacgcctgggacattcaagtcggcggcctacgacgcgttcaacgaacactgcgccgtaccggccaaggagccgacgttcgaggcgccagaagattctgtac

SEQ ID NO: 619453 - DNA, 605 bp, Homo sapiens
acctcgggatacttgatagaacgcaagacgttgggcgcgcggagtccagctcatggtaagtggacatggtcatagcatgtatccaaagagatcctggtgcttgacctatgtgcctataggcatttacattgacccaagtacatgtaatcgtcccgcgtagggttattcgaatacgtgacattgatgcaaatttctcacgatatgcagtatcgcgagagtacctatacgtcatctatcacaaggagtccacgatgagactcgtctactctaagttacgacctgtatacatgtaaggccccgtgctgtggtggcacatgcctgtaatcccagctactagggaggtggaggcaggagaatcacccgaacctgggaggcggaggctgcggtgagccgagattgcgccactgcactccagcctgggcaacaagagcaaaactccgtctcaaaaaaaaaaaaatttaagggcccgtgtgcagaggctcaccaactggtaatcccacagctctgggaggccaaggtgggaggtcacttgaggccagggagttcaagaacaacctggggccaaccttaaaaaaggccccatctctacaaaaatatatatatat

SEQ ID NO: 619454 - DNA, 167 bp, Homo sapiens
ttatactatgctgtactactggctgtactaaatggctgtactaaatggctgaacctaaatggctgtacctaaatggctgtacctaaatggctgtacctaaatggctgttacctaaatggctgtacctaaatggctgctacctaaatggcaactcgtgatcgccaaat

SEQ ID NO: 619455 - DNA, 798 bp, Homo sapiens
ggaggggcgtggtgtgatgtcacacggctcatcatgggccaagccaagtctgtggccacgtatcataccagtgtttctcccttgtgcctgcctaaagcctttctgggcctcacactttcagacccaaaggccaggagaacaggtctgagctcagcccccatacccatcgcccacgggataagctgtccaggccgtcccatggtctgaggatttacagggttgtgctaggtccactgtgcactctgaacagttggtgcctactgctaccatactcacgtgtatacaatagcatgaatggtgcgcgatgggacctgatagagggaagacgggcaaccgccgggtccacatggctcggtcacggatgtgacgccggtctttctcggagcgcagcgtatggcgtatagcagtgacggtcaacggagcctcccccaggtacctccaacctacttagatgattcaggactcatagcaccacccacgaagagctacgactttggccacaatggcgaacacttcggtgcttatgttgtcttcaacgattgcgttggtgggctatgggcccgtgggggggagcctcgttgtcaggagctcagcgtgacttggcatttgtacttgttggtatagacacggtgtcttctgattgccggcttcctcatgttcgcgtggggattgctcttggtaatccacgctagggcctggacggctccttaacgtgcccggcacgcgtcgccctggctcccttgcgggcgctccttgccccgttcgcagaccgtgcggagcccctctcgctacccctcc

SEQ ID NO: 619456 - DNA, 366 bp, Homo sapiens
gagcttagatgacgtggcatgtgactactgctgggaatgagaagggaagaacgactgtaactataacagaaaggtggcaaccatgaagaactggagaaagagcagagccagaaccaatctccttggttccagtccagttctttttcctccaatgatacacacttttccattacagcctagatttctgattgggcagcgatatggggacactgagggaggcaacagatttggggcagggcattgaattaagcagttctctttatagctatgtgaagtttgcagcatgcctcattagcatcatcaaagcagaccatggctaagtcaaaccagctcagcatcagttcccaggcacagcagttcagcagt

SEQ ID NO: 619457 - DNA, 470 bp, Homo sapiens
ttaggcgcgttctgcgtgaggttaggtgtaaaataggcggtctggattcccacccttctgttctgagatgggggtggagggcagtatctcatctattgggttccacaactgctcacgatggatcaggcaggaggcttctatagtggccaatacttaccatgttggtgtcccatgggacagacatgatacttcaccattagatgcccatgcacaccactgtctagagcaacacgatggcgcacagacagtgtcaaccgtatgtagttaacacgggtctccgcttgtgggatcatcagtgccataccacaaacttcatgcgatttatgccctctgtcctctggagtttcccatgacaccaaaaaactcgcagccctttggtccccactctccactgatgaaccgcagcacaccatagcaggccctccgcacagcaagccctcctaggagtttgtaacgcagaacgcgcctaa

SEQ ID NO: 619458 - DNA, 109 bp, Homo sapiens
cagtccacactgctgcgtaccctgacaacctgtaaaagcaggttcataaataaagccgtgggcagctccctggggggaccccaagaatcacattttattgctatgacac

SEQ ID NO: 619459 - DNA, 331 bp, Homo sapiens
tttttcccccccccccaagggggggttggggtgtttttttttaaaaaaccccgggggaaaaaccctccggctctttgtgttaaccccgggggggggggcccacccccttccttcggaggggggggtaagggggggggggggggggtttttaaaaaaacgggggtccccccccgggcctcggggtaaacccccccggggggggggggggtttttccccccttttttttttttttaaaccctaagggggcccccccaatggggccccccgggggcccccaagggggggggggccctttttttttccccctttccccttaacggggttttttta

SEQ ID NO: 619460 - DNA, 517 bp, Homo sapiens
gggacgtgatagggtattcattcagaagacaaactcttgagttcgagagagtaagagtgcgtgagctctgctcctggcttagatgacggcatgtctctccgctcagaacatgagacgtgcacatcttcaaactcgagactgtaaagaaaaaccccagaggagccaccacctggaccgggtacttcgggaaagtgctcatggcctccaccagctacctgccttcccaagtgacagaaatgttcaaccagggcagagccttcgccacggtccgcctgccattctgcggccacaaaaacatctgctcgctagccacaattcagaagatcccgcggttgttggtgggtgccgccgacgggtacctgtacatgtacaacctggacccccaggagggcggcgagtgtgccctgatgaagcagcaccggctggacggcagtctggaaacgaccaatgagatcttggactctgcctctcacgagtgccccttagtcactcagacatacggcgcagctgcaggaaa

SEQ ID NO: 619461 - DNA, 770 bp, Homo sapiens
  misc_feature (14)..(14): n is a, c, g, or t
  misc_feature (32)..(32): n is a, c, g, or t
  misc_feature (79)..(79): n is a, c, g, or t
  misc_feature (89)..(89): n is a, c, g, or t
  misc_feature (92)..(92): n is a, c, g, or t
  misc_feature (97)..(98): n is a, c, g, or t
  misc_feature (122)..(122): n is a, c, g, or t
  misc_feature (129)..(129): n is a, c, g, or t
  misc_feature (138)..(141): n is a, c, g, or t
  misc_feature (149)..(149): n is a, c, g, or t
  misc_feature (158)..(158): n is a, c, g, or t
  misc_feature (160)..(161): n is a, c, g, or t
  misc_feature (164)..(165): n is a, c, g, or t
  misc_feature (167)..(167): n is a, c, g, or t
  misc_feature (170)..(171): n is a, c, g, or t
  misc_feature (173)..(175): n is a, c, g, or t
  misc_feature (183)..(183): n is a, c, g, or t
  misc_feature (201)..(201): n is a, c, g, or t
  misc_feature (205)..(205): n is a, c, g, or t
  misc_feature (222)..(222): n is a, c, g, or t
  misc_feature (231)..(231): n is a, c, g, or t
  misc_feature (234)..(234): n is a, c, g, or t
  misc_feature (264)..(264): n is a, c, g, or t
  misc_feature (269)..(269): n is a, c, g, or t
  misc_feature (275)..(275): n is a, c, g, or t
  misc_feature (278)..(278): n is a, c, g, or t
  misc_feature (283)..(283): n is a, c, g, or t
  misc_feature (288)..(288): n is a, c, g, or t
  misc_feature (297)..(297): n is a, c, g, or t
  misc_feature (309)..(309): n is a, c, g, or t
  misc_feature (315)..(315): n is a, c, g, or t
  misc_feature (317)..(318): n is a, c, g, or t
  misc_feature (344)..(344): n is a, c, g, or t
  misc_feature (346)..(346): n is a, c, g, or t
  misc_feature (350)..(350): n is a, c, g, or t
  misc_feature (399)..(399): n is a, c, g, or t
  misc_feature (408)..(408): n is a, c, g, or t
  misc_feature (414)..(414): n is a, c, g, or t
  misc_feature (427)..(427): n is a, c, g, or t
  misc_feature (436)..(436): n is a, c, g, or t
  misc_feature (445)..(445): n is a, c, g, or t
  misc_feature (500)..(500): n is a, c, g, or t
  misc_feature (513)..(513): n is a, c, g, or t
  misc_feature (528)..(528): n is a, c, g, or t
  misc_feature (541)..(542): n is a, c, g, or t
  misc_feature (549)..(549): n is a, c, g, or t
  misc_feature (551)..(551): n is a, c, g, or t
  misc_feature (555)..(555): n is a, c, g, or t
  misc_feature (561)..(561): n is a, c, g, or t
  misc_feature (678)..(678): n is a, c, g, or t
ggctcatagatggngccttctcactgtgtggnggaaggggcaagtgagccctctgggttctcgtttttgaaatggagtntcgctctgtngcncaggnnggagtacagcagcacgatctcggntcactgnaatctctgnnnnctgggttnaagtgattntnntgnntnagnntnnnaagtaggngggagtatagggatgtgngatnagaggtagggaattttngtagttttntgnagaaagagggttgaggatgttggggagggnggtgnggaagnggngaggngaggngatgggggngggttggggggngaaagngnngggattagaggtgtgagggaatgtgngnaggntgggttgtgttttgtaaggggagttagtggaatgttgagggttgtgggntggtgatgnaataanttgggaaagaggnggaggtggnaatatgagnttgggggttgggattttaagatagaaatttaggggaaagagatggagaggagagnagatggggaatgnttagaggtggttggnagatgtaaaatgnnaagctananttgnatttgntttttttaagattatgaaacttcaaaatatatgaactacagcccatattgaaaaataaaatagattgagccatatgcctaaaaaagacctcaagaaaagtttgaggcaaagcatgtnagtgttacaggaaatggtccaatagagggggaagaaaaaaagcatgctactagccccttttcttgtaccgagaataaaaccatgcagatctc

SEQ ID NO: 619462 - DNA, 831 bp, Homo sapiens
cttaaagccaagaggtggttctaacgccggcggcaccctttaggggacagaaaaccagttggaaagaacgacacggcagatactagcaatgcccctggtcccccgtctccttcatattgtggggtgccacgccctactacccccctttggggcgaacaagcctcattcgtgatcataagtccgtcagtcaaccacgcatcccccgacaaacacgggtcttcctgtcatcgcaaacaagaggttcttactaccgtcaacaagaatgtcccccacacacaatgcttcgcacgatagtctgtcgctgtataaatatagccccgtcccacccacctttgagaaaattatttttgcgccccccccggcccccgccagctaaaagtatattctttggtgcccacaaaaaaatcggggaaccaaaatttgaccacgcgtctcaatgttgaggtgaatctttccataacccttcttgggccgccacaacctcacacactcggggtgccacacacgatgctcttgcccaacacccctgcttctaagaagcggggtgatttattctcctcactcactcatgcgaatacttcggcccccccagtttgcttaggatacaacaagatgcggaggttcttcgcggaaggtccttgaagcacttgcagcaaacattgtcgggccgaggatctctccgaacagcaacttctatccgtgcacggtgatctccgtatctgatttatggaaaaacgtggtacaccggcgcttttttcaaccaacaaaagggaccagaatgacaattccgtccccccaagcttaaaaaacaacacttcgccccacaaaaca

SEQ ID NO: 619463 - DNA, 181 bp, Homo sapiens
agtgctacctccacaacgtgtattgccgtggaatgtggtgaggtgtgtgtgtggtgtgtgtgttgtgttgttgtagtgtgtgtgcagtttggtgtgtgctgtgtggtgtgtggtgtgccgtgtgcgtgtatagtgtgcagtgcgcagtgtgtggtggtgctggtttgtggaggtagcaggt

SEQ ID NO: 619464 - DNA, 734 bp, Homo sapiens
tgttgttctctttcttctggtttcctcctggatatgtcttcattgggtctgtggtgtccgtggtatttcctatttcggggctgtttggtcttttttgattggtgatcttttcgctggctgtcttgttacagtggtctacatgccaattctctgtacccctgtttgtggctttggtagccggtttctgggctttctttcgtcgtggccttttccgcatgcccatcggttggtgctcatcgtgctgtgtccggccccagtttccgggctgttttggtctgtgtgtatactttgtgatgtaattttgtcaccagtttgatgcttttatagtttttcagtgaccctatccttttttatgtcacatcacggttagagttgtggttcacgggaagagaagcatgaagccccaggttgagctgaagtaggtagtaaataggcggtctgccccttgtctcctgtatgaggagtatcggatgatatgtgagctaggcgtcttgtctttctgagccctaagtcccatggtaccccttcgctcacctgctccaagagtacctttgtgttggatgaatttaagcgcaagtactccttatgaggacacatctctctgtggcactgccatatttctgggagctactttgataaggacggctggtccctgtggtactctagagtatcgcttccctgaagaactcactcagaccttctatgagctgcaatctctatcactggaatgttca

SEQ ID NO: 619465 - DNA, 1401 bp, Homo sapiens
agcggatctcgttggcacagcagaagtccatgcatggcgcaaccttgcacttccagcggcctagcacctgtaactctttctatccggcaagtcctacaggattgcggcccggtgcctatctgccgtcttgtgttgcgtggagtattatgcatgcgatcaagctataccctatagtcattgaaaaggagtaatacgatctaacgccacattgtaggccaaaactgtccacttcacctgatcgcactcgcttgatgtatctactcccgatccaattctgcatgaagcatttatgcaatcccacttctacacaggttccctgtcttccactgggcagacaagttgaattagataacactatccactgagtcacccaacattcacatgcgaagggatctcgggtgagaccaggagaccacgtctgtcttgtgaaccctgcaatgtattccccaatgtgagaagttaccggtaaaccatcgtatagcatatgtaggacgaattgatatcgtgtgcttcaatgtccctagtccccgtagtcattctgttcccacgttttttcctttatattggtacttctcccagtaccccagtgcatctcccacttatttttggttgattccgtctggttttattcctaggcttgtgcctagggtcatccctttgcattcttcgcgaagatcattcctttgtgatagagtaccgagaaaggcattcccattctccattagtaccttacctttattttctttccttggggggcttgttccttttgtttcctctggttcagttcccatggttcccttgtcaggataaatattttccagaggttataccaatctgtggggggccccgtccatttttttggcgagtggggcctgctaattccacttgattcttcttcgaaccaaactagctcgtatggttggggctcggtgatatatttaaaaaagtaccctttgtcgtttttgttcccactccaagctcttctttcggttatggtggttagccctgtatgttttaaacctcttcctatgatttacttcctgtggcaccgggcgctgttttttaacgttgttaccattaaccctggtgtgcctgttgagcatagaaaggtttttggccggcagtccttttaggaacctggttttcacgtgtgaacttggcattggaacggcctgagggcctataatattttttttttgaagcgggtaaaacaacaaactgggtgtccccccttggttgcaatttgtgatgtgtgtacaagaaacaacgtctcatggtcttaagagaaaaacgcgaggcatgttctccacacttctttgtgtgtgtatgcccactcacaagcgcccatggaagatatagagtagataaacgctcggagagagcacattactccgcagaaca

SEQ ID NO: 619466 - DNA, 356 bp, Homo sapiens
cgccttccaaacgtaatacccaatatgtgtagaataatgttctgaacaatgtatacatgcttatttatgtaagagatgtgtacttcattgcttcctccgtgtgatttccgaagcaaagcaatgggaccctacgcttcagagtcttattggggtggggcagtgtccattgaggtgtcctgtcgggactgagaaatccctggcagattatgaggcaggcatcctttggagttcttctctcaggtatattttaactaaaagctatcatttaagttgaagaaatcaagtcttgtgaattgatacgattgtacttctagagtctttgatgataagttgtctttgggtactacgctttggca

SEQ ID NO: 619467 - DNA, 412 bp, Homo sapiens
gtcacaggtacatcactgttacagcatgtgtgagaatttgttgctttttagagagtgaaaaatattccatcctgtgttgtattagtcaggtttcgctagagggacagaattaataggatggatgtatatataatggggagtttattaaggagtattgactcacatggtcacaaggtgaagtcccacaataggccatctgcaagctgaggagcaaggaagccagtccgattcctaaaacctcaaaagtagggaagccaacagtgcagccttcagtctgtggctgaaggcctgagagcccctagcaagtcactggtgtaagaccaaaagtccaaaagctgaagaacttggggtctgatgttcgagggcaggaagcatccagctcaggagaaagatgaaggccggaagactcagc

SEQ ID NO: 619468 - DNA, 106 bp, Homo sapiens
tctagaggtccctgatatgctgctcatttacacatcgggaaactgagggtcaaggggttagcactggccaatgttaccagctactgagtaggataggtctttttac

SEQ ID NO: 619469 - DNA, 302 bp, Homo sapiens
gtcgacgaggaaggaaggaaggaaggaaggaaggaaggaaggaaggaagggaaggaagggagggaggaaggaaggaaggaaggaaggaaacgaaacagaggcacataattaacttgaccatggcaacagggcaaataagcagcagagccaggattcaatgcaggtagtctggctccagaccactccaccatatgcaactaaaggtaaggagcacatagaaactccatttctccccactgttccagttcccttttgctatttcattcttttgactgcttttactgagtactcactaaatgcag

SEQ ID NO: 619470 - DNA, 175 bp, Homo sapiens
tggatttatttccagggcttatattaaagaataaattagttcttcataagaaggagaaagtaaagtgtgtgtttgtgcgaggccaacagaagaagtctccagtgttttttgagaaaagagaagtgcgtgtgaggctcccgtaactcgtggtgcctcgtggaggggggtggctcag

SEQ ID NO: 619471 - DNA, 790 bp, Homo sapiens
tttttttttggggggggcacattctttaataacttcctgaggaaaaaaacttgggaagtaaatatggtggtaaatatttggaaattttggcatgattaagatgttctgtatttctggccctttaacagaaaatgggtggcttgagcattagaatgtgacggggtggaaaaataaataccctcccttagcccctcccaagcgtgcgggtggagatttcttgatgccattcttgatcccgtacctttatatgtgacttaggttttttatatccacccttccgggaaacattttaagatctcttaatctggggtgtctgacactgggtcagtgagggctgtggtattcccgggttgtcaaacacctggtgcggggcctttcaggggaaatttctataaattttctgggtgattattcacattctttcttccgggaccacctattttttcattgtgggaccctccccttaacccaggcttgagtgctcataatattttaatcttccatataaccgcctagtgtcggatcgcttcaggaagaattaatccatctttatcttcccaatctgaatgtggaatggaaatcttatctgccaaggtaataaaccctgggcttttagcaaacacaacacacacacagaacaaacacaagtgggggccgcgcgcccggaaagttacaacacacctgggggccggccaggggagcaatgggactaaagggtcacaacccgccaaaggggcgtcccaaaaaccggggaccgcgtgacaccagggccggtcaggcaaggcgcgaa

SEQ ID NO: 619472 - DNA, 592 bp, Homo sapiens
  misc_feature (102)..(102): n is a, c, g, or t
gagcgagtcagggagtgattccaatggaagcaactgcagaggtggtgtggccgtgccgggacttgcagagcttttctgcttattttcaagtgacgcccgtgntggcaccttagctccaggtgagtgggtctgagaaggcggctctgtctggcagtctcccaaacagggttggacttcctatgcaccttcacctttgcctggggaaagctgggttttacccgagaatgctggggaacataggctgggctaagtgtgttccctagggctatataggggtttcccccgctggcctggagttgtcaataatatttacaaagacaaatcccaggttccttgatcttgataacggtagatggaaaaagtttatggtgttattctgtgttgctttaacatgagatcaacaatgagttgccttccgtctcaagatgataagggatatttggaaacattttgagaacaattttttagcctttaccatctggttgacttctccctttaaggctatcttcttggcctggtgcagtggctcatgcttgtgatcccagcactttgggaggccgagcgggtggatcgttgaggtcaggagttcgag

SEQ ID NO: 619473 - DNA, 1406 bp, Homo sapiens
taaaggaaaaaaaaaaactacttaatttctaccagggccatattagcagtagaaacattttaaactggcaagaaattggtgggttttgggtctcaagaacacaatgttggtcatattttctcaccccctgattatggggaaaaaaatcagttctggtcttggtgggtgttgctctactatatgggaagatcacacaagttacactggtcgactggcatgtccggcccctattcttggttatcaaacacatatctatatttcataacatggctttcacgtacattggacacaacacaaacaacaacaaaaaacaaacacaaacaacacaacaaaacaaaacaaaagaaacaacacacaacaaaacaaaatagaagagagaagccgtggagacgacatgcgatattacaacacacaggaaagaacagaacacagcacgcgcagcagagccgcgccgcgccgccaagaccaccagaccccgagaccgcgcaagtagcagccgacccaccgcgcgcggccgactcctaaaacagagcacagaggaggagagtccgtggagtgtaaaacaacccgaaacgagattccctatagggacgacataggaggaaaaagtgagcgaacccatagtcacatcacaccacccagacaaacacatagcccagggtggccacatcaaaaacgaccagacggactaagacagctactgtattagaacacacgaagtcgcaaacaagcgtatagacagaacacacacatcacccacgaatcaccatatagcaacaaacagaaaagagaaatcaatactccacatatattcctttctacctaagaagccaggccatacaagcaacactacttgcactaaacaaggacggacgcacggcaccacgcgctcagaagaggactcgcccccccagacgcccccggaccgggcgaggtcggcaagacgcgcaaggaagagaaaaggggaggacacacggcgccaaccgcacccgtaaccggcagcaaggcccctgacagccagccgaacgacagaagcggccgagccacgcgcgcgacggccagcgcggccagcacacagggcgaaggcggcccgacgcacagcacgcaacgggggaagcaaaggcaagcaccggagcagcaagcgaggccggagggaggcacgacgggggcgggaagcagagagcgcgagaccgagcgcgcgcagatacgcacgggcacagcagggcacgcgacagcctcggcagacaactaggcgcattgcggagcgccgaggacggagcgggatggcagatagagagacaggcggagagacaccgacaggaagccggatcgagcgggacaaggaagagcggacggggcgcgagcagcgcaggagcgcgcagggagacaagcgaaaggaagacaga

SEQ ID NO: 619474 - DNA, 138 bp, Homo sapiens
ggacgacacctattgcctccatcgtcacgggggtggaggagggccgcctgatcttcgacaacctacaagaagtcctattgccagaaccccatttggccagacacccggggtactcctctagtagatcgaccatgcagg

SEQ ID NO: 619475 - DNA, 378 bp, Homo sapiens
  misc_feature (343)..(343): n is a, c, g, or t
  misc_feature (371)..(371): n is a, c, g, or t
gttaaaggaaaaataaggctggaaataataaatgctggcatggatatacagcaactggaactctcattgctgattgaaaagcaaacaaatgctttggaaaacattttgacaatttcatataaagttaaacatacactattaatataactctgaaattcaattcctaggtctttacccaagagataaaaacatagccaggtgtggtggcttacgcctataatcccagcatgcctgggaggctgaggcaggcagatcacttgagctcaggatttcgagaccagcctgcgcaacatggtaaaaccctgtctctaccagaaatacaaaaaatttatttggtatgttngtacatgtctgtagtcccagcttacttngggagac

SEQ ID NO: 619476 - DNA, 408 bp, Homo sapiens
  misc_feature (408)..(408): n is a, c, g, or t
caaggaccgcgcgtgtgtactgtattgtgtgttggtctagtattagctataaaaaaatcatactgtgcctccctggtagagcaactacataagttcacactgcacagatgctaaatgttcttccttttgtcactgttctttcatctcatcctcatgtctatacatcctcgggaatttccatgagctagtatagatctatcttagcaatctgttttcttacagtatctatctgaatttataactgtcacttttctggggcttcgtcttttagtacattttaagttaaacgaaggcagaggtttttgcttttttctgtttaatctgcagagcttagtataatgccttccacggggtaggcaaacaatatatatttgttcagtgtatgaattagtgatttttaaaatatgn

SEQ ID NO: 619477 - DNA, 426 bp, Homo sapiens
  misc_feature (13)..(13): n is a, c, g, or t
  misc_feature (33)..(33): n is a, c, g, or t
  misc_feature (39)..(39): n is a, c, g, or t
  misc_feature (158)..(158): n is a, c, g, or t
ttttaactgtatntccccaccctcccgaacaangataancccagtgataacagtgttaaatatccagccacatttttcattgccaatgggtgccttcctgtggccccaccatgaaggatgagctgccacttttagtttaatgtaacctatttccttantcttttacttcccattgttttttgttccctgatatataaattagtatctttaagtcccaccaacaccactatgcattttgtgcaatttagaaattacttcaggcatgtgactagtaagcatgttagtgctaatactatctatgcagaggagcaagtacagtgtgaaataaaggaatgcgaacatttatgtgaaatgtgtattcatgctaaatctgtctttaggcttaactctattaaaaaggaattgtcaaactgccaaaaaaaaaaa

SEQ ID NO: 619478 - DNA, 475 bp, Homo sapiens
  misc_feature (32)..(32): n is a, c, g, or t
  misc_feature (131)..(132): n is a, c, g, or t
  misc_feature (138)..(138): n is a, c, g, or t
  misc_feature (162)..(162): n is a, c, g, or t
  misc_feature (271)..(272): n is a, c, g, or t
  misc_feature (275)..(275): n is a, c, g, or t
  misc_feature (289)..(289): n is a, c, g, or t
  misc_feature (333)..(333): n is a, c, g, or t
  misc_feature (416)..(416): n is a, c, g, or t
  misc_feature (427)..(431): n is a, c, g, or t
actggcactgacggacaaggcgaaacagcggnccctctcaactgggagggcacccaatggcccctgtagccagaggttgcccggcttttgggccccaggtcctaggcatgactggtggtcaccaatttggnncttgtncccaaccagtgctggggggccatntttaggcagaactcaggaagctggtagagagttcccaacacttatactggggctaaggaggcttgggaataaaagggcaagggagaaactggagtttgaaacctccctnnctncccacctggggtgncataggagagaaaaaataagttgctttttggctccaggcccgtncagacccacagcaaccaataacgtataattattgggattagttatagccactggaggtggaggtttaaaaaaaaaaaaaaganaaaaaggtttnnnnnttttacaagcacagagtttaagtttcaagacgttaaaaaaaatc

SEQ ID NO: 619479 - DNA, 310 bp, Homo sapiens
tctcgcttcctgcacttcaggaggccgaggtgtgtggattgcttgagtccaggagttcgagaccagcctgggcgacacaggagaaccctgtctctacaaaaaatacaaagattagcggggcatggtggggcgtgcttgtcatcccagctattcgggagactgagctcgggaggacggcttgggcccaggaggtggaggttgtagtgagtcctgaccacaccactacattccgtcctggtggtgaaggttgcagtgagctatgattgtgccactgcacttcaccctgggtgacagagtgagaccctgtttc

SEQ ID NO: 619480 - DNA, 1484 bp, Homo sapiens
  misc_feature (253)..(253): n is a, c, g, or t
  misc_feature (396)..(396): n is a, c, g, or t
tggaaacagagtttggctcttgttgcccaggtgggagtgtgagggctcgatctgggtctcaccacaaccttctgtgccttcctggggtttcaagcaatttctcctgtgcctcagccttctttgagttagctgtggttatataggcgcatgtgccaccagtgccgtggcataatttgggtgttttatagtagaagacagggttttcctccatgtgtgtgtggctcgaggcgtggctctctcaaactctcccaanccctcgagggtgatctctgtgccctctccttgtggccttccccgaggagtgtgcgtgggaatttacaggggtgtgtgagccagtgtgtgtgcgcggggccgcgggtccccctctctcttatttatataagaggcgcgtgttanatttatccacagaggttagagaagggaattccactttttttcccctttctcacgtgtgggcgctgtgagagacaattgttctatagaatatcttataagagggttttcttttaacctctctttcttctttctacctcttgtgtgtgtatatctctcgagtgtgtgtgtacaccccgaggacagcgtggcgaggaagaggggaggaacatcgtgggtgggctcacaccgtgggtatgagggatcaccggtggtgggccccgagggaagagggggcgtgggggcgtgacaaagttgtgtcacccattcttttaaacatgtgtgggcgagcgccaaggtgcgggggtgcaacacacattttatatttcccgcgccaatttctgtgttgctccctataaaagggtggggggagctttattaacgcctcttccctctcctttgtgtggtccccccctatgtggtgggaaacctcttccaccttttctccaaaggaggaaactcctatgaggggcctcatccaacttcctgttattcacccaaggggggctcccctattaaaaattttccaaccctccaatctcttgagggggcgccctgtgggggatcttaaaaccttctctcacaccatctgtgggcccccttgtggtggccggcacctaattttttccgccccaaatttttttgtggtgccgcccgggggggggggggggggtatactcccccgtggggggggtttctcctcccgttgttggtgtcccctgtggggggggtactacgggaagagacaggactaagcatgcacggcatagaatagaacatgaatagacctgagatagcaagcgcaatgacatcgacgaccaacgggcagcgtaaggagatacagacagcaggagacacgatgagagtcacaaaacacgaggaggagaggcaccctcgcgggggaggcaccaccacaaccagagggctcttccacataaaaaggagacagcacagagaccaaagagaaaatcttaccacaacaaacaacccacaagggcgaggcaccccacctgtggcgggtgacacaactattccacacccctataaaggat

SEQ ID NO: 619481 - DNA, 337 bp, Homo sapiens
  misc_feature (92)..(92): n is a, c, g, or t
gtatctaagatcttgcgatggtgttcgtagtcagtacatggtgcatgattgatggtaggagggatgttgactgttgtatgtaaggatgcganggatggagggcgataggactagatgatggcgggcaggatagttcagacggtttctatttcctgagcgtctgagatgttagtataagttagttttgttgtgagtgttaaagttgaggcctcccaggataagctttccatcttaacaggatgtggcacgacaagtgctggaaattaaaacgtacacgaatccggacgaacagcgatctcggaggaccacaaaaaacagggactggcgctacctgccg

SEQ ID NO: 619482 - DNA, 315 bp, Homo sapiens
aggggccccttttttaaaaaaacccccccgggggggggggtgggccaagggaattaaatttttgttttgttggggggggtaggtcccaaggtttttaggggggccaaaggttaaaacccggatattattggtttttttaaaaaagccgagggggggttttttaggggtttcccccccaaaaaataaacccttggggggggaaaggggtgtttatttggcccattttgcccctcccccgggggtaccattttttaaacccccttttttacctggtaaaaaaaaaccattttggcccttttaaaaaaaaaatgttta

SEQ ID NO: 619483 - DNA, 297 bp, Homo sapiens
ctttccccttctcaagtttccagggcctttgggtgttctttttatgttgatttaaattcatagggttttccccaaatcccttctttgggtacattgtccccttattcaatggattacccctttgtgggggctgcttattttaaagatgttgggggggaaccaaacccaaatttacgagcagtagttgcacatagttgccagttttccctttttagtcattagatttccaacccatgttgcagttttttggtccagaaaaagtatttctttctaataaagttttaggttgctgctcta

SEQ ID NO: 619484 - DNA, 259 bp, Homo sapiens
  misc_feature (218)..(218): n is a, c, g, or t
gaaaaacatgttctgcgataaagacgatggcaatgtgtgcgctcttttttgtagcggtcagggggcgggggggggttcatgctaaaatgtttgtgtatggtaatttgtgagaggcggtctcaggaccgtgtctttagccaagccgctaagctaagtggaaccactccagaaatgatccatacggatcgtggagcggcatatacgtccaccaattacancgaagctctccgtcagaaagggtaaggcatagcacttccgc

SEQ ID NO: 619485 - DNA, 100 bp, Homo sapiens
tgagctggtacttattaatgttggcaggcccgaggcttcttcaagaagggagatgtggtcattgtgctgaccggatggcgcccaactgccctgtcttaat

SEQ ID NO: 619486 - DNA, 168 bp, Homo sapiens
ttgtagatttcacttgatctggcccgttcatatatgtgagccctagcagcgaggtccagctcctatactgggcgacgaaagggatcgaaacaaccccctaggaatcagctcccagtccgataaaatcaacttccacccttactacacaatcaaagacgccctcggctt

SEQ ID NO: 619487 - DNA, 112 bp, Homo sapiens
gcaacgtgggattcactggtctgatgaagtgggaacaagtctccatgattttccagcgcacaggctcttctcctccagagaaaactgcccctcatagtgctggatagaaggg

SEQ ID NO: 619488 - DNA, 828 bp, Homo sapiens
tggcccgcccttcttggacttgggttgcagggaccccgggcaccctctacggatttgggcctcgatgtagcacgcccagtttgccccatgttttgtgtggtgatgtctcctcgccccttaagaattcccacgggggaggaggggtcctgtacaaggcccaggactggccccacaaaccattttgttgggccacctgggtgtggcttggggcaagcttttttgggggtagatttttacctagcccagatttaaattgggggcttggagttggggaatccaagcagccctgggcaacagggccagactccatctctaccaaaaagattttgaaattaggctggcaacggtggctcacgcccgtgatcccagcaactttgcgggggttcaaaggcaaggtggagtcaccttgaggtcacaggagagtttgagagccagcctggcccaacaatggtggaaaccccgtctctacttaaaataccacaaaattagccacggtgttgtggtgcacaccctggaatccccgctatcttgggagggctgaggcccgagggatcacttggaactcgggagggcggaggttgcacgtgggctgagatcatgccacctgcaactcccacaccctgggggacacatagcgagaaacttcgtctcagaaaaaaaaaaaatttaaaatagactgggtgtggtggcatgcgcctgtagtcccagactacttgggaggctgaggtcagaggatcacttgaagccaggaaggtcaatgctgcagtaagctatgatggcatcagtgcattccagcctgacccatggaacaggacctgccaagaaaga

SEQ ID NO: 619489 - DNA, 181 bp, Homo sapiens
acgcgcaccggtgttcaaaatagacgccactctcctacgtaaaaatggctcgccgcgatcagcggatagctgaacatgcaccccaccaggaaacgcgcgacggttaacagaatcggctcgcggtagattggaaacacatacatcaggaatccggtgctcatggcgagcggcggaatgagga

SEQ ID NO: 619490 - DNA, 370 bp, Homo sapiens
caaatttcttcactggtctttattgggagttctggaggcttcttgtatgttcatggacttctttctttaggttagggaagttttcttctataattttgttgaagatatttactggccctttaagttgggactcttctctctcttctatacatattatccttaagtttggtcttctcattatgtcctgatttcctggatgttttgggttaggagctttttgcattttgcattttctctgactgttgtttcaatgttttctatggtatcttctgccccacaagattctctcttctatctcttgtattctgttggtgatgcttgcatctatgactcctggtctctttcctatgttttctaactccagggttgt

SEQ ID NO: 619491 - DNA, 555 bp, Homo sapiens
tagcaggaccccgagattgaaatgtgtgtgtgcctgtatcatagaagtgtcatgtgtagaagaaatcaaagcagtcttgaataattggaacccaccatgctggatagtctaagtgtcagttagttgtctgggcactgcttcttactgtcttctacctcactgtctaacactggttcagaaacactcatctccatcaagtaggcttcaattgatttcctcaggtgtggtgtctgttcgctcttgagtacctgcaacatccatagtgtagaaactttttgccctctaccgtttttttcctgtatatccagcatctctctgatgattgcctcaactggctatctagatacatctgtgaagtcatgcacaacatgtggacatagcaggaatttatagtatggagcttgatttctttcacagctttgtctgtacttaataatggcatcgtaatactagactttcatgatgttttctctgtcagaattgtcttccacagagataacaatcttatccgtaaattggctgtgtgtaatgagccttaaaggattaatgaccctc

SEQ ID NO: 619492 - DNA, 150 bp, Homo sapiens
tctcacagcaggacggcagcggagtgacacgcagcgcgagtccaaaccatgcacggcaacgagggtgcagtagccgtgcgtaaccaaaacttgcccttgtccatcagtctgacatatcttttttaaatttgccattgccttcccgtcagc

SEQ ID NO: 619493 - DNA, 196 bp, Homo sapiens
ctcagagtgtgcagagccagccagaggaggaggacgaggctgaggaggaggaggcggaggagctggggcacacaggagacctacgccgactacgtgccgtccaagtccaagatcgggaagcagacccagaccggtggtgacgacagcacatgccagcgtccaccccagaatcactacacctggcctgcctcggaca

SEQ ID NO: 619494 - DNA, 263 bp, Homo sapiens
aaaggatttttccctatgggcccagcttggggtcccttcagctaaaatttaaaaaaaaaaaggggcctgaagagtttaaaatccaaggatatggagagatggcttttttttattacatgaccccatccgggttttttttttcccccctttttgaaaggatttataaaactagttgagggcagctgtatttttttgttgaactatttagtaaaattgggcctttttgtttggatgggaataaatgcgggcccttttgcaatcca

SEQ ID NO: 619495 - DNA, 608 bp, Homo sapiens
ctacatttggtctccctggctccatacaatcagacaatggcccctagcttcatctcccaaatcactcaacaggtttctcagtcccttggcatccagtggcgtctccatatcccatgctggccccagacatccggaaaagtcgaaagggcaaatgggatccttaaggctcagttaaccaaactcactcttgaagtccaaaaaccatggacctcccttttgcccatagcactggagagcattagagccagtccaaaagcaccctccttcctcagtccatttgagttaatatacggacgccctttcctcttacaaaacaggcccccttctaactctcagctaggagaatacctcccaacagtctccctcatgagctatctcctctgacaacaagccgaccaggccctcccaaaacccgacgaaggggtctccaatcccaaatagacttgctctccaattccaaaagacttctttaagcaacagtgacacttcaaaaccatcgaggtttagatctcctcactgtcgataaaggcggcttgtgtatcttattagaagagggatgctgtttctatacttacccgtcatgaactagttcaagatgctgctggacg

SEQ ID NO: 619496 - DNA, 527 bp, Homo sapiens
accccattgacatgaaagcaaagcaggcccagatggaccagcaacttgcagccgagctctcagcagccattccaggctgattcagttccacgctcctcggtttgctgtgctaggactccgggcggggagtcctccctaatgtctaaccccatttcccttgcctcctgcaaggcagtgacaggaaggcctctctgatcaggaacactttcaggtctagaatctaaaggcaaattgtaaggtttgctccagggactgggggaaacaaatttcatgcccacctaactcctgtataacctcaggctcatccctaccagccctcggtttccccatctgtgtgcagggagaggagggtgcctcggggagctactcaccttctgcatgcgaaagatgagattgggatcatacatttagaacaaagatgcattcaatgcattgtagcagtgccccctccctggttcctcacagaacagaggtcatgggtcattctaatccacaaacgatcaatgcacaatgtttggtcaatagag

SEQ ID NO: 619497 - DNA, 175 bp, Homo sapiens
  misc_feature (146)..(146): n is a, c, g, or t
cctattagggtcaaggaagccctctgttgcaacagatatgttttgaacccagttcattcagaaagcatggttggtggtcatcatctacttgtatttgtgaaaaaccatgaaattccataattcatgcttcttcatgttattggtancttttcatatgtggtacctgagctctgaa

SEQ ID NO: 619498 - DNA, 249 bp, Homo sapiens
tacggagatttgctccgtgccgagcttgacggcatgtcgccgccggagttttccaacatggtgcgcagcgaagtcaacaagctgatggccgccgctaagtaaagctggccacaatcgcttcacgcactttgagtaacagcggatccaactgcgcctgggtacgccaacccagctccaccgggtagcgtggcaacgccagtgggcaggtcagtacgcgcaggccggtcatctgcgcaatcgcttcggcag

SEQ ID NO: 619499 - DNA, 599 bp, Homo sapiens
catcatcaatcttgaggttagtgcaaggcctgcatgcagcaagtcaagcacagggtccatggattcagcatgtatatacacacaattatcaatcataacaggaagaactctctcagggccacattcctaagggtgcaccaagggccaatcatggttccttgggagagagcaaggagtaagccaccagaccggctgtgttcactcttacctctcaagtagcctctctcaaagccttcattctcacctaaacaggggcaagcatcaagggtgctttttaccatggggtggtggtgcagcaagtgcagcattcatcgggtcaacagcttcagcatacattttgggttcatcagttatggctcaataactcattcactcatctcaatatcatgcataatcctcctcggtgccataaggcataatagtacctgtttcatgggttaatgccaagcaatcaaacatatcagtacgggtatatagaaagttggatcaaggctcaggcccacaacaaggagctaaaatcccagtaatttgctgcccctataacctattatctagaagaaaaaaggataaatattatgttaatatgctaccatcaagat

SEQ ID NO: 619500 - DNA, 220 bp, Homo sapiens
ttgaggatccccacgcgcaccgcgggttcaaatgcaggcgattcctgtaggaacgccatcccttaggagagtggcgatgaggacgaagacgacccctacaaggggcatctcgatctgctcctcttacaaacgaattgcctgttaggaagagttctccgatatctttaagaggagggagaggggggccgccaagaaactcttccaacttcaaaaaaggccc

SEQ ID NO: 619501 - DNA, 1271 bp, Homo sapiens
gattcgatggtgtgatgtcatcacagaagagttctccggttcccagactgtgggctacccgtcggtattcctgacctacgggaagctgcaacatccaggcatcgctgggaaggtgaagagcttgcctaaggatgacccatcctaagacggtcctagacttcacagccgcttcctgggcgtatacaagggcctgtggcatgacatcacagtcgtgacgagggaacgttcgacacgtgccggagatccgaaggttgccatagcaataatgcgcaccagtggcttgtgaggactgtgaaacaatttagtggagacacacgaagacaagggtgtgctctgtgcgggcaggtgcgtgcgcgcatagccgatggagagacccacgtcgaaggtccatccaggaacttcaatgagatggtcgtgttggcttgagcacgatctcgctgatgaattggccatgaggcagttgcatatcagaagttggcataaatcttcggaccgaagggctgcttgatgcaatggtacttccacataaacatggccatggcagtgacgggagtggacaaatcatagcagacaggcgaaaggggacctatgagagagatagtgagaaaagttacttgtactcagctctaatccggagtgtgaataggagcataatggcaggatgtggcggcaatgtcttgtccgatcatgtctgcccaggaaggaaggaccgcactcttgcatgagcaggatcccagggtgaataactgtgagggcgacttgttgagttccggaagaaacgcttggacttgcgggtccccggcgggagagggcttggagcagcctagtgtaccctgttggaacccaagaggtgtttagggggcagggatgaggatggattcggacggtccaatccgaggggtggaacccacagggggcaacatggagctaacagaaaggggggtccagccaagagcggttggggagacaaccaaaggaaagccgtggccacaggcacaagaaacccactccggaagggccctttgggccaatgtgttgggccatggtaattgggggggcatggggaataccgatgactcagtgctaagactttcttcttgtgggccaaggccgctgggcacgagacaggggtaaccaatacgcggacacggaaaatcaccctagtgaacgaattatgtaaccacatgggcagggtacccttcattaatgggacgggacaagttgactcaggaaaaaatgtgggtcccactggactattacccattttagac

SEQ ID NO: 619502 - DNA, 466 bp, Homo sapiens
gcggtaccataagcacgtaatggtgtggcagacagtaactggagtcccattcctgtatcttctcactaggcaagtcttgcaggcctgggcctctacctaacccccctgccagagctgtcgagccagtagcaactcagccactccctggacagagcctccaggagcaactgaaagcctctctgccactgcttctgcagtggaactgtccttgctaccctcagactgatgaaggagctaacacccttatctacaccttcaacaagctgtaattgaccaaagcccatctcccacgggttttacacactccccactgctcataacagacagggaacccctggattggcccccacagcatgaattctccatcctgcttgctgattgcaataaacagttgctgacctgtattctccgggggtagaaccctgaggagacaaacaaaagacccttggctacaaccactagggga

SEQ ID NO: 619503 - DNA, 249 bp, Homo sapiens
  misc_feature (7)..(7): n is a, c, g, or t
  misc_feature (20)..(20): n is a, c, g, or t
  misc_feature (106)..(106): n is a, c, g, or t
  misc_feature (145)..(145): n is a, c, g, or t
  misc_feature (170)..(170): n is a, c, g, or t
  misc_feature (239)..(239): n is a, c, g, or t
gcagggntcggaagccgttngggtgtgaaagttttctcgctctaaggagattcttcaagcaatcactatgtcaacagacacagtgttttcccttccttcatatgangaagatcaaggatcaaaactcattcgaaaagctaaagangcaccattcgtacccgttggaatancgggttttgcagcaatgttgcatatggattatataaactggagcagggtacttgtccattcatctgatncactgcgtgt

SEQ ID NO: 619504 - DNA, 501 bp, Homo sapiens
  misc_feature (106)..(106): n is a, c, g, or t
ccagcctgcctttcccaggaccagccagggctattattagggagacccctgtctcaaaaaataaatccaaaaaataaaaaattaacttaaaaataaatttaaaaancccttgatatgttgctggtatagtctctgaagcttgcctctgaaaacgttgagctttgagaccaggagttcgagactgaacaggctctttctattatatcattagctcatgagatgccttttgaatacaaatatcttacatatcaaaaatggatctcatgttaaatggatttggaagtactataccccttctttctacttctgcacttaaacatagcttaatgtgctctgctttgttctgttatatcttcctgctaaagtaagaattgagcagagctaatgtcatctttaatattaggaaataagtggactaagacattatagaattaaataattttcaaatgttaaataattgtattgactgataaatttatagcctctgaaaaatgggaaaaa

SEQ ID NO: 619505 - DNA, 161 bp, Homo sapiens
  misc_feature (73)..(73): n is a, c, g, or t
  misc_feature (134)..(134): n is a, c, g, or t
cacgcgtccgacaacgttccaatggtcctgtaaagaatccatgcgtgagaaggctgttgagagaaggagtgtncaataaagagcacaacagtaactttaaagctggatacattccgattgtgaaatcgctcacnaacagggtgagaggaagaaagggcaat

SEQ ID NO: 619506 - DNA, 316 bp, Homo sapiens
gtcgaccttattgacatgactaatatgtcttaataaactggactctgcacactgtgaggcattggccttctatattcatgctgacccttccccccgcccccgctccaaacacacagacatatatagcagatgtgcagcttggtcttcatgtgggtcccccaacaactagagcaggggaaaggctgtccctgactctgttgcctgtctgtctgtgggctgccttgtctggcctcagtgggaaaggatatgcctaatcctgtagtgacttgatgggacaggttggggataggatagtggaggggatagatatgggggg

SEQ ID NO: 619507 - DNA, 166 bp, Homo sapiens
ctgtagcattcttgaggtggtgcatgtgctgctggggaagcctgaccagctgcttgcctgttgtccagcacctgaatatggtcgaggcgcagggtgctgacgatgacgatgtcgcgatcatagtcgttgccgctgggggtcgatccttcggtcaggccggtattgg

SEQ ID NO: 619508 - DNA, 163 bp, Homo sapiens
atctcggggagtataaaagaagtctgcttcgagtgtgaactatctcatggaatatagcacatggcctcttcatgaagacactactgtgatagaagtagacgagctgtccaaggccagggaaaggaggttagtacaaagcacaatgaggctgaactaaagttgg

SEQ ID NO: 619509 - DNA, 319 bp, Homo sapiens
taatttatagcaagttaggaataaaaagagtaaatatgttcagctgggtgcgggtggctcatgcctgtattcccagcactttgggaggccaaggtgggaggatcacccgagcccaggagtttgggatgagaccagcctgggcaacatagggagaccctgtctccacaaaataaaaaaattagccaggcatggtggtcccagctacttcgggggttgaactgggaggatcgcccgagtctgggaggttgaggctgtagtgagctatgtattactgcacttcagcccccgcaacagaacaagaccctggaccccgtctcaa

SEQ ID NO: 619510 - DNA, 543 bp, Homo sapiens
cactagtcaggtatgcctgtgtacccaacttcataatacattttcacagcacattcttctgtcctaccaatcatgtgctctgcgccaagtaggaactgactgcgtgtcagtccattgtgtgacaataatgttagataaatgtatgaatgtggctaccacctgcaaagaggagagatccttccagttccttccccagtaagtgtgcgtaggagaagggtattgagtcctcttatttcacgcaaatattaactgagagtccatgacctggttcacaagatccgaaactctggggcatggggctatgaaccaccaatatgacacatgggtcgagaatgtgggtcacaggaaacacacgggtatatacatgatgccactgaagatctctggaaatatccgagacatggaaaggtcgtcgtgggcgacgcctgtttgcagccactcagggggttcccagagagttcacacaggatatcctctctgggggcgatatgggtgaagcatatgcactaagggtttagaccctcttgattcaccattctgaat

SEQ ID NO: 619511 - DNA, 1273 bp, Homo sapiens
ggcccagccccgcgttcaggctgctcatcgaggaggccgtgagacccccggagacgatgcgccccgtgcagacgcactgtcgcctgcgggagccggctgcccttgagatggagttgctcgcctctttgtgctctgcctgggattttcacttcctgacctgtgggctggaggaacagaagcggaacagacacagcaagactcccaaggagtctgccaagttggttgggtgagagccgcatgactgcacgagggcagagacatcggctatacggtgccccatggcagacacatccacgagcaccacaggcgccggattgcgtcgaccacttggaattgacaaaggcacttctcaaggacacctgttggaaatcgacttcccatcacaggactttaccccttctcactgggaagaagccctcagacactgcacgaggtgtggacccaaccattgggaagaccgcaattcaagaccggcaggacagaacatttcgcagggcacgcaaaggattcaacccattgaaggcacgaacttggataccattgaggagggaaacacagattggcctactacaagaagaaacttacagaaagacgacacgggcgagaccagcaccgtcccacggaccaattggacgagaggcccctgccggggaagggcatggacactttggatgcaggtgaaatagtcccccttgaacaggagagagtacaattggacacagggacatccaattacattccagagaaccatactttgcttccgcatgtcgggatcacgatgttccctgtgatggagtggtacacgacgccacttcatgcgggcagtggcaacagaacgttccgttactttcagagaggcacctgctactgcgtagtcccgagtgcagccttgagacttcttgacggaggtgcaaactatacaatcgtttcgaaagaatcgaaggtgcgggaggcctattacgaaacgagacccatgtggacgtggaagcagttgacgaggaacccagatcaaaccacttggtcactataaaaagaagacgtcccaccttgcaaatagagggggaacctatacggggaatcaacagcggaaatcgtcggggttcccctaacacaatcaaggcgacacaaacggtatcgtggaaacgtggaactcctcagcagaacccggggataaaaaggatgaagatcaaagacactggagaagaaagactgacaccaggaaatacacaaaagagatggaatatattaaccggggttgcatacccacaatacg

SEQ ID NO: 619512 - DNA, 141 bp, Homo sapiens
tagaggatccctttggtagtacattggtagcggggtaacatggcttcgtgtaaataaggaaaaacaagtgagcatcgggctctgaaatcagtcggtgtcccattctaaattatagaagtacaagatgggtgagtagcaacc

SEQ ID NO: 619513 - DNA, 515 bp, Homo sapiens
  misc_feature (14)..(14): n is a, c, g, or t
  misc_feature (285)..(285): n is a, c, g, or t
  misc_feature (316)..(316): n is a, c, g, or t
  misc_feature (340)..(340): n is a, c, g, or t
  misc_feature (357)..(357): n is a, c, g, or t
  misc_feature (502)..(502): n is a, c, g, or t
  misc_feature (504)..(504): n is a, c, g, or t
gtgggcccaagcanaatcactggatcaagagagagtaagaagatgcctctttgctggctttgaagatggaggaaggggctatgaagtgaaggagtaagggcagcctgcagaagctaagaaaaggcaaaagcaacgcctttctccccctggagcctcccagagtgaacgcagccctgctaacaccctggatttcaggactcctgacttccagagctgtaagataataaatgtgtgttctgggccaggcgcggtggctcaggcctgtgatcccagcacttcgggagnccaaggcaggcggatcacaggtcaggagttnaagaccagcctggccaacatagtnaaactccctctctactnaaaatacaaaaattagccaggcatggtgcgcacgcctgtaatgccagctactcaggaggctgaagtgggagaatcgcgtgaacctgggaggtggaggttgcagtgaaccgagattgcgccactgcactccagcctggcgacagcncnatactctgtct

SEQ ID NO: 619514 - DNA, 651 bp, Homo sapiens
aggaaatttagaccagctgtttgttaatcttaactttagccaagacaaacaccaattcagttacttacctagggatgggtctcaggctgaggactgctctctaccaacctagaagcaggaaaaagtaaactgatcttccctgttggatgcgcgctcaaattccataaaggaggtatttgtcttacatcgtcatggaggcaggaaaaacttgccttccttgtgttggaagcaagtaaaactccaaaaaaaaaagatcagggactttctggagggcgtgctctcagacctcagcaaattgtcctattggtttgagacataaagttagctcatgctggtaccaggcaccgatcggagatttgtcacaggcaggggcatctctactcagaatccctttggggttaccaaaatgtgaacgctgtttgagacaggtctcagttaatttagaccatttattttgccaaggttaaggatgcatgcctgtgacacagcctcaggaagtcctgacaacatgtccccaaggcgttcagggcacagcttggtttatacattttagggagacatgagacatcaatcaatatatgtaagatggacaatgggttcatccaggccagggacactttcgagcagggagggggtttcggcacggtggtg

SEQ ID NO: 619515 - DNA, 384 bp, Homo sapiens
aatcattggaaggggaaaaggatgtcttaggattattttctttcttgtagtagttgagacagagctcttatttactgtaatgctaaatgaaacagtggcttaaatattttaatgggaaaagagaacacagtgcgttccatattgtgataaggtaacgtgaggtttttttgttttgttttgttttcttttttttttttctgagctagcctttagaacactgttgtggtatgtatgctaccttgattataggaccccctaaatgtgactatagtcatcttaatgggcatcttgtccactgtgcttcttatgtattatgaaagtgataagaagacaaattaagtgggtatattttataaaataaattcatgaagagaaaaaaaaaaa

SEQ ID NO: 619516 - DNA, 375 bp, Homo sapiens
cacgaggccggtgcaaagccccacgttcgcgctcgtcaacgagtacgaaactaccaccggcgacgtggtgtaccattttgatttttaccgaattaagtctgaaatcgaagccctcgatctgggcgtggaagaatacttcgattcggggcatttttgtttcgtggaatggccctcgaaaattccgaacctctggcctgagaagcatttgaaattcactctggcaacccaacccgacggcagccgggtcgtgactgcgggaatcagcggcatttcaattcgtaatggactccgttgaatccgcgcggcgttcgctttgatttcctaattcctaattcctcattgaattgagcacgccccaactccagcaaaccggct

SEQ ID NO: 619517 - DNA, 852 bp, Homo sapiens
agatttttagggctctgtactcctaattaagggacatgtatgtggccttgcctagccctttggtgataagtactgtcctctaggaaatgtacgataggtagaattgtggttccctatggacaagtacataaagggtgatcttgatggaaatctttgagagattctggaatttaactggcctaataagtgtcttctgcctgtagatgtgcagatgagacagagagaatcagtgaaaaattaattctctatgggggagagggctttgaatttgaagcttttatctgttagaataatttgagactcactggttgttgtaaaattgtgttccaatttagtatgataccttgggtgtaaatcatctgatggggaaggggttagaaaaacttctagtggtaaatatcaccgtgaacattttaagacagtcggcattgttcttagacctctgttcatgctgattgttgtagttgttgtctatggaattccgtacacatggttattccccgcctactgtggagataaatctaaatataaagacagctactgtgatgtcactggagaatttgtggtggatgttttatttgaacaccaattgggtcatcttggaagtacacgaaactgaaggagttacctccgaaaaagagaccatttgggtgatcattattttaagcaggaaggttgtgggacttaacatttttctaagcattaaaccggtagttcgcttggacactgacccttggtggacggaatttattgactccccggtgggaactggtatcaaataacgcagggatatttgtggggcacaggggctttgtaaacattgtgccgcggcgaattttgcacagccttatc

SEQ ID NO: 619518 - DNA, 276 bp, Homo sapiens
tatatctcagctagcacgccgcatacgtggagacgtgttagaatccactatgatgagacacatttcatactcatataaataaaaaaacatattttctcttcgtcctgtataatggtgcaatccagacctttaaatatttttctcccatgagattcacaaagttccctaagttttttaattgcaagttagtaaaaatagggagatcaaaaatcagtattggtcattattcctcaatttccatatgctcgttgtgaactttttcactataattgtcgg

SEQ ID NO: 619519 - DNA, 253 bp, Homo sapiens
tgtttgttttaagttgccctggggggtttttgactttgggcccctctttccccccccccccccccttttttgtaattttaagtccccttagctggaatggggaagggggcccagggtccttttgtcgggggggggccgaaatccaatccgccccaggatttagtttgggtttttttcttaataaagaaatccctcctttttccccccaaggggtccccctttaaatgtaataaaatttttgttttgaagttta

SEQ ID NO: 619520 - DNA, 364 bp, Homo sapiens
  misc_feature (364)..(364): n is a, c, g, or t
aggattcggcacgaggggcccttttctatatcctacacttttgtgacagtaagagtttgcccattccacggacaggggacgccctctaaaaatttcaacagcgttattgagatataattgagataatttaaaaaatactgcacatgtgtcatgctggagccctattgagttcaacacggatggcgccttgtgccagaagagacccacagcccgtggatgggacatatgggttatttaagactttacagatgtggtgcacaggcagtgggctggacaagaccgcttctatttgtgaagagagtgtgggttatataacaattctacttatcactctccacttatcaacctccatttaccctgtgtn

SEQ ID NO: 619521 - DNA, 495 bp, Homo sapiens
tctgaaggcagtgacaatggtgaggaagtgactgatttaagaaccatttgagtgaaactggcaggacatgaggggaaaagaggcaagaccacgagtcccctgaccttcatgaagcacctactgtgtgctggccgctctgctgggggtgcacccttgtgtgctggcctctctgctgggggtgaacctactgtgtgctggccgctctgttgggggcacgcccactgtgtgctggccgctctgctgcgggtgcacagggttgagagtcttccaggtcttcatggcagccagctccagcctctggttgcttgttccaagacctgtggctcccttagctgaaaggtgacagaggctggagccatgaaggcttttccagaagcctctggatctacatggcagctaccgtttcctcatcccagtgcccatggtggattttcataactgaccaggcacttcctcccactaagcttcagtgcggtctctgaattcttccctaca

SEQ ID NO: 619522 - DNA, 757 bp, Homo sapiens
ttttgtttttttttacctttgaagcatccagttctagtttaatactgggagttccctggttacctgtccagtcactggacacaaaagtaaatgcacggtccttttaatcaggctcgacggacaaagggggtgatatcttgaggggctacccctccgtgttaagagccggtggttaaaatttattatgccgtttcgtgtcaagtgagctattgaaaagagggacaaaaacctctcctgtgaagagtcagcgagaggcagagtgtggaaggtgccgtggtgcaagacaggacactcattgtgcagctggtggtctatttatcagcaattgagccgtaaactggctggtgcccggcagttggttggtcaaaatgctggcactaacgtttggtggactgggtattggacgatgtcattacctggtggctccatctggaaatgtctggtcattggtttatggcaagaagccctggaataccagaggtttgtgccatccactaagacgctggtggctcagaatggagatcattggcattctacaatattgggggcaacctctttgggaatctttgggacatcagacttatggcggggtcggtgatattagaatcgcgctaggggcgaatcctggtgagcccatcggcctgaggcctgggggacctggcatgagaagccaggggatttgggggcctcatcatacccggtaagcctgacgggatgtgcgaaaagacggtcaatataaggggctatggctgcacgg

SEQ ID NO: 619523 - DNA, 300 bp, Homo sapiens
  misc_feature (8)..(8): n is a, c, g, or t
  misc_feature (43)..(43): n is a, c, g, or t
  misc_feature (70)..(70): n is a, c, g, or t
  misc_feature (106)..(106): n is a, c, g, or t
  misc_feature (146)..(146): n is a, c, g, or t
  misc_feature (157)..(157): n is a, c, g, or t
  misc_feature (173)..(173): n is a, c, g, or t
  misc_feature (194)..(195): n is a, c, g, or t
  misc_feature (223)..(223): n is a, c, g, or t
  misc_feature (247)..(247): n is a, c, g, or t
  misc_feature (254)..(254): n is a, c, g, or t
  misc_feature (257)..(257): n is a, c, g, or t
  misc_feature (263)..(263): n is a, c, g, or t
  misc_feature (267)..(267): n is a, c, g, or t
  misc_feature (295)..(295): n is a, c, g, or t
  misc_feature (297)..(297): n is a, c, g, or t
cggcacgngggggaatgtgggcgcccttttcctggccctctgncccatgtgggtgggggggcctcgtggnccggccgggcgccccgtccccttctgcatgtctgangccaccggcaaccggcgccccactccagatttgcccccgncctgttttganaggcccttatttatancttttatactttgtggagggnngggggggttcctgcctcatcctgggtgnatgggggggggggctgtttttaangggcccnttntactgnatgnatggacttggtcaataaacacaattggntngtt

SEQ ID NO: 619524 - DNA, 343 bp, Homo sapiens
agctcgataatcatgtccaactttagtctcccatatttcagatataatagacttagtagatccttgactgaatttacaaagttacttcttatcgatcgatggcgcatccttccaggtacaacttccttctcacaagctaaggttccttttctgcagctttctcgaattcctgatctctagctgatccagccgcctctggtctcccaaagtgctaggataacaagtatgagctaccacatggcctgaatgcatgaattttgtggtgaactcagatccatagtagggataagtctattacgtcttaagcagacagagttctaatattgggtactacgctttggca

SEQ ID NO: 619525 - DNA, 128 bp, Homo sapiens
ggtgatctgaggatccaggcgttgtagtgatgagcagaaaaagagacagcaaaataaagcaaggtcagaacaaatctgtaaggcagagaccaaaacgatatctgcaaaggagtctgaatttaactgga

SEQ ID NO: 619526 - DNA, 390 bp, Homo sapiens
catcggtagatacgtgaaggcacagatgatcctgttgctcctggatggaacaggtatgtgcaggccagcgattcagccacagaccccttagcgtctgtgtttgggaatgaactcattggaggtggatttgctgacttcaacacattgtcaaaggtcttccttgaatatccttttcgttcagccacatcgagcgtctgtcagcaacgtagtgattacaaaaaatgtatttgaggaaacatcggtcaaaagtgaagatgaatcacacaagcactgccaccaaagatcggaactccaacaagaccctgccctctaccacctgggaaaagatccatcaacatattggattctcctgatccctttaaactgaatgatccatttcagccttaccca

SEQ ID NO: 619527 - DNA, 871 bp, Homo sapiens
gactctagcgtgggcatttgatagagcatgatgtctcacagaaacggtactccgaacccagacgtggctccctcggtttacatgccgtctggaacgcagtcacgtggccaggctatctgtcggtgaaggcgttgcaatgcagctctctccgtaagcgcataagccatgaccaaaccctgatccaagactcaacgattgacttcacgtgcgtcatcacttacggcatcggtatcgacatcaggatcagtgcgggaacgtcggaccgtgaccggtatcccagagtgaacgagaggaagggaagtgcatggtgtggatcgctagtgtacctatacgtcagatgactaccatcactcgatgcgagggcgagtcgaggcgaatttgctcgtggcatagctttgacaatgtcccactttcggatgaaactcctcccggagtcgatatcgaaccgacttggtccttttgccttgaaatctctcgttcaagtagaataaacattcgctgcgaacattgcgagttgaacctaatggaggcacatccaggtgtaatgcgcccttctttagactccatggatagcgcactttaccacccgagagtttaacttgcacacgcaaaaagcgaacctctcggcttcccagagaaaacggggcaagaagagcaggttagtggataaagggactttaccggctcaggatgtgaatcgaagaggtacgtggacggacgttcaagtcccgatgtgccccttgtccgcacatccgcaagatatgttcgctcggttacccagcattgttgcgccaaagatgagggcgccgcactttgactcgtgagatgccagcgcggaatcaaggaggcgctctgtggagccgagagaaag

SEQ ID NO: 619528 - DNA, 513 bp, Homo sapiens
aatgttttcatacagcccttgcagtcccctgacttaatacaacactgaaaaaatgatggtagatattaaacatgcgagatgccccaagaagatcttggaaatagaattcatctgaaatgaaaagtgggcaaaaaatcctacagcaataactgaaagacaaagctcaatacaaaagatatttacaagctgtggcaaatacagtatgtcgcaaggctgcgattttgcatttcattgtgtattagtatttattgcactcataatagtttgtcagcaaaagttgtctacaaagcttaaaaactgcaaatacagtaacctgaaaaatattaacagatttttaaagattgctagcattcactgatcaaaaaagatttgccaacttagagtataataatttgtgcaagcagtgaagcaacaagaggtcagtcattataaagtgttagatattaacatgttgagacaaacctttgcccatttttataatgcaacctttggtcaataaaagcagatttatac

SEQ ID NO: 619529 - DNA, 357 bp, Homo sapiens
  misc_feature (317)..(317): n is a, c, g, or t
tgagatggagtcttgctctgtcacccaggctggagtgcagtggcgtgaactcagctcactgcaacctccacctcccgagttcaagcaattctcctgcctcggcctcccgaatagctaggattacagtcacacaccaccacgccacgctaattttcatgtttttagcagagatggggtttcaccatgttggccagcctggtctcgaactcctgacctcaggtgatccgcctgcctcggcctcccaaagtgctgagattaaaggcgtgacagctggcgtccagccgatagacacgtttaagtcttggactatatttttnacactgggggtcttgtttctggggtgcctagaaaaataaa

SEQ ID NO: 619530 - DNA, 320 bp, Homo sapiens
cttaaggatccccggagcttaccttctaggaggagccttccactgtggctctaggcagggctgaaagcagtacaaagagtcacttcccagcatgcggactgatcaagacaagactttaaaggaggttttcaccaaagaagttcctcccctgtcgcagtctccaagctgatcgcctggctcctgcagttctacggctacctgtcctgtactggaacttgcttgcttacccttccactgttcttagtacctgatctcacagggtcctgttccttcttgcacagaggactaccccagcagccccctctttgactacccggaga

SEQ ID NO: 619531 - DNA, 400 bp, Homo sapiens
gggaagggtcccagaattgtgatgtgacaaggcctccaagcgaggttggacttttaaggggatcggacgacaactagatcctgatgtctgaccatggagatgtgagcctcacgtccaaagaccggatgaggcctctctcccagatgagtagagcggtagacgtgaatgaagacattccaactcgagatactttcgctctggagttgagattatcccaatgggatacatttactctgatgaaggcaacattgaacatgccttcatgctttataacaagtatatgacgctctctattgagaaactaccaaaacatcgagattacaaatctgctggcattcctggaaagacacagtcagagaaattaaaggatattgcattttccaaagcagaagagctggcg

SEQ ID NO: 619532 - DNA, 339 bp, Homo sapiens
gctgatgcgattttgacccaggctgctaatttagcttgggccacatgcggcattcgaactcaccccaatgaatagccctagttttcccaaacacgtcgaaggtctgcttctggccgtagtgagccattcgcctccgggtcaagatcagcccagtgaaagcaacttcaggccatctggacgcaactcgccctttggcgagacgtgccggtacaacgtctgtcgagtgacgccgaattcctcacacagatcgccaaccacgggttccggctgccccatcgccgccatggcaatcgcagtttcgctgcggcatcttgaacggccgcccgccgtttctgccgc

SEQ ID NO: 619533 - DNA, 761 bp, Homo sapiens
  misc_feature (13)..(13): n is a, c, g, or t
  misc_feature (55)..(55): n is a, c, g, or t
  misc_feature (83)..(83): n is a, c, g, or t
attaccggatctnattacgcccaaactctattaagaatgatggaggcactgtgtnctaagggacttcaatgctgcagacattntttggggcccttccccagatctgtgcctcgacacaaccctgtctcggaggtctacggacaattctttcgacctcatggcttggtttttgctctgacatgcactgtcaactgtgggaccttgtatagacaggtgtgtgcctctccaaatcatgtcaaatccattgaatgtacaacaggtggactccaatcaagttgtcaaaacatctcaaggatgatcaatggaaacaggatgcacctgagatcaattttgagtctcatagcaaagggtcagaataattatgtaaagaagtttagttttttttatacatttgtaaaaaaaaataaataaaaaaataaaaacctgtccagctgtgtcaatcaattgtgtgtagattgatgaggaaaaacatgaattgaatccaatttcagaataaggctgtaacgtaacaaaatgtggaaaaagtcatgggtctgaatactttccgaatgctctgtatacccagatgaatcaagactatttaatagttaggaaactttttcaaaatgaaggcctctggctttggctctctgatggttttgtgtcatgtaactaatttgtctatttttgatcaaggggaaggatagccgaccacacagctgctcaccatcattccatctcaagtaccccttttgtggtaaaaatgggagctagcccagtta

SEQ ID NO: 619534 - DNA, 752 bp, Homo sapiens
ggtcggggtttcctgtcttcaacagtgccggtggacggaacccggcgctcgttcccgcaccccgtgacggccgcccatagccagccctccgtcacctcttcaccgaaccctcggactagcccaagtgcccccggcgccgctccaccgccgcgcaagacaccgaccagacgcgaccgacatctccttagtcgccgccatgactgaccgcgtcacaaccatcgcagagatgcgccagaaactaccaccaggaactcagaggccgaccatcaaaccgaacagatcaaccttggaggctctacgcctcctaacagtttaccttgtacaatgtcgttactacgttatggaccgcgatgatgtggcctttgaagacactttgccaaatacctttctatcaacaaatctccatgagagcagagggaaccaatgctgagcaacactgaatgaaggcttgcaaaaccaaacgagggtggacggaatcattcacttacagggatatcaaagaaaagcacagacttgtgatgaatgggagaaggcgaggctgaaatgcaattggagatagtgcattacattatggaaaaacacacatgttgacaaatcacagaccacatacatggagaaactgccaacaaaacgtgggccacatgagcaacacaattgacacccccaaattaggtgctgaaataacaaacgaagaacacatttaacctgaaacttaagacaggcgaaaagccactcaaagcaatagggtgacc

SEQ ID NO: 619535 - DNA, 739 bp, Homo sapiens
aaagcttatgtgctagtacgaggctctgtggtgattacttgcccctcaccgcatattgaactcctggcgtcgtgtccagtgtcacgcctgtccccgtggggagtgctgggcccctccccccagccactcccgagacttgagacctctgcctcagtgacgatgtggtgggaacggggcttgcggctgtttgcctcagcatggagggctggtggcctgctggcagccacccccacagcactgccttactacgtggccttctcccagctgcttggtgcctgaccttgtgtggccatgacctggctgcgtggcatcgtggctgtaccgaggctggcattgcctgggagagctgacctgcagttcaactgctgcaccccctctgcatggtcatagtgcctgatcttcctgcatgtggaaatgccctgctggtttacctgtgtcttcagtgaactgaagctaaaactgcaccaccaatggtcctgcacgggctgcttgcacatctattgcgctcgtcatcgccctggttggcttgtgtggctggtgttctgactaccacatggactgcacgtgctacgctgacctgtacagcctacacagctggtgcgggatccttgtataaagtcctgtacttctgtgcacgtggctggtgggcttcagcattctatcctgtaccccggaggcttcatactaccctgctggaagccgctacctgccacaagcacatcttctttggtgcaaccaa

SEQ ID NO: 619536 - DNA, 103 bp, Homo sapiens
  misc_feature (11)..(11): n is a, c, g, or t
cgtaggccacnagtcaggtcacagaggaaaggccagagaggacaggccggaagggaccccctccagccaggaggagcgactgcagaagacacaaccccgccaa

SEQ ID NO: 619537 - DNA, 355 bp, Homo sapiens
  misc_feature (317)..(317): n is a, c, g, or t
aagcatcgtctcgtacttcaggtcgccgacttccgcggtgttcgacaccagcagcagcgcgatatcgaggcgatcgtcgaccagcatctcctcgatggcttcgcgttcgctttcgacgatgctcacgctcaggttgccgaaccgccgcgaaatggcggacatcagcgacggcatcagatacgccgagatggtttcggtcatcccgatacggacatgccccgagatttgctcggggtcctcctgcgcggctgaaacggtgcgatcgatggacatcgtcgcgtgctgcacatgacgcaggaatcgttcgccggccggtntcagacggacgccttttcggatgacgcagaagcagcgt

SEQ ID NO: 619538 - DNA, 322 bp, Homo sapiens
taggcgcctacaaacattatcagagaggcaaatgaggccgtgctcggtggctcatgcctgtaatcccagcacttatggatgctgaggcaggaggattactcgagcccaggaggctgaggctgcaatgagccatgatcgcaacactgcactccagactgggcgacggttgcaaaactccatctcacaaaacaaagcacccaaaaaagttactagagatacagagggacatattataatgataacaaggtgaatccataagcaagatacagcaattatacacatatatgcatctaataccagagccccaaaatacatgcaacgc

SEQ ID NO: 619539 - DNA, 211 bp, Homo sapiens
ggtcacagctcctgatatcatctaaatgatcagaaggccgtaccaacgggaacgcagctacagaaggctgtagcaagatgccttcttggctattgacgccatattgaccactgaagaagtcattaaagagctgggacagattgcaggccgacccaccgtactgatgaagatgctaaagacaaagtagctagatgaagatgatgtggcacga

SEQ ID NO: 619540 - DNA, 152 bp, Homo sapiens
tgtgggaccatcccagaccgactctgatgttcccccggagactgaagagttgcaccctcatcacggccgatgccaatatcgactctgaagacgagatcggaaaccatccccacagacaaaactgtcacgtacaaacgcatggggcccacatt

SEQ ID NO: 619541 - DNA, 615 bp, Homo sapiens
ggatggcggctctgtcgatctgtcccggctggcgctgattaaccgtctctgcagtcggggcaagctcgctgctctgcatccttgtgcctccgaaactggacgcccaacgtgctccgtgctcgcgctgttggctccttgttgccttgtgctcggcgtccgtgcgaaatgcacaagcagtgcaaagtgcaccatccgtgcaaagcaagagcatgcgtgcgtccgtgcatgcccatggtgggcatgtgccaagatgatgcccagggactgcagtctgcaaagggacgtcagaaaagtgcagcatgctgtgccgtgaggccaggacagctgtgcatctcagaatgtaacatagagcaaccgtatataaaccagggactatgggaagacaatgagagaggggccaaccccgctgagccccggagtggggcgcaacatacccaagggtctcgcacatcaagagaaaacgaagaggagaaaagaggcacaaccaacgcctacaaccaacaacgaacaacacaaacacaccaacaagcacagacaacaaacaccccacagcaagcacacaccaacaacagaccaaacaacaaacaagaacacaagaaaaaacacaccacagcg

SEQ ID NO: 619542 - DNA, 1003 bp, Homo sapiens
gccgcgctctgcttctatacgggctcgcgatgtcgtgaccgactatctatgtcgtaggacgtggcgtatccatccttaaactgagttatccattctatagagtgcgatgatggctgcatctatgagcgcatcataaggtcagcattcctatatatccacgctgtaattaaggaccttacagtgggaactgccgggtgctctgttcttcgcgtgtggaagtgaattctactcgtagattgtctgctacgtgctggttgcagagatggcgctacgcttatgctcctcgttgtcctgttgtggcctgttaccgttatcgcggtgaggtgttgccggatagggtgtgtgctgctgggcttgactgtgcgggactttgggtacattgacgcgtctccctgtgcgtgctaggactgtccgcgcgcagtagtaactcttgtcgcgtgggtgggtaattgaatgacgggtagtgattccaactaacaaagggttgatctcgtctgattccggacatcccatgtggaattctgacaagaatccggagggtcgaagccagggaatggtttgaaatatgggtggtgcgggccggtcatttcagtcctgcccacggtcagtctggatggtccatggaaaggtctacggcgaacgggttcccctgggggagacgaacacgggcggccgggaaacgattacaaggattgtgattcatgtcaaaaaatgccggagaattcccatcgacgggggggggtcaccgagaagagttttgattgaaaagtccctaggaagggcgcaagttgatagcggaatcattggtgggcctccgcagggaatagatcttaggggcgtttggaagaattcctgggggaaggaaaaggctctttcccttgggatccaaagaacagacttgatggatttgggacgggtgcaaacccggagcttgtgggaacacccttggtcatcctgtggacgaaagtcaaaattgcctgggggaagccatgaatccaggaag

SEQ ID NO: 619543 - DNA, 117 bp, Homo sapiens
aaattactgataagaatcactgatcatatcacaaaaaatacaggttaaaataccatttgtgcggctgggtgcagtggctcatgcttgtaatcccagcactttgggaggccaaggtgg

SEQ ID NO: 619544 - DNA, 310 bp, Homo sapiens
atgacaactagggtagtttgcaggtggtaagccatttaccaagatagttgtaggtaaagaagggcagatttattagagaaattgtgaaaatatgttgcagtgggcagctcagcagagaaggggctacctgcaaagaggcaagggctggaggaaagttttatagggtcctgctgaagggtgctacgtgtggaatgaggtcattgtgcccgcaggttgtttgtgattagctgtctctaacaattgttcatacaataattgttcattattgttctcaacttggggctctccccaacctggggacccttcctta

SEQ ID NO: 619545 - DNA, 277 bp, Homo sapiens
gtgactctagcaggatcccagactatctggctaacactggtgaaaccccgctttctactataaatacaacaaaaaaaattatcccggcatggttgtcgcattgcctttattcccagctactctggaggctgaggcaggagaatcgcttgattctgggacgcggattttgcattgagccacgatggtgatactgcactccagccttgggcgacatatcgagactctgtctcacaagataaaaaaatgtctaagcaatgaacatttttcaaaatcgtta

SEQ ID NO: 619546 - DNA, 940 bp, Homo sapiens
agaaggcggatgatgggcgtcccttcccccaagttatcaaagtccaatgggcggctgttgtgtggcactcacaggtatgacaacgggctgtgtgtccctcctgagcaggtgacaacatggcgatgactacacacccaagggttggatgtggcttgtctgatgcgcatgtgccctagtacgaagaaggacggcagctgcacttcgcctaatgtggcagttgtagtgcatgcaagacttggtggaacagcacctcccatcatgcccgtcgaccgatcagtggtacaaagtgccaactgctatcatgtgccacgattactgctcagctactcgtgaccatgcagcaactgtgcactcatgtgcaccactacgatgagcagccgtgacgactccgtcgccatgactgcggcgaccactgtactctgcaagctgcatgccacgctactgtgtacctgcagacacggtgcatgagctggatgatcgtacacacggcatcctgcagctggactcatccaccactcgtagcctaggcacacggcacccattgccgtgcaatgtcccgaaccgactgagtacatcccccatggtccactgcatatgaccactacagcaacgtttgacatctactgcagcgcagcatctgcacatgcgctgattctgatcaacaccacgcatgctgcactgctaccatgtgcccacctccgccatgctacacctgcgagcatccaccagtatccatgatactgcgagtgcccagcagctggacggacaggcaccgacgctcccactacaacacttccaaatggccaatgagaccaaaggtggacgaccactggccttgacaggaccatgtggtcaccatggaacacataccatccctaacacggaccgaagggcacggcaacggacctactggccccttgcacggcgcctgggcgccgag

SEQ ID NO: 619547 - DNA, 1690 bp, Homo sapiens
  misc_feature (1313)..(1313): n is a, c, g, or t
taaaaaaagttgtttggtgggactccataagtgaatttcaagcagtgaggatttggtgggtgccgtgaaagtggccgagggcacagggagtgtgagcgtgtagtgtgtgtgtgaggaattgtgggtgagcgaaaataaaagttccagcgggtgttcaacccctataaaacagtggggtgaccgatacatttttaattacattcttccacttctatagcgggcctttttacgagggcttattccgaaatttataacgaggcctttctcacaagtttctcacatttcttccttatagaagagagaagaacccgtggtggctctcacaaacgagaaaatctcgagaggagtgtgaaccacacaaaggcctgtgaaaaacacacctttgtgtgcacacccccacagacacaaagacactgtgggcaacaaattgtggttgtgtgggtctctgtgacatgtgtgccacatatgtgtgtcgccagaggtgttcaaacctgtgcagagtgcacacacctctgtgccctgtgtgagcaaaaaccctactacacgcgtgtgggggcctctctgtgagtatgtctcatagtggtggtgagcgtgtgacatactctcacaacatgtgtgtgtgcccccaggaagagctgtgtgtactcttatctcagagggctgtgggcgactcaccacaggggcattgttggaagaccaacccctccgagatggtgctccatctctatgtggatacaaaagaagatgtgtgcccctccaaggaggtgattaacacgaggaggctcttttataaaaggtgcgcgagaatattaaaatcttctccagataataagagctatagagaaaagacgtgtgctgacaagttgtgttctccacaaggaaaacccccgaggagcccttttttccacgaagagcccccacagaagaggttgtttggtgggggcaccaacaagagggtgtccatccccgaagggggatatacccccgccggggtgaagaaacctcccacacacggcgggcgaacacaaaggggtggtggcgctcggaggaggggacggtcgtgcgggcgccccacaaggaagggagcaacactctggtgggcctcccccacgaagggagagcaaagcaacattctcctcgtgggggggtgcccacaaacgagaagcggcgagggagagagaagcattcccccaaattccgaagcaccccccccgaggtcggcgccacgacaaccaggggggagacgacccaagggggggtcaacctttgtggggggcgcccacagacggctggtgatacaacaacagaccggncccaagagcaaaaaacaacagcacgggcacaagcgcaccaggtcggagcgaagaaagggcccacagaatttgccgcatttccaacgccgttgggggcaaacaattcaactcatccgccaccgtgttgtagcaatagtagtaaacgcccacacacacggtggggcccagaaggagggcccccctattatagaagcaagcaaagggcagagaacgacgcaagcgatgtacacaccaccggcggcggggcgtggtggggtccccaccgcgaaacaacgaccataactactccctcgttggatcgcccaccgtggtgacagctgggtggtacacacgccataagtaggtggtgcctctctgaaccgttcagtagagggcac

SEQ ID NO: 619548 - DNA, 286 bp, Homo sapiens
cttgtgctggattacataagacatgagctccaagttgagctttgacgtaagatgaaccatttcaacatacgtatataggaggtggagacgggaatccccagtacgaagacatagtatgagcagaggccaggacccactgaggaagatgtctggatgaaccatgcgctgatccccacaggaatcaggattcagccacagggagtgtaaccttccggttatgccaccaaaagccagtgactacccatcccaaattaacacccctcttgacccccgcccagcacaagaa

SEQ ID NO: 619549 - DNA, 1259 bp, Homo sapiens
  misc_feature (868)..(868): n is a, c, g, or t
cattccttaagtcctaattgggaaaaaaaaaaaaaaaaaattgaattagttggaaaaacctcggggtgttgtaacccaacttgatttgtaccccttacacactatttcaataacgtagtacaagggagcttcacacagatttccagtctaattctgccctttcttgtggcgccataattataacctataccattgtgtgtactgattaacaaagtctcattttttctttcaagagaagaactacgagcctagccgtgccccattgtggtgttagaagccagcctttgctaaattggggtctagaaccttgtggtgtctgtgcacaccgtgtctaccttacttcccttaatttcatgtggagacacacaggtgtgactttttaacacactctcattcttatattccacaactccactagtagagaactcaaccgagggcctatcgagcgcgagcgtagctacgtcgaagacattatggttccgaccagcactcaatgtagagagtatcgtcgcttccacaacttatatttctcatagagggttggcgccccaaatttattaatttcttcgggcgcacaacatctcacaccacgcagacaacggcgacacctcctacacaagagcattggcggcttctccacccattgtggcggaacacctttctcgacagcggtcctctttttcaccaaggggcggcggcgagcaaccagaatttttcaacactgttggggcgtttctcaaataaacccaccttttttgtcgggcgctttgaaaatttttacagagcgctcatttctcccaagttgtttagggcgaacgagaccttttttatatcctcgcagtactttagagattataagcaccgaggnttcacagtatatatttcttttggaaaaccctccaagatatatttccttacagaaattccttccttgccaaaccgggtgaaattacacccgtgaatttagaccatatacattatccttgttagaccacacacattgggttcgtccgcccaattttccgactctaaggacaatcatttttggtgcgccttactttaacatcctttatatcccgctttttattttcacaaagcccttgttgtcgtctggtagcgcaacgtacaaacggggccacaaactgcggtgtagttctacacaaatgttgcgtcgtgcgaaaactttttcatattttcgcttgtgaaccccccaagttgagtaatacacacccagggtgtgggatacactcaccaaggcg

SEQ ID NO: 619550 - DNA, 1001 bp, Homo sapiens
gccggagcctctgagatgaccaagcaacactctagatgattgaagtggtgcgtcaggggacccgaacaagttgtctatcatttcaggctgttatagaacatgtaatggggtgtctgcctgattatagaatcccagtgtccacacttaggctgggagcaggaccgaacacagtcgggcacggttatagcagaatccgcacagaggaaaatgtctgacttttatgccctgaggctgtctgcaggtcatggaggagtgctattgagtagctgtgatactgtataaatgggtcccaatgaggactcgcatgaggaaatcgtttcgaactccgttaaggtgaatgcccagtgcgaaagacggagatatgagcgagcctttggctcggatcaccactgaccagcactggtgacagactaccagttaaactgacgctcgggaggtaccctcaagaaggtggatggaactgaaatctagtctagtgctggaacctcggaggatgatcctctgtagtgaccggagtctacagatgtcatgatgcctgtgaagaaagtccgcagaaaatctgtatacttatacggaacgatgggtgagaaattggcgggcctagatttggcatgtggttgggcattcccttgagtcataagaaatgggaaacctgatcccatgccgattaagatgcggtgccgtggacaaggaagggcccagtgatgccagctttcctgggacctttgcatcggtgtactgggtgagatgaacagtgccgggacaccgcaagaattgtgcgtataggttgcgaagcaggttccgaatcatggttgaatgaattgaaaccaagatggactgggaggacgcattgccagggatcacccccatggagaaggtctgcccaacatctgtgcacgaggacttaaaatacggtgtgggggtaactccccagttctcaccctttcagtggccaggttgtgcaccacggcacgctccacccagaggctggacccgtaact

SEQ ID NO: 619551 - DNA, 340 bp, Homo sapiens
  misc_feature (141)..(142): n is a, c, g, or t
  misc_feature (160)..(160): n is a, c, g, or t
acgtgaggatatcaggaggtggcattcacccaccaggagctagggaaagggaaccaagctgtctccacacccaggagaggtgtcccctcccagccaaaagacaggcaggacactctagcagctctccctacctgtgcccannggcccttgactacactcntcatcgtgccattcttgaaggcctaaagccaaggggaaaaggggcagttaaaagaaaggcccccaaacgtgaagcagggacaaggagacggacaggggtcagatgacccatgatagggaagagagggtgctgacggtgttcagaatttcaaattttaattaaaatgaaaaaaaatgtcaa

SEQ ID NO: 619552 - DNA, 132 bp, Homo sapiens
gaaggcatataacagttctcgtgtgtgagaaatagacatcgacatagtgagcggccatttgaattaggaggactggctaaggtgctcacttaagctctttgtagttttgttcagtcaattgagtgtttctat

SEQ ID NO: 619553 - DNA, 741 bp, Homo sapiens
gcaactccatcagttgtttgctgactcatgcacacagcagcatctgggcaccccaacatacgcacgcacgcacgcaggcaggcatcatgcacgcatgcaaacaaagaaaaagtaaaagatttcaggcttagcagttagaaaaaccgagacaaaaccctcttcgcaggacagaaagatggcttgtctcaaactgtgtggggtccgtaaatagctgggaaagacccatattttcattctgtcctgttaataatgttattatcttggctctttaacacataatgtttggatgttacttttcccattatgttatgtcatcactgtcaaaacacatagtcatgtttttcttttttttttttaattaggtatttatttcatttacatttccaagtgctatcccaaaagtcccccacacggctcccccaaaccagcaaatcgcacttctgtggcccgtggcgttcccctgtactgaggcatataaaatttgcacgaccaatgggcctctcttgccactgatggccgactaggccatcgttctgatacatatgcagtctagcagacacgagctccggggggagtactggttaagacattattgttgtaccctccctatagggatgcacgaccccttgagcaacttggggtaacttctactagactccctccatggggatagccacacgtggatgggactccgatcacaaattcccggagctcagactgtctgggtttccaagtgctggg

SEQ ID NO: 619554 - DNA, 344 bp, Homo sapiens
taggccccgggccggggctttggggttttaagggcccctgttccctaaggcctttggcccccaaaagggtgggcccccggggccggggatccggctggggcttctccaagggtaagggccccaaaaagggagggggggaatttttgttgggggccccccccccgcccccccggggggggttttcccccccccccgctttgggggggggccggttggggttttttctttttttgggggctttttttaatgccttgggtttgtttaaagtttttttttttttgtttaggggggtttttttgggggaaaaagggtacccccttttaaagggaaaagtttccccccca

SEQ ID NO: 619555 - DNA, 115 bp, Homo sapiens
  misc_feature (3)..(3): n is a, c, g, or t
aanctcataccattgctgacggccacgcttttgcgccacaagatgatcaacgtcgcgcttccatgcgcggagtgctgtcttcatccacccagaatgaattggtgatgccgaaact

SEQ ID NO: 619556 - DNA, 349 bp, Homo sapiens
gcttgatggtcgactctagcacggatcccctacacagtaggctctgccctaccccttgtctcctctgccttgccttctcataacacttttctctcttcaggacacctttgtgcctctgattctggggcttcctgactattgctggcagaatactgtacacctggattgatttgcaggataaattcatttgagtgacgcagcctccgtgtacgatctctgttgtttttccatcctgttctcctagtgaatcctgtcaccttccctactgagccaagcctagcctttttcacttgcttcaaatcccatcccagttctggagctttcacactacgaaacctggagcctcatg

SEQ ID NO: 619557 - DNA, 435 bp, Homo sapiens
tcgaatctgagctctgtacctgaacattcgtgtcctgccccacccaggccgtgggggctcagacgatcatctccagctgccgggcattctcgtatgacctgtttggcctgttcttgccgaaagaatggtggtgtcttccggcttctgctgctggctggcaaaactgtagtagttgttggggcccaggacccaccctcgcttcttggcgtagtctgtcatctttttgggtgtgttgaagaagaggatccgggtggcctcagtgaaaaggattttctcgtaggccttctcgatgcacccagcgatctcatccctgatagtgtcgagcaggatgtcaatgaagaaggtgtagctctcggcggggatgttacccttggccaggaacactttgttgtagctgccctccatcaggtattgctccagggacacgaatgttca

SEQ ID NO: 619558 - DNA, 147 bp, Homo sapiens
tatagccggacctaacgttcgtatttgcttcctctattaagtgtcagctgtggcatgctcagaggtacctgctggataccagctggagcggtgtgatacccttctttttcagctgtactgtgccttcctttctatgtgtccaccagt

SEQ ID NO: 619559 - DNA, 176 bp, Homo sapiens
caggctctctacctgatctcacatccccatttctttttctggtatgggggtagggccaggatgacatcctgggcctactccttatctaaaagagaaggatacacttttaatttctctatcaagttgacggaaaagttaggtttgggtttataactggtatcaagtggaagaggggg

SEQ ID NO: 619560 - DNA, 1033 bp, Homo sapiens
cgctggagcggatgcggcggcgggcgcagctagctgggtcggccgctggagcggaggtgcagctcgtgcttcccccgtgcacccctcctttgggcgcccgaacatcttggtcgacccggatccggaccaattaccgaaaccttacatacatcatgcacaacacgtatcagcggaacaacaaaaagacacaaagcaacagacatagacataacacacataatccaagtgggtttatcacacaaagacatacgtcataacacaagagacacagaccatagaacacagaaaaacaacaaaagacaaaaagcggacgacataacaacaacgcaccaaaggaccacaaacaaagataaacaaacaaagacaacacaagcaagaaagaagaacacaaggaagacaaacacaacacaacaccacaaacacagaaccaagaaaacaacacaacacaagagcgacaacaagacaaccaccaaacaacagacaacaagaaacaaccaacaaaacaacaagaaacaaaaaacaacaacacaaaacacaaaacaacgaaaaaaacacaaaccacacaaagacacaccacagaacaaaacaacaaaaaaaaaaacataccaaacaataacataaaacacaaataaaaaaaacaacaaccacacaacaaaacataaacacacaaacacacacaaaaaaagaaaaaaaacaaacaaaaaaaatatacataaaataaaacaaccctaagacaccgcagaaacaccacaagcgaccgatagccaccaaagacaacaggagagagaccacaacacaaccccgcacgacacacaacaagaaatccaccacacaaccccacaacacacaaaaaccaacaaaaaaagacagaatacaacaaccagaacaagagaaacacaagcaacaacaaaaaaaacagagccacaaagcaacatatcagcagaccaacaagacaagaaccaagacaaaaacagcacacaaaccaaacaaacaacgaaccaaagaaacaaaaaaaagagaaaacagaaaaaca

SEQ ID NO: 619561 - DNA, 308 bp, Homo sapiens
tggagtgatagtgatagatgaatcgtgattgtacgtgtgagtaatgagtttatcgcgaggggtagtgtatagataatggtggtgtataaaatggatggtccttataatagaggagagatctgtcaaggtgtaaggagaaaatggttaggtctacgtgagtgctccaggctgggagtaataccctgctaagggagagtagactgttcaacctgttcctgctccggcctccactatagcagatgcgagtaggagtaggagagatgtggaggtaagagtcagaagcttatgttgtttatgcggggaaacgc

SEQ ID NO: 619562 - DNA, 144 bp, Homo sapiens
acatctaagctgtggtgtgttccccatgtgtgtgtacaacactggtgactcaggtccattttcacctattaccagtgtccctggggactcctcttaatgttccaaatggaaggacagttgatttccaacatgaggtttatatgt

SEQ ID NO: 619563 - DNA, 140 bp, Homo sapiens
actccaccttactaccagccaaccttagctaaaccatttacccaaataaagtataaggccgatagaaatttgaaaccctggccgcaaataaatataggtccccgcaagggaaaaggtggaaaaattataccccaggctaa

SEQ ID NO: 619564 - DNA, 570 bp, Homo sapiens
gttctccgtttgactgcatagctctcgtgcctgagtgtgatcaggcattgagtatggcctgagctccttcagcttggttcaggggcgctgtaagctactcctctttgagcggtcgctcattcctcagcataaattttatgaggtctttacactcttcatacttgtatttcttctgtcggttggccaggaagccggccagttgagttagaaaacttctctctttgaggtttccgaactgctgtttgttctctgccaactgggggcgcaatttctcgttgatttctagaatgttcatctctgccttctcgctggaccaagggccggctgataccaccatgctgacgtttgtggcagaagaggtggggccagggacttactgttgtgacaaatgtgatcactcccacagcactttaggatccttcaccacaaaaacaaggttcgaggtgcctcaactcagagctgaaagcacggtcagtagctcagactctgatacgagtgaggtagattgtggccagcgtgccaggtaaccgtctccaaaatgttcctctggctctgatattctgtgactct

SEQ ID NO: 619565 - DNA, 354 bp, Homo sapiens
acagcgctaagctccactgacttttacctgagtaggctagaaataaacatgctagctttcattcccagttctaaccgcaaaaataaacccttggttccacagaagctggccatcaagtatttccttcacgccagccaccggattcattattcttctaatagctattctcttccaccatattctctccggaccatggaccctaaccaatactacccatccatactcctccttaattctccttatggctatagcaataaaactaagaataggcccctttcacttctgaatccccgaggttacccaagggaaccctctgacctccgggctgcttcttctcacctgacgagtggcccg

SEQ ID NO: 619566 - DNA, 102 bp, Homo sapiens
agcagatgctggcaggagacacgctcactgacaccagagctggcaggactcaaatggggacagagtcccagtgctgcagggatgagtgaggtcaggaccagg

SEQ ID NO: 619567 - DNA, 132 bp, Homo sapiens
tacagcaggaagaactgcatatccgtaggttggagaaatgatgggagcaggtggtgtttctggatcccagtagactggagcaaccttggagggagctaggaccaagatgtgtagtggaagactgtgtctgat

SEQ ID NO: 619568 - DNA, 270 bp, Homo sapiens
ctaatattagtatgtctcggggctagatctcaaaagcccacgtaattgcacgaacgtcatgttttacaacgcctaagtttgagttgtaattattgtctatatcaatttaccgttcaacattgcttcacctatttaattcataaggatctttcatattaaaatttaaccttcaaattcaaccgccatgtgctttaataaaggaaccattttttagagacgtctgagctcacttttacatggtggtgcctactgccgttaatgtccaagata

SEQ ID NO: 619569 - DNA, 164 bp, Homo sapiens
tccttgcctacaccaccacaccagttgaacagtctgtggtgatggtttcattttcgtaggtatgcttgtgtgttggtatgttatgtctaactttcatttgggtccgtgcaaagcattcacttcaggttttcatagaaacatttcccattgttttctcactaata

SEQ ID NO: 619570 - DNA, 539 bp, Homo sapiens
cacgtaacgccttcgggtgccaccgaccagcgtcctggaatctcaggtactggaacgcctgatcgtcgaaaacctgcaactgcagattggcgaacgttccggcatccgtatttcggacgaagaactgaaccaggctgttggcaccattgctcaacgcaacaacatgagcattgatcagttccgcgccgccctggcccacgatggcctgtcctatgaggacgcccgtgaccagatcaagcgcgaaatgatcatcagccgtgtgcgccagcgccgtgtggccgaacgggttcaggtgtccgagcaggaagtgaagaacttcctggcttcggacctgggcaagatgcagctctccgaagagttgcacttggccaatatcctgattccaaccccggacggagccaactcggagcagctcaatgccgctgccgctaaaacccaggcgatctacgagcgcctgaaagcgggtgcagattttgcccaaatggccattgctcagtcctgcagcgataacgccctcgaagcggagatatgtcgaaggc

SEQ ID NO: 619571 - DNA, 295 bp, Homo sapiens
ggtcgacggatgtgtctggagtcttggaagcttgactaccctacgttctcctacaaatggaccttgagagcttgtttggaggttctagcaggggagcgcacgtactcgtatacccttgaccgaagaccggtcctcctctatcggggatggtcgtcctcttcgaccgagcgcgcacgttcgggagggacgcacatggagcggtgagggaggaaggggacacccgcctagccagccagatcagccgaatcaaccctggcgatcaatggggtgacagatgtcgcagccagagtcgacg

SEQ ID NO: 619572 - DNA, 175 bp, Homo sapiens
agctcctgcccctcctaaagctgagccaaagcgaaggctttaaaggccaagagggcagtgttgaaaggtgtccacagccacaaaagagagatccgcacgtcacccacttccgcgccgagacactgcgactccgagacagcccaatatcctcggagagcgtcccaggagaacagtt

SEQ ID NO: 619573 - DNA, 320 bp, Homo sapiens
tctgacggcttagccgcggtgcagactgcggcggcggtggtcttgaggagttctttcttggcgttaaagcggagcggatcccccgacccgaggctacgatgagcacaccgcccgtgccccaggaccacagctgccccgagtcagagggcgcagtgcgcattcaaagagcaaagagacaaaactcaaggacaatttttgagagaaaacgtttttgcatacaagcaggaaatgaggtgttatccagtagagatcagagagtgtgacatctttaggaccaagttcaagaaggggcttaagttcttgaactttaaacaaaaatg

SEQ ID NO: 619574 - DNA, 394 bp, Homo sapiens
ggcaccgattgtatgtatgtagcaatatgtcttcaaagtacattcatggtatatgatgtgtcatgtgtccttcctgtataatattcctattttagtatacaatacattttatttatccattcatcaattgcttccatattttagctattgtgaagttattgctgctgtgaacatggagtgttcacactatctttttcgagaacttgagttcagttatgttggctgtataccaagaagtgtaattgcttaattatatggtatttctactttgtcagtttttgacgaattgccatactgtttctcctgtgtggctgcaccatgtttgcattcctaccgacaatgcacaagggttccaatttctccacatacttgccaacaccttttcttttctttc

SEQ ID NO: 619575 - DNA, 396 bp, Homo sapiens
ttttgaatacccagccatgcgcttgacccatgctgctagtttgaaattctcaaaattgtgggcaggaagttaaaagcatattactctgaaaaaatatatacacatactttttcagagtaatatgctttaaaacatgttacttattgcattacttccaaagtacatggttttgttgtatgtatactataaggagtgactactattatagtgagaacctgcttctacaaaaaatagaaaaaaaaaaattagctgggcgtggtagcatgtgcctgtaggcccaacaacttgggagaccgaggcaggtggatccattgagcctggaaagtcaagggtgcagtgagccatgatcatgccaccacattccagcctgagtgacagagcgagaccttatctaaa

SEQ ID NO: 619576 - DNA, 233 bp, Homo sapiens
ttagagtatcccgacacatgctcaagatgggaagcatctttcctgcacctaaataatcatgcaacctctcagactgacgccatccggtcccaaagccttaagtggagagaagcaaagcacgccacgcctgtcctgtccgtggacctctaccttctggactccctacgggtgcagagcacttgggtttctctactgccatcttgagcctgagtctccatcttgagcctgtgtct

SEQ ID NO: 619577 - DNA, 957 bp, Homo sapiens
  misc_feature (578)..(578): n is a, c, g, or t
  misc_feature (955)..(955): n is a, c, g, or t
taaccccgcgcactcaaccaaccatcatacttattctgacacaatttatgcagcaggtctgagcaactaccggtagggcatgaactcttcagatcatgtcacctattacgaaggagtggaagaggagacatttctgcatgaatcctcatgatctacaaaacaaaatccttgctgccttggactccacagctcgaagacggttcgactacgcgacacatgcccgatctcataagaatccctctcctgaatgactagaaaacccacttaccctaaaggcccttgcgaaaaaaaaaaataatagcgcctcttctggcccccatacggcgcattctcatgcagctcgttagccttaattcgtgggttacataccatgatcctcgactcactaactacaaagacctatgcaactctaggctgcctgcgaccggcctcacacccagctcaaaggcaagcgaaacgaataatacctcccaaaaacacgcgatctaccccacgaaataagcttcgcgaccactatccgccacgtccaacgcccctcaccccgtaactataggatcgtctacgctatacgcacaacncgatcacgctccgcaccctctcgccaaatcatcacaaatacacacatcacccgaacctcccaggatgcgccctatcctgtacagcgactactcactattcaccggcccaattccgcaaaactgctggccacgtagtcgtcgcatattaacatcacccctggcccacacaccatgacaccctcgtctattccacttcccgagtagaagtaagcagaacgcacttagtgaaaaggaccgcaaccgcctgcgcgatatcaaacagtctcgtgttgtcgttattctgtaagacctggacttgtcgcctacgccactccacagtaacagacacgccctgtacgtcgctcgagtcggaacttagaatctgagactctgccgcngg

SEQ ID NO: 619578 - DNA, 147 bp, Homo sapiens
gggtgatcaggtttatatttaaacaaccaaatcctggccaggtgtggtggctcatgcctgtaagcccagctatttaagaggctgaggcgggaagatggcttgaggccaggagttcgagaccagtctgagaaacattgtgagaactca

SEQ ID NO: 619579 - DNA, 447 bp, Homo sapiens
ttgaccagttaattcaataatcgagtataaatagataaacgcttgcaagtcgtaacttgttgagtggatccaactcgtgtaagtactatcgtattctgaccaagccttatcgaagtctgtacgtggcgaaacggtcttccagtcaacaataattttgttattgtagtctacgaagcaaaccgtccattaaatgtatcgttatcaaacggacttcactttctgaacttcacatgtttcaaccaagtgacttgtataaatcatcaagtgcattaacattgtttgcgacacgttataaattgtttcaacgagccttcagtcacgttcaggactaccatacttatagcgatttcatttcttcgtctgacaacgtctcttcaatacagacatacattatgagtaacgaccataacatgctctggttgtcgattgatacgtttctcatctacg

SEQ ID NO: 619580 - DNA, 1058 bp, Homo sapiens
gttgaggccagagcattgcccaccaggtgtttcccaggcacggaccccttgcccagcgtggcattcagagggggcagctccggccgcctgctcaggagtggggtgggatggggagctgcctctggagccttgtgctgaaggagaggaccgttgacggagaaggacatcacccaagtcctggggcctttggggaaagtaggaaacctgcctgtcctacaggagaagagaccacctcaccaactttgaaggatgcaggccttgtttagagcagatctcagaattggtgccctgcgggctccaggccttggccctgctggtggatgaaagtggcacaacctgccctgaggcctgagtgtcacgggaacaacagctagacggctagacactggccccctcaccccacctcccagggtggcacggctgtccagatatggtgctgagggaggtcagtgggatagccccaccatgggctcccccgcagactgcctgcactgaggactgtccccataccccttctgaggagggtcccaaatggtgtcccagagtgcagtcaactccccgttactcccagaagcagggtgctggggcgcaattccccaggcctgggaaacgaggaagggcatgtgcctggcagggccagtctcttggtggggagaagggcctgccgcatcaatcccagcttctctgtttaattcaagatgcactggcttggttgggagggttaatcgcctggtccagggttcagtgggaaccgaagcctggcatgcctggtcctggaccgtcaatgtcctgggactcgtgcctgtatgtcgcttaagggcggaagggtcccagaaggctatctctagtccagacagaaggctttaacagacccatgttgtccggaaacgtaaccttatggagtgtaacgaagaacacccattaattgtaccgtagggagtaacaggagattgggcaagggggggcgagtgaacgccagttagtctaacgcttgggaggcgaagggtagttatcgtgcgggcggagtggaaccgcggcgaaaaaccggttattaagaa

SEQ ID NO: 619581 - DNA, 471 bp, Homo sapiens
  misc_feature (393)..(393): n is a, c, g, or t
ttctagcagtggggaagtgttaactatctttccctaaggaagaagaatgatgttacttcatcacatacacttttacagtttatctggggctttcaagtgtgtttctcaaattcccctcatttaaaaactgatggccgtaaaaatgagaatgtacaaataaaatgttatactttagtatccaatctttaatcctaggactatgcaatagtcttgattttgtgacttgcttttttcacttaaatactgtaccataaacacttatattagggaactcgtacataaaatacaagcttgtgaaacaaccgttgcaattatttcttctagttttaagtattttcgggacagagttcttctttaccctattcaaacacaaccccaaaaggcaggaggcgnggagtaaattgcatctggcagcggcgtgttaaaacatctctgggatttaaccaccacagtaattctcacagtatcctt

SEQ ID NO: 619582 - DNA, 148 bp, Homo sapiens
actacaccaaagatttaccagagagatttggataggaatggggctgatggagcttcatctgtttataaatctccggcgctgcatgataaaacgaagtaagagctttgaaacgcttcagacgcctgctcctggctcatcacataaccag

SEQ ID NO: 619583 - DNA, 781 bp, Homo sapiens
gtcgggcctagatgtctcgctcggtggccttagctgtgctcgcgctactctctctttctggacgcctggcaggctatccagagatactccaaagactatcaggtttactcacgtccatccagacagacgaatgtataagtcgaatttcctgaatgctagtgtgctctagggtattcatccgatccggagcatcgcaagtagacttacgtgaagcactggagagagacatcgcaaaagtggagctattcagtacttgtctttgtcagcaaggactggtctatctatatcttgtactacactgaattcaccccgcactgaactgagatgagtatgcctgccgtgtgaaccatgtgactttgtcacaaggcccagagatagtctaagtcgggatcgagagcatgtagggcagacatcgatggaggttatgaagatgccgcatgtggattggatgaatgtcaacatgccgtggcattgactcctgccaaatggaaagtattcagcataatggctttaatatcgagctgtacgactttgactgccgcacagaagtggtagccagttgagtgaacttcagttcgtctgccagcactgggaccaccggcactctggtaccttgacataaaattgcgtgaggtttcgcagttgccggccattccaaactaatggtggacagcgtgactcctggacggcagggtggcctcaagccgaggcggtcagagcacaggtaggagcctgggtgacgctcacgaaggtctacaggagacagtaaaggaaagcacac

SEQ ID NO: 619584 - DNA, 941 bp, Homo sapiens
  misc_feature (277)..(277): n is a, c, g, or t
  misc_feature (564)..(564): n is a, c, g, or t
  misc_feature (849)..(849): n is a, c, g, or t
  misc_feature (905)..(905): n is a, c, g, or t
  misc_feature (917)..(917): n is a, c, g, or t
  misc_feature (931)..(931): n is a, c, g, or t
gtggtatgaaactcagtgtgcgccgactaactctcccccttttattagagacaaagtctgcgtttcttagagcctgaatacctccctggcagacgcgctgtagcgcaaccgcacgaaaccacacacacagcatcctccccacgttatttatgttatttcttaattaatcttgatttggtagaagacaaatctatcgacgaatacgactactaataggggggaaggcgcgccacggactgccgataccacaatcaactacatacggcattcggtatcncgttcgagttgtgcgtgtctgaagtgtgtttgagtgggtagaatactagattaacgacggatagacacaacttgatgtgagttcttcccatacacaatcgccccacacctccttgtgctttcgactatgttctcgtctcgcgcactgtttatgttgttatacaagttgaggcacatacggcacacacgagcagcaacacacaccagcgccagccagcactacaacaaatatttatccattataacgaaacatatccatatgagcgtacatctaacatcaataagatntcatggaattatggagtctaggatgatagtaagtgagagaccgaaggaagcacgctaataataacgcgtaaacgcacgatgccatgagattgaattaatacacgtaagaaagaactcactagacatgaaggtaatagagatacatcggcccactattatccgggcgtctccctgtacttatgatcgttggactacgtatattatttcgttcgagatgttcgtcgttcgatgttactccatcgtctacgtataccgaccacaccccactcatatctgacatcatcncatccgacatcagccagacacactaccgtaagacgatcacacgcgtgagtcgatgntagtcgccctcncatcctcgtctttnctactgcgta

SEQ ID NO: 619585 - DNA, 319 bp, Homo sapiens
gatggtgctgtaagattcagatgtactggctaaaatttaccattgtggtgatgtaaatggtgtagaaaaccattaattcatccaaaatattaaactatattaataagagaatgtatactttaagaaagcggtccccttatttaaataaaatagtgttggtctggaagtccagtgtgggggcaatctggggggggatcctcctctattcttccagaaccttggtctggcgaacattcttaatgggcccagatcaggattggagcggaagaccgattgtacctttagggcgctgtaggtaaccctacagcgctttccctaa

SEQ ID NO: 619586 - DNA, 363 bp, Homo sapiens
  misc_feature (124)..(124): n is a, c, g, or t
ctgatgcgagtatgcaatgtatagcctgtggtcagatctctgtctactcttctgactatttactgtatcatgtcaaagggatggagggatctaacagaagcctggttaatttaactccatcaangatcatggttacatagataaacttatttaccaaagtaaaaagaactcatggtacttctaatgaaaatggggattattacaagtgtggtttatatgttttctttatgattcctggtcaagaaagatccccaaaactgtatccctaacctttaactcaggattgtacagtatgtttaggtccctcaaaaagtgacctaagctaatgttataaactgctaatgatttatatatcacttagtg

SEQ ID NO: 619587 - DNA, 220 bp, Homo sapiens
tcgggaacgggaacctggacttgctcctcccactcctggacgaaaccccgtctctactaaaaatacaaaaattagctgggcgtgatggcatgtgcctgtaatcccagctactcaggaggctgaggcaggagaatcgcttgaacctgggaggtagaggttgcagtgagccgagatcgagccaatgctctccagccaggcgacagagcaagactctatctca

SEQ ID NO: 619588 - DNA, 209 bp, Homo sapiens
aaagtggctgtgtgcactggccccagcccatattccgccagactagggagggacacacctagggcccatctcagaaatggcacaagactaggttctggcagcttcatttgcgagagtgaaactctcctcgggaaaccaagctcaggccaaatgcgtctttgatcaggaaagcagcgctttccggtttctcccttctccggtggcgtggt

SEQ ID NO: 619589 - DNA, 687 bp, Homo sapiens
  misc_feature (180)..(181): n is a, c, g, or t
  misc_feature (184)..(184): n is a, c, g, or t
  misc_feature (190)..(190): n is a, c, g, or t
  misc_feature (219)..(219): n is a, c, g, or t
  misc_feature (226)..(226): n is a, c, g, or t
  misc_feature (231)..(231): n is a, c, g, or t
  misc_feature (239)..(239): n is a, c, g, or t
  misc_feature (254)..(254): n is a, c, g, or t
  misc_feature (269)..(269): n is a, c, g, or t
  misc_feature (282)..(282): n is a, c, g, or t
  misc_feature (295)..(295): n is a, c, g, or t
  misc_feature (302)..(302): n is a, c, g, or t
  misc_feature (304)..(304): n is a, c, g, or t
  misc_feature (310)..(310): n is a, c, g, or t
  misc_feature (321)..(321): n is a, c, g, or t
  misc_feature (347)..(347): n is a, c, g, or t
  misc_feature (389)..(389): n is a, c, g, or t
  misc_feature (412)..(412): n is a, c, g, or t
  misc_feature (418)..(418): n is a, c, g, or t
  misc_feature (422)..(422): n is a, c, g, or t
  misc_feature (468)..(468): n is a, c, g, or t
  misc_feature (473)..(473): n is a, c, g, or t
  misc_feature (518)..(518): n is a, c, g, or t
  misc_feature (530)..(530): n is a, c, g, or t
  misc_feature (532)..(533): n is a, c, g, or t
  misc_feature (549)..(549): n is a, c, g, or t
  misc_feature (553)..(553): n is a, c, g, or t
  misc_feature (599)..(599): n is a, c, g, or t
  misc_feature (684)..(684): n is a, c, g, or t
taaaccctggtgttctaagcataaaaaaggaaatagaaaataacacagaccactctattttaatatttttaagtagcataaatcataatggtttgtatactacactgtacaaataatatactgttacttttgaaagaaaatgaacttcttatagggttttctgaaatagttactccatanngcnaagatnttgaccctttagccattgcaacagcaganggaatanaagcnttgagganccaagtcttccagtngtgcctgtatctgtngccactgagggangagcctctcaganccctgtngnggcccngtccctctccngcgccaggcccccccggccccgccgngggcgcgtgccgctgggttttgtttttgttttttgttttttncaagcctccttcccctttaaganaacttncgcntcttcatggcttccgccttgaccgccaagctcttggcacagatggncaggnccacaatgagaacgcccaccacaaatgtcaccaggggccagaggnagcaatgcaggngnncaatctcatcatgagngcgntgcagaagcacatcatctggtctttgatgttgattaaaatagcaanttaatggctgggaaccaatctcatctttccagtactgttgccaattcatgacactttccaaattcttctgattttctctcttacnggg

SEQ ID NO: 619590 - DNA, 1432 bp, Homo sapiens
  misc_feature (1)..(1): n is a, c, g, or t
nttcttgatgtgttggtgtgtccccccccctagtaggcagcgttcgtgtgtgtggttgtctcgtttgtgtgggggagatgagtgttgtgattccccggcttggtgtgtgccgcaagagtttgtgtcaccgcccctccgggtggttgacaacaatttgtttgtccgtgggtgccccaaggtttgggtggatgcgccccgtcaagtgtgtgtgtccccaaagcggtccgcaattatgttggtgttcttctctaggtgcctcgacgagtaagacgctttttttttcctctggccgtttctgcttggtctcccccaccacggggtgtgtttatatcctcaggatatccccacacacacatgtcttctttagtcatccctcccgatgagttcttgtcccctacagatgtaaaaaagttgtgatgaatataagaattgttgtggccgacacatcatcatgggaagacacttctaggagacgcctcaacactctttgaagaggggcccacaagagagatgcgcgagacactaccccccggtgtgtcactatctcttttaaataggtttttctctcacaacacacaacactctctcgccacacacttctgagagtggcgccacacacacctgctgggaggagagaccactccttctcacacgaggtggtgtttgttcttctgacgatatagagcaggggccacctactgttgataataggcccacagcggagagtagagacgacaccacacacaccaggtggtccactgttgatcacacagcgtgttagtaatatatactacccacatttttcgtcgagaggcgcataactatgggtgtgtgtgcacccaccgtatgttttctcgggtgtgagaaataaattcttccaacagagatatagccacgcgatataccacagctttgtgggagaaggcgcaaccgcggagagccccacacatgttatatgtggagattatagagacacactctggggcacccacagctggtttctctcttctgtatagagaattgtggagagccacatccacgcggagccttctctttgtgtccctctatagtggttgttctataagagctacatcatgcgccacatatatataataatatgaaatggagatataggcgctcgagagcccacccacagagaaaatatttggtgggagaatacccacgtgtctcgagtaataatacgctcgagagcactatatatgtggagaatacacctgtttctttaatatctcgaggtggttaagtgcacctcgtgttgagatagtgttgataaaagttctcggagatagaggttctctttggtgtttataattgacttgaggttttgtctttaaaaggattatttcatcccttgttagttgttttgccgttttttaccttccataagtattagaagttataagcccctccc

SEQ ID NO: 619591 - DNA, 1906 bp, Homo sapiens
  misc_feature (66)..(66): n is a, c, g, or t
  misc_feature (161)..(161): n is a, c, g, or t
  misc_feature (163)..(163): n is a, c, g, or t
gacgggtagcaggggtcagcactggccccctcccagcttggcagtggcatgaagatgggagtgggngtgtatagtggaggaagcacctgccgggacccccacctgccagctagttggacaccccaaggctgtgtgctgcccacctggtgttccccaacacncncagccctacccagtgcacccctccggtgcctgctttccctgatgcctgcgatttagaccagcccggctgtatccacggcaacagaagcaggagtgtcactggccgccagatcactgagggtcccacaatgtggcccgggctgtgatttacctgggtgagacagcttgagccccatcgtggattccaagacatccctgctgagagagccaaggtgcaatgtagcaggacaactcatggagcccccccgggcccatcgagtaccggactggctgaccccctagggttggcagtagcccctgaccctcagtatggccaacactaccggagagcctgaggaggtgagcggcgctctgtccccaccgtccgcatcagcttatgtgaagctggtactgctgggactgattatgtgcgtgagcctggcgggtaacgccatcttgtccctgctggtgctcaaggagcgtgccctgcacaaggctccttactacttcctgctggacctgtgcctggccgatggcatacgctctgccgtctgcttcccctttgtgctggcttctgtgcgccacggctcttcatggaccttcagtgcactcagctgcaagattgtggcctttatggccgtgctcttttgcttccatgcggccttcatgctgttctgcatcagcgtcacccgctacatggccatcgcccaccaccgcttctacgccaagcgcatgacactctggacatgcgcggctgtcatctgcatggcctggaccctgtctgtggccatggccttcccacctgtctttgacgtgggcacctacaagtttattcgggaggaggaccagtgcatctttgagcatcgctacttcaaggccaatgacacgctgggcttcatgcttatgttggctgtgctcatggcagctacccatgctgtctacggcaagctgctcctcttcgagtatcgtcaccgcaagatgaagccagtgcagatggtgccagccatcagccagaactggacattccatggtcccggggccaccggccaggctgctgccaactggatcgccggctttggccgtgggcccatgccaccaaccctgctgggtatccggcagaatgggcatgcagccagccggcggctactgggcatggacgaggtcaagggtgaaaagcagctgggccgcatgttctacgcgatcacactgctctttctgctcctctggtcaccctacatcgtggcctgctactggcgagtgtttgtgaaagcctgtgctgtgccccaccgctacctggccactgctgtttggatgagcttcgcccaggctgccgtcaacccaattgtctgcttcctgctcaacaaggacctcaagaagtgcctgaggactcacgccccctgctggggcacaggaggtgccccggctcccagagaaccctactgtgtcatgtgaagcaggctggtaggcagacaggcagagagaaggtcatggccaccgtgatggggccaacagcaagggaggggtaggggcccatacaggagtcctcctttctgagctccagccccagcccctcgaaccacctgtaatctaggcacctttgccaacacctcccaaggatggaggactgggcgagggactgggaaagaggcatatttagttttgtggggcctgtctccgctgcctccttctccacttctacaatctcattctctctctctctctctctgtctctctctctctctctctctctcagaagtgacaattc

SEQ ID NO: 619592 - DNA, 209 bp, Homo sapiens
cacttgtgtggattttgtcactgtgcatgtatgtatgggtttttggggcattggtcctggtgctctctcctcatcctgcatcccgtaccctctgtttcatggcccaggcagtgtgaaggcggagatgctgcacatgtacaacctaagaagaccctctctttaaaaaagaattaaatataaataaataaataataaaaatataatgttta

SEQ ID NO: 619593 - DNA, 2029 bp, Homo sapiens
  misc_feature (66)..(66): n is a, c, g, or t
  misc_feature (161)..(161): n is a, c, g, or t
  misc_feature (163)..(163): n is a, c, g, or t
gacgggtagcaggggtcagcactggccccctcccagcttggcagtggcatgaagatgggagtgggngtgtatagtggaggaagcacctgccgggacccccacctgccagctagttggacaccccaaggctgtgtgctgcccacctggtgttccccaacacncncagccctacccagtgcacccctccggtgcctgctttccctgatgcctgcgatttagaccagcccggctgtatccacggcaacagaagcaggagtgtcactggccgccagatcactgagggtcccacaatgtggcccgggctgtgatttacctgggtgagacagcttgagccccatcgtggattccaagacatccctgctgagagagccaagatggagtttcgctcttgttgtccaggatggagtgcaatggcgcaatctcagctcaccacaacctccacctcccgggttcaagtgattctcctgcctcagcctccccagtagctgggattacaggtgcaatgtagcaggacaactcatggagcccccccgggcccatcgagtaccggactggctgaccccctagggttggcagtagcccctgaccctcagtatggccaacactaccggagagcctgaggaggtgagcggcgctctgtccccaccgtccgcatcagcttatgtgaagctggtactgctgggactgattatgtgcgtgagcctggcgggtaacgccatcttgtccctgctggtgctcaaggagcgtgccctgcacaaggctccttactacttcctgctggacctgtgcctggccgatggcatacgctctgccgtctgcttcccctttgtgctggcttctgtgcgccacggctcttcatggaccttcagtgcactcagctgcaagattgtggcctttatggccgtgctcttttgcttccatgcggccttcatgctgttctgcatcagcgtcacccgctacatggccatcgcccaccaccgcttctacgccaagcgcatgacactctggacatgcgcggctgtcatctgcatggcctggaccctgtctgtggccatggccttcccacctgtctttgacgtgggcacctacaagtttattcgggaggaggaccagtgcatctttgagcatcgctacttcaaggccaatgacacgctgggcttcatgcttatgttggctgtgctcatggcagctacccatgctgtctacggcaagctgctcctcttcgagtatcgtcaccgcaagatgaagccagtgcagatggtgccagccatcagccagaactggacattccatggtcccggggccaccggccaggctgctgccaactggatcgccggctttggccgtgggcccatgccaccaaccctgctgggtatccggcagaatgggcatgcagccagccggcggctactgggcatggacgaggtcaagggtgaaaagcagctgggccgcatgttctacgcgatcacactgctctttctgctcctctggtcaccctacatcgtggcctgctactggcgagtgtttgtgaaagcctgtgctgtgccccaccgctacctggccactgctgtttggatgagcttcgcccaggctgccgtcaacccaattgtctgcttcctgctcaacaaggacctcaagaagtgcctgaggactcacgccccctgctggggcacaggaggtgccccggctcccagagaaccctactgtgtcatgtgaagcaggctggtaggcagacaggcagagagaaggtcatggccaccgtgatggggccaacagcaagggaggggtaggggcccatacaggagtcctcctttctgagctccagccccagcccctcgaaccacctgtaatctaggcacctttgccaacacctcccaaggatggaggactgggcgagggactgggaaagaggcatatttagttttgtggggcctgtctccgctgcctccttctccacttctacaatctcattctctctctctctctctctgtctctctctctctctctctctctcagaagtgacaattc

SEQ ID NO: 619594 - DNA, 134 bp, Homo sapiens
gaggatcccgtgatgttatcccaacacctgaaaacaggatgaaagccctgtttactgcaattccttttacccagtgtatcatgtctacctatcaacagaaaattacaaagcatacttaaaaggcagaaaatgca

SEQ ID NO: 619595 - DNA, 489 bp, Homo sapiens
  misc_feature (42)..(42): n is a, c, g, or t
  misc_feature (61)..(61): n is a, c, g, or t
  misc_feature (124)..(124): n is a, c, g, or t
  misc_feature (282)..(282): n is a, c, g, or t
aaaaacacaatccactgaaaaaaaaacggatcggattaaacnttaccccacttttattganttcccctgcactatgccactctgtttttcaaacactatcctcaaggaaatccctcaacaacanccccttcctttaagaggtaagcacctaaggcccctaaacatgatggttagagacactattaaaaagcatgttcctaggcagggtgcggtggctcaggcccagcaatccccagcactttgggagacctaggtgggcagatcacttgagatcaggagttncaagaccagccctggcccaatatgtcgaaaccctgtctctactaaaaatacaaaaaaattagctgggtgtggcagcatgcacctatagtcccagctactagggaggctgaggcaggagaatcacttgaacccgggaggcagaggttacagtgagccaagatcgccactgcattctagcctgggcaacaagagtgaaactccatctca

SEQ ID NO: 619596 - DNA, 252 bp, Homo sapiens
ctgcacgaagtgtactaacttggaggatggttttgggccaagccaggaaacggacaggaacgtctgtggttaacatctgaggacacaatgggagaggacctagcgttctaaatgaattgtcttaagatgcttcataagattgcaacctggtgagaaccatggaaaggggactgagtttctctgcaggacaaggcaccttgctactaacttctatctcccacttcggtgggcacgcggtgtaccgtagctcga

SEQ ID NO: 619597 - DNA, 291 bp, Homo sapiens
atcgagctcggtaccgacagcatcccgtaaccagtgcaatagataccatatactttaggaatcaaggcacttccaaatgagcatgaaaactgctgcttgttatacgaaaacaagcccttaggcatgcgttactcttttttttttttttggaaacaaggtctcattcggtggcccgggtgggggtgcgggggttcaatctgcggtcagggcaacctcggcctccggggtccacacaggttctcgggcctcagcctctggagtagctgggataacaggggagatcctcaaaag

SEQ ID NO: 619598 - DNA, 140 bp, Homo sapiens
gcgactctagacgatctttcccgactagcccgacagcaggcacgtggtagcagcagtgctacgggtggtctgcgcagtttgtaacaggtgcctgggccaatagctgggggttcagtgacacatgttcatgaattagccag

SEQ ID NO: 619599 - DNA, 739 bp, Homo sapiens
  misc_feature (26)..(26): n is a, c, g, or t
  misc_feature (79)..(79): n is a, c, g, or t
  misc_feature (81)..(81): n is a, c, g, or t
  misc_feature (83)..(83): n is a, c, g, or t
  misc_feature (92)..(92): n is a, c, g, or t
  misc_feature (94)..(94): n is a, c, g, or t
  misc_feature (96)..(96): n is a, c, g, or t
  misc_feature (111)..(111): n is a, c, g, or t
  misc_feature (120)..(121): n is a, c, g, or t
  misc_feature (129)..(129): n is a, c, g, or t
  misc_feature (142)..(142): n is a, c, g, or t
  misc_feature (152)..(152): n is a, c, g, or t
  misc_feature (173)..(173): n is a, c, g, or t
  misc_feature (176)..(176): n is a, c, g, or t
  misc_feature (180)..(180): n is a, c, g, or t
  misc_feature (182)..(182): n is a, c, g, or t
  misc_feature (199)..(199): n is a, c, g, or t
  misc_feature (207)..(207): n is a, c, g, or t
  misc_feature (214)..(214): n is a, c, g, or t
  misc_feature (216)..(216): n is a, c, g, or t
  misc_feature (218)..(220): n is a, c, g, or t
  misc_feature (237)..(237): n is a, c, g, or t
  misc_feature (243)..(243): n is a, c, g, or t
  misc_feature (247)..(247): n is a, c, g, or t
  misc_feature (252)..(252): n is a, c, g, or t
  misc_feature (276)..(276): n is a, c, g, or t
  misc_feature (281)..(281): n is a, c, g, or t
  misc_feature (313)..(313): n is a, c, g, or t
  misc_feature (323)..(323): n is a, c, g, or t
  misc_feature (343)..(343): n is a, c, g, or t
  misc_feature (349)..(349): n is a, c, g, or t
  misc_feature (365)..(365): n is a, c, g, or t
  misc_feature (367)..(367): n is a, c, g, or t
  misc_feature (378)..(378): n is a, c, g, or t
  misc_feature (385)..(385): n is a, c, g, or t
  misc_feature (392)..(392): n is a, c, g, or t
  misc_feature (401)..(401): n is a, c, g, or t
  misc_feature (408)..(408): n is a, c, g, or t
  misc_feature (411)..(411): n is a, c, g, or t
  misc_feature (420)..(421): n is a, c, g, or t
  misc_feature (425)..(426): n is a, c, g, or t
  misc_feature (434)..(434): n is a, c, g, or t
  misc_feature (436)..(438): n is a, c, g, or t
  misc_feature (443)..(443): n is a, c, g, or t
  misc_feature (446)..(446): n is a, c, g, or t
  misc_feature (452)..(452): n is a, c, g, or t
  misc_feature (459)..(459): n is a, c, g, or t
  misc_feature (469)..(469): n is a, c, g, or t
  misc_feature (474)..(474): n is a, c, g, or t
  misc_feature (649)..(649): n is a, c, g, or t
  misc_feature (656)..(656): n is a, c, g, or t
  misc_feature (666)..(666): n is a, c, g, or t
  misc_feature (733)..(733): n is a, c, g, or t
tctcttctgtttgcaaaatatgtttnaaagcattggtagtgctttccttatcagtaactggagttctcctgcttgcacnananaaggtaaanananaatcagtattcttanatggcaatnnggggaagnagcaatataccantgtacaaaantgaagaaaagttcctaatttntantttntnaagggagatgaaaggangtttaaantatatananannntcaaaaggaaaaaaaanaaaacnatancagtnttatatcaataacttgtaaaaacncaacncttcttggtcttggctaaactacctaaattcncacaacaaanaaggttaaaaatccattacnggaatnttggtattaataaatnanaataatggaanatatacntagccanaagcaggtncaatcantgnaaaaataannaaannaacaagtnannnttaanttnaaaaanaattatnggtggtgaantgtanttaaattgaagagaaaaatgtaagtaatggaaggtaaagaaaaattaaagaatggaaaataatattttgggaaagaaaaaaaattaaatgagaattaaaaaagtatattaaaaaagaagatagatatgagttaagatatatattattggtatttaatattaaaaaaaataattanatttaanatataaaggnggggtttataggttggtttatttatgggtgggtagtatggtaataaatggtgggtaaataaaaaatnaatttt

SEQ ID NO: 619600 - DNA, 227 bp, Homo sapiens
caagtttctgagaatgcttctgtctagtttttatgggaagatatttcctttttcacgttaggcctgaaagcacgccaaatgttcacttatagacactacaaaaagagtgtttcaaacctgctctgtgaaagggaatgttcaacactgtgacttcaattgaaatatcccaaaaaagtttctgagaatgcttctgtctagagtttatctgaagacatacccgtttccaa

SEQ ID NO: 619601 - DNA, 291 bp, Homo sapiens
ccatcatcctaggccctgagcatccaggcccctgcttttagggagctcacatgctgtgtgctgacctgagttcttctgcctgcactttcttttaaacactccttctccgtaacagcctgtgacttgaggggttaacttccagccaactgaactatttcactcagcacccctcccatgtcaacagcatggcaggaacagtgattacagagcaaagaaaatgttgtgttatagacaggattcttcgctaaaaggctctctgtcaactaacaaaaagactctgtgaaaagcacc

SEQ ID NO: 619602 - DNA, 144 bp, Homo sapiens
gagcggggaccaggaaccagcccggtggcgtcagacttgactgggaatgtaggggctgtccttaaggccttgtgtttaataaccattgagtcacaaaagcagctgctgggcagtgtgaaaaacagcacggagacaagcaaagat

SEQ ID NO: 619603 - DNA, 343 bp, Homo sapiens
tccaaacagccagtagggtgtgccattctcctctcccaagcccagtatgcgaatggcatggccacccatcatctctccggtaacgtgttggtactctcctgacttgtagatctcggccatgatgtccttctcgctattggacacgctgtaggaattgttccgtagtgcttgtcctgtttgtagctcggcctgtagccaggtctcacagatcttgctacacgtggggttctccctccccggcatgggccgggagccgttgacgtggtgctcacagggaggtatggagtacggtctgcaccctacatgggattcatagaggcccccagaacccaggccttctcct

SEQ ID NO: 619604 - DNA, 688 bp, Homo sapiens
tggagcccgagatgaagcctttgcactccagttgtgggcaacacagcaagattctgatctcaaaacaaacaaacaaacaaacaaaaaaaccactcaaaccgaaagaaagaaagagagaggaagacgggaaagaacagacgcgaggagcaacgggaggggacgaaagagtcgagtctcccagaaatatcccatctgtttctctagcggcttctctaagcagggttcttagtctcagcacaattttcctcttcaagcccccgctctcccattgtggccttgggcaggggctgtggggtatccccacgagaagggcccttggggaccggtggtgccatgtgctggccttctgtgtttctccatagacttctgcgcataagcgcctgtgttgggggaataccccgtgttttgtttgccaagcctaagctatttcccataggctgagtcccttagacggacgttacttgtgtgatttcccaaccgcgcggacttacgcggcccaaaacgccacttccttgagagggccatggcccttttgatccttgggctaaggtggcccctgtggattggaactcccgggaatacttcccaatcttccacttctttcgctgggggttcctgttgcgcatcttgtgttcatggggcacccccaatacaggaggtgggggaacatatttattcccttctctgc

SEQ ID NO: 619605 - DNA, 514 bp, Homo sapiens
aatctatatagtaagacgtggtgttgatatgggatgaaaaagaccacttaaaggaggcatttgcttatcatgcgacaattagcaaaagcttgaagggtatgttattctctcaatactacttgctccacttcgcaggcatatctattcaggagggcatcttgacaagaggagcagggtcacccacgacttcttatatctcctgcagtgcactggccaagtgtgtgtgtattgatatgcttgaagcccctagggttctcaacatgccaaatcacaaaggggttcaatttgtggcctgcaacattgcccccaagcaagactgtcatccagtccctaaaagacttgaagcctggcattgctttggtctacctcatggatcaaagtcctttcaggcatctgtttccagaatagaaaggttccatccatattgaaaatttgttctggcaagtgattttcctccagactcagcttatctagagtttcccaaaattcttccgctgcctttacatcagcactc

SEQ ID NO: 619606 - DNA, 1473 bp, Homo sapiens
tgatttctaagttagttggtggcattcaaatgccttttaagatcttggtaacattcccaaagcagaaaactgcctgacccacgagtggggattccctggagaataggggtcccaagaaggaatgcatgcccttctcgaacccagtactcccccattccgtcactgcctctctgacttttactgcatattcccgttcattctccgtcctttatcacttctttctagagtatccccatctccaactcatctctatcaaaccaagagatcaccaaaggaagcccatcgaggagcatcaattccccccaatagacccacctatgagcgtatgcgagatccaatgagaggatatgagcagtcacgcattggattaggcagagaacatggaggtgaccacgttgggcatgactggacccgtaaatctgggtaaatcctccatgttctctctatgctcatcaacactcattattccagaaggaccaatactcagaccacactatatagggcaactgactggaccttacactgtgacatggcaaaatacaaagaacatacaaggcgtgcactccagagagcatcgtttagagccctgccacaacagcgcgaacaatcaaaaaatacccacatccctcttgagaccatgaggcacagcacacataataaccaccaagcagacactaacccaacccaaatagagaatgaacacatactaccgacagaggtcatacggccatgcccaaatgacaacctcgaagaactaggagttcccgaacatatcgtaagggaatgatcacccatagagatgcacactcataccataacacgagaagggacaatccccgcacggatggaccacaatgggcccaaacggggcgcacaacagaacaactagaacaccatactaaaaaccacaccgtatgacatagcaccacatggcgatacccaatcaattggttccaaacaccacgcaaaacgcacaccatcagcacaagcgcgaaaaccaacacacacacagccctcataccatacacacaagggagcccaaaccaaacgaagcacacgagctcagaccaacaccagagaaacccaaccaacacacagcacaagtcgccgaagacacaacaaaacccaccacccgacaacccacacatcaggcaacacaccaaccagaatcaacaccagacacagcgcgccataccccgacagcgacagcataccaaaaacacccacagcaacacaagccacgcacacgactatcgacagcaacaacaaccagcagcgcggacgcgagaagacgaaacaacacaaccggacactcaagaccacccacgatgaagaacacggccagcaggcagaagagcaggggcaacaggagcaagcacacacaccgtgagcgagcggacggcttagcaaccgaggcagacaagcccgagcgagaccacggaaccacagaacacaggcagaacacaacacaca

SEQ ID NO: 619607 - DNA, 835 bp, Homo sapiens
  misc_feature (158)..(158): n is a, c, g, or t
gctcagcactactcgcgctgacgctgccgggccgaccggggacacgtcgcagatcatgggtctactacgtgtagtcctacaggactaggttctgccagatgaactccagcgttcgtgcatccgcaatcaggaatacagacggaccggggtccaccggnggtaatggaaggctggtactacgaagtagtgtaccgttcgtcgcatggatgccatatagcgtcgtgactccatactcgggacaggagaagctcgcgatgactgaagcgtctgcgatagtaattgcgagactctaggtgcgcacacgagacatgggctttgtctcatagtcttcagccaaggaccagtttcccagaggtgtatgtagaccacagtggttaggagaactatgtggcagatatcgaggtggatggaaagcaggtagagttggctatgagggacacagctgggcaggaagattatgatcgactgaggaccctctcctacccagataccgatgttatactgctgtgtattccatcgacagacctgatagtttcagaaaacatcccagaaaagtggacccagaagtccagcatttctgtcccaacgtgccatcatcctggtagggaataagaaggatcttcggaactgacgagcacacaaggcgggagcatagccaagacgaagcacgagccggtgacacctgaaagaaggcagagcatcatggcaacacagggaatgggcgcatcaggggtaccatggaccgaggaccaccaacacaccaaagatggcgtgaagagagcgcacgacaacggcacacagacgccgccccgcccgccaaaccatggaagacaaa

SEQ ID NO: 619608 - DNA, 296 bp, Homo sapiens
  misc_feature (55)..(55): n is a, c, g, or t
ctatggacggactatggactatctcattatgctcaaagccttgtcccaggggganagcattgaggtcccattcaatcccctggaagaaaaagagaaaaggcattttaacctatggccctctaggaaaagaaactgtgtctggttcaccttctagccaccagggcactgagtaggctttcatgaatgatactagtggataggctcatggatcaatggacggatggcaccatggatggctggatggatggatggacggttggatagatgaaaaccacaaatccataaattaaaatgtg

SEQ ID NO: 619609 - DNA, 547 bp, Homo sapiens
aggctcgagctcggggctgggggctgcagggctgggtcaggggtacacagagctaaggccaatgggctagagggtgccggaaagagagctggagtctgggctcctcttgggaatcagagtatatttaagaagccaagggggacctcgggctgttctggtggccccttctatgcccagctgtgctgggaggtcccagggccctagaagatcacagcagggccttctgcctgctgaccataacagtgccagcttctttgcagcttcctcttctaccatttcccactacgggcacctaaaagaagcatctctgaccagaagacaaaggcccaaatagcacctgggggagggaagatgcacagaggcacttccagatggcatcgaacagactaaggctctgaaacctaggcctgaacactaaggtctcgagacaccagaggtttctgagccaggagagcctgctggaaaagcagcctgcagagatttgtgaataaagctgattgccttctcagagccaggcctagaaaatggcctcctgagatgacccctc

SEQ ID NO: 619610 - DNA, 207 bp, Homo sapiens
  misc_feature (5)..(5): n is a, c, g, or t
  misc_feature (23)..(24): n is a, c, g, or t
tacanaacatttcatccaacaannagaatcacatcgttaacagcacatggaactttttccaagatagaccatatataagccataaaacagcctcaatatatttaagaaaatcgaaatgatattaagcactctctcagaccacaattgaacaaaactggaaatcaactcaaaaggaaccttcacaaccagcaaatacataaattaaat

SEQ ID NO: 619611 - DNA, 229 bp, Homo sapiens
  misc_feature (162)..(162): n is a, c, g, or t
tcatgatacatcagctcggtaccagcgacagcacttgcagataggagcgggtgggagctgcctggagaaaccacctctggaggttgtgaatcagtgctgtcagccgtcctgagctggctttgaccctcagactgatactggtatcctggtcccagctcctgncagggctgttaccgttgttttcttgaatcactcacaatgagaaactaacattttgcttgttccgctg

SEQ ID NO: 619612 - DNA, 1372 bp, Homo sapiens
acagaggatcatagtctacttgacttcaaacagatgtattggacgagaacagataccggaggtactactactatccagacctaccgcaccgcacctaccagatttcactactaccgacattgacataaactacacagggcacacatacttactacggaccatactacctgacattactagagagaaccatgacacagacaccagctaatactagtaggattacagctaccatatactatgccccaaaaccaaaaccgataggacgcatacaccgagacataacagatacgagcagatatcactttccccactcccgaaccgttgcgcaatgcgccacagacccagcacaacagccaatgcccctagagactccaaactaaatgcgttacacgctttgccatgaggacccctacgcataaacaaccacatgacccacttacctagctacctaagaagcgacatatatgcgatatcaatcagataacagggaacccacagaacgacaacatggaaccttcgagtggcgcacaagtccactggcgcaaaacgcaggcccgccttggcaacgcaccacaaacacacgatcgattgtccccaggccgacgaacaacatagaggagacacccaggaaacgcgcaccgcaacaacgacccggaccagacacggaagcccctatacacgacaacgagccggctgccagacgacgagaggccccaacgacagataccccacaacacacccccaacagcagaatagagcagccggagcacgcgcacggagcaaccacgagcaggcccccaggagcgcaacacgatcccagccgccaaccgcgccacacggcaaagcacaaagaaagagaacaacaaggagagacggcacacacaaagcgacacacagaaaacgcgcaacgacatgaacacacagacattagcacacaaaagaccacccaccagtggcggcacgacaccagcaaccggccagagcagaacacaaaagcagcaccccccagcaacaaagggagacatacatcactccaaacagcaccaacaatagaacggagaacaaaaggagacacggaaccaaggggaaacacccacgcgaaaaatacaacgtgagagagaagcacatcgctctcggcaacggagcaaccgaagcactaccagaaaggacatgagaagggaggaaggcaaggacgaaacgcataaccacaacagcaagcgacaatgagaagacgaaccgaaccacataggacaccaacaaacagtacaaacgcaagggaccataggagcgagagaacgcagacacagacgctagaggcaaacaggacgcgacgaaaggacacccaacacacgagcacaaagggggcaccgca

SEQ ID NO: 619613 - DNA, 210 bp, Homo sapiens
  misc_feature (94)..(94): n is a, c, g, or t
  misc_feature (100)..(100): n is a, c, g, or t
  misc_feature (107)..(107): n is a, c, g, or t
  misc_feature (144)..(144): n is a, c, g, or t
  misc_feature (170)..(170): n is a, c, g, or t
  misc_feature (172)..(172): n is a, c, g, or t
  misc_feature (208)..(210): n is a, c, g, or t
tgaggattccggaatatttgatatttcgcgtgacccattgactgcaatagcaactaataactaactgctctcgtttaggctgctaacaattacnggggtnccattanataattcgacgctaactaatatactactacatgccanatcgatgtatgatattggatgtgtananactagacgacttgatgctacttgctgagacttactnnn

SEQ ID NO: 619614 - DNA, 1523 bp, Homo sapiens
agctcaggctttgacaatgctgtggagtcaaactactgtgggaaaagcagaaatagagctctgcagttccactcctgtctcccttcctccactctgcatgcatggccaggctgaccacacttgtataaacaaactcttcaacactcgacaaagtaaaaatattattctctcacttaaaacacaaaccacttctacgaagcataatgtcaatcttcactgcaccactacaaccctcgtagcaaaacttctactcggcactactgtctaccacattcatctacgcctccatctcgcgctacttcaactatctccacacactctgtctacgcgcgagtgctcgtacgtctcataacaatgcttcgcaactcctcggctcctctacatctccgcggctctctctaaccactaagtgctctcccagataaacgatacgtgaccaccgccacgcaagaagggctctcccattggatccaactgatagacgcagcccccaccgtggcagctagacggccaaaccatacacgttggcgacacccctcacacctcagactcgccgctacattaagttggcgcaaggcatacgttggacaacccaatggcggcacagcaccttctccggcacggcacaccttaaggacttccccctctggatacaccaactgcaccgcccttccgcttgcaaacatcgggttggcagcgcaaaacaagaccgccccaagcacacccacgcttacacgcacacaggcctccactaatccaaagtcgttagcaacattcaccgcgggcgctcactcatcaaacctaccaatcgtctgggccttcacccctttgggcactctgcaatcacaccacaccggtcggcaaacatcgcttttgctggacagcgcaacgtaacagacacgcgcctggggagtacgaacacacgttctctctccactcggcatgcaggcaacaacacccagagtataacacgttactcagacccccatggtccctatcccacgacctcaaagctatccacccacactgggccacccttctggcatgtgcacaaccacagtcgtccaacaacagtacgcgcccacaaccacgcagacgcctagacaagcccgacagatacgagcgcaagcagcaacccccaccccaacacgtcgcacgcacaagcggccagcagcccaacgtaacactcgctgggcacgtccaaacaccgacagatgccttcaaccacccacacaacgtaacgacaccgccctagcgcacacacctgacgcaccacacccccacgcgcacccgacgctggacaacaaccccatgggaccccccacaccgcgggcccacctaccgccagcacaacgaccaagcacatgtgcaggcgacggccgacactatcacccacgcgagcgaccgctaacacgtaaacacaacgctgcggaccccacccgacgcacacagcagcacaaccacccaccacagcagaccagagcacaaccaaccccgcagacacggagcacgccgcacgcgcc

SEQ ID NO: 619615 - DNA, 662 bp, Homo sapiens
cattgtaatttaaagtgaaaattaaaaaaaaaaaaaaaaaaaaaaaaaaaaaaaaaaaaaaaaaaaaaaaaaaaaaaaaaaaaaaaaaaaaatttaaaaaaaaaaaaattaaaaaaaaaaaaaaaaaaaaactggggcccgaatttggggctcattggcccatttccccttttggggggcggtttccaatttatgggccggtgttttaaaagggtgggactgggaaaaccctgggggtcccccatttaaaccccttggagaaaattccccttttcccaggtgggggaaatgccaaagggccccgcccggtcggcctttccaaaaggtggcccacccgaatgggcaatgggaattggaaggcgtaaattttgggtaaaattccgggtaaaattttggtaaaacccgtcattttttaacccaatgggccgaattgggaaaaaccctttataatctaaagaattcccccggtatggggtgaggggtgtcccagttggaacacagggccttttttaagaacggggcctccaagcgcaaacgcggcccgtttataaggggaggcccatttggggacccttcccctatcaagtttttggggccgggcccgaaaggccttaatgggcccctaagggggcccccgtttagcttgcggggcccgccccgct

SEQ ID NO: 619616 - DNA, 184 bp, Homo sapiens
ggtgggtgttggggttggggtcaccgtggtggtggtgctgatgggtgtcgaggttgctgtctgtgtgccgctggctgttgttcttgatgtcaccgtggcgtgtgtgctgatgggtgtcgatgttgctgtctgtgtgcccgtggctgttgttcttggtgtcaccgtggtgtgtgcgctgatgggt

SEQ ID NO: 619617 - DNA, 569 bp, Homo sapiens
cccgccgcacatcctctgagcagaagatggctgtgccacccaggtatgccgatcttggcaaaatctggccagggatgtcttcaccaagggctatggattgtgcgcttaataaagctgtgatttgaaaacaaaatctggacgacatgggatggcgcaatttcacaagctcagggctcagccaacactgagaccaccaaagttgacgggcagtctgggaaaaccaagtaccaggatgggactggaggatacgggccgtgacctgtttataccacgagcgacaatggggacaatacccgacaaattacacataggcgcaccgaagattactggggtggaacggactcaggccttgtgcacctgttgggaccgtgaagcttgacctttccgcaatttcaacttcccttttccttcaacgcttaaacaaccgtgggccaacaagaccacaacaagtggccatataaaatttccaaagaaccgaggggcttaaccaaagtcgggggaagcccacaattatcaacccttggggcgtgcagaaccagtgggcattttccggaacaattggccctggc

SEQ ID NO: 619618 - DNA, 473 bp, Homo sapiens
  misc_feature (95)..(95): n is a, c, g, or t
  misc_feature (108)..(108): n is a, c, g, or t
  misc_feature (185)..(185): n is a, c, g, or t
  misc_feature (285)..(285): n is a, c, g, or t
  misc_feature (302)..(302): n is a, c, g, or t
  misc_feature (306)..(306): n is a, c, g, or t
  misc_feature (319)..(319): n is a, c, g, or t
  misc_feature (328)..(328): n is a, c, g, or t
  misc_feature (334)..(335): n is a, c, g, or t
  misc_feature (358)..(358): n is a, c, g, or t
  misc_feature (360)..(360): n is a, c, g, or t
  misc_feature (366)..(366): n is a, c, g, or t
  misc_feature (373)..(374): n is a, c, g, or t
  misc_feature (381)..(381): n is a, c, g, or t
  misc_feature (395)..(396): n is a, c, g, or t
  misc_feature (410)..(412): n is a, c, g, or t
  misc_feature (414)..(414): n is a, c, g, or t
  misc_feature (417)..(417): n is a, c, g, or t
  misc_feature (419)..(419): n is a, c, g, or t
  misc_feature (421)..(421): n is a, c, g, or t
  misc_feature (428)..(428): n is a, c, g, or t
cgccaagagaggggaaccagagaggaaccagaggggagagacagagcagcaagcagtggattgctccttgacgacgccagcatgagctccttctncaccaccaccgtnagcttcctccttttactggcattccagctcctaggtcagaccagagctaattccatgtacaatgccgtgtccaacgnagacctgatggatttcaagaatttgctggaccatttggaagaaaagatgcctttagaagatgaggtcgtgccccacaagtgctcagtgagccgaatgagnagcggggctgctctcancccnccctgaggtgccncctggaccngggagnnacccacccagagagatgaggccncngggggnccctggnnctccttnatcgatctccctcnnaaagaagctgaggnnntnctnantnccctcgngcctggagaccactctcggggcagatgcagatgcccaacggctgg

SEQ ID NO: 619619 - DNA, 288 bp, Homo sapiens
ggggtgtctagaggatcccaacacgcatctggactggactgcatcatcgctgaggtcacgcccaatatgaggagattgctcagaggagcaggctgaggctgagtctggttacccagacaaagtccgaggagcctgcaggtcacagcagggcagacattgggggaccggaccttgcgggcaaaaaccaaggcaggagaattgctgaaattcaaccgcatgatccagaaggccgagatctgagatcgaccacgtcaagaagcagtgccgccaaacctgcagggccgccat

SEQ ID NO: 619620 - DNA, 318 bp, Homo sapiens
ctcgatcttgcccagtgatgaaaacgtcggggatgccgggctgggtctctttatgcccgtggccgacggcgtctccgtgcgcaccatcacctcaagggctggcggcgtgacctggatgccttcggtgatgctcagccataccttgctgacggcgatcgcccacagcgacgacgtgataccgattgcagtccaggaactggacgccgagatccgcctgatcacccatatcgcacctgccaacaacctgacgttgaccgacgaagtccccatcgacggtcacgccaccgtacaagtcaattacctttaaggagtccctac

SEQ ID NO: 619621 - DNA, 537 bp, Homo sapiens
ttttttagctaatattttattgaggatttttgcatcaatattcatcagtgatattggcctgtagttttcttttttggtctgtgtgtttgattttgttatcagggtaatgctagccctgtagaatgagtttgcaagtattccctccttctctatttttggaatcgtttgggtaaggttggtattagttcttctttaaatgtttgctagaattcagcagtgaatcatcaggtcccaggcttttatttgctgggagactttttattaccactttgatcccattatttgttattggtttgttcaggttttgggtttcatcatggttcaatcttggtaggttagatgtgtctggaaatttatccatttttggtaggttttcctatttattgcacacagttgctgaccactagtgatcctttgaggttttttttcttttctttttttatatggagtcttggtctgtcgcccaggctggagtgcagagtgagactccgtctcaaaaaaaaagagcaggaagcaccagttaacctgtaacctaca

SEQ ID NO: 619622 - DNA, 742 bp, Homo sapiens
  misc_feature (644)..(644): n is a, c, g, or t
ccgaacatgcggcccagcgaaccggagagcgggacgaggaaaccgcaggagccgcagtggtgctctgcggccttggagttctctgcgtccgggctgtgttcgccactctcccagcgttcggcggctgcgacgcgcccatagtgggacagcacgcgctcgcggccgagcccgatcggcaggtcgccggtgtattcctcctcgtcccccgggacgagttcgtacccgggagcgagacgttcgtcgtcatcggaaacggggagcacatcgccggggccgatatcgccggcatggagacgctcttcccagggcacccattcgggggccagaagtgcgtcgggacctgggatgagggagatctcgtcgatcgtcacccgcgcctcggcctccgacagcacgcacgcccactgccatccgcggtagccgcggagccgggagccgaagtagtgcgtcgcggtgttctccgcctcgcaggcgatgccctcgtgctccccgacggccgacccgcccgcaacctcggcggcagcgtccctggccagcgcgacagcgccggcgagagcttcgctgacctcgccaccgcgtcgctgcatgccggttcgctcggttacggatgtcatgtgttcattatgaacgcaggggtgccaaancccataaaactcgcgggtgcaggacccgcgagtcggggtatgcggcatgatttacctatgcgccacatcgccgatttcgtcccgtcgccccgcctctc

SEQ ID NO: 619623 - DNA, 139 bp, Homo sapiens
cttttttttttttccaggtttaatcaaagcctggaataagaataccttaatcctggattttttcaaagggtttttccttggaattgcccttttcctttcctacttggcgagatttggctttcccttctgtcgtcttctc

SEQ ID NO: 619624 - DNA, 344 bp, Homo sapiens
ctccaggcaaaatggttttcgcatcaactcatgaccaggcaagagtcttggtgaagcttttattgtcttgaatttatgattatttaagtatttaggcaaaggatccaaaagtgtccgtgggatcctgtaaacaggatcccccattgcaggttgtgagtctttgagctctgcatcaggacctatatgctgcaatgtgtttttacatggtcaggtattcctctttaactcttaaatgtatctttgagtaattgatgttttccaatcttgattgacttattttgtttaattatgtgaactggaatggaaaatcttttcctgccaattaaatgtaaaatttttgttta

SEQ ID NO: 619625 - DNA, 413 bp, Homo sapiens
ggccttgaaggtcttgccttcgaactgctcggcaacgaaggcccagttgaccaggttccagaacgcctcgacgtacttcggacgcaggttgcggtagtcgatgtagtaggcgtgttcccagacgtcgcaggtcagcagcggggtatcgccgctggtcagcgggcagccggcgccgatggtgctggccagggccagggaaccgtcagctttcttgaccagccagccccagccggaaccgaagttgccaaccgaagtcttggtgaattcttccttgaacttgtcgaaggaaccgaaagcggcgttgatggcgtctgccagggcaccggtcggctggacaccggcgttaggggccaggcagttccagtagaaggtgtggttccagacctgagcggcgttgttgaagatgccgcccg

SEQ ID NO: 619626 - DNA, 103 bp, Homo sapiens
ctggtgtcgtcaccacttcaagtgcgataaacaccgcatcagcgactactgaacctgtacggtttcctgcgcgacatctaccagatgccgggcatcaccgaaa

SEQ ID NO: 619627 - DNA, 204 bp, Homo sapiens
ggtcgactgaacatagatgcaaaaatccttaacagcataccagcaaactgaattcaattacacattaaaaggatcatacgccacaatcaagtggatttatctctgggctgcaaaggtagttcaacacatgcaaatcaataaatgtgatacaccacaataaccaaatgaaggacaatcatctattgaactgaacatatgtcgacg

SEQ ID NO: 619628 - DNA, 389 bp, Homo sapiens
  misc_feature (321)..(321): n is a, c, g, or t
  misc_feature (341)..(341): n is a, c, g, or t
  misc_feature (347)..(347): n is a, c, g, or t
  misc_feature (373)..(373): n is a, c, g, or t
  misc_feature (378)..(378): n is a, c, g, or t
gcaccccctcaccccggtcctcctcattagggtgcagggcctaggttttttccaggtgggggaggggggaaagtcaggaataaggggatccccaaaagtgcaaagcttagcaggcttgggcctgtcatggctggccggaagtgtccccagctccctacagacgctgtagccatccctgcctttccagggaccctcctttcctgcccaggacagacccagccaaaacccctggtaggatgggccacccccaggggtttggcctccagggacctaaagaatgggagggagaacggggccccaggagacccggccccccccccncccgctacccttgggtgccncagggntgtgctgttgccaacagtaaacctgnttttnctgtccaggca

SEQ ID NO: 619629 - DNA, 778 bp, Homo sapiens
ggagtcttgtacacttaagcagagcagaacttttatcgtggggctgagtggtgagggagaagagcgactaacagctgaagtaatgacagatcgtggctgggtcatatcagctttatcccttggtcatcatatctgttatgtatcttgactctgtccaaatcatgagaataaacatcatagtttcttggccactgaattagccaaaacacttaggaagaaatcacttaaatacctctgggcttagaaatttattatcatgcagcactgtaggaatgtatgctaattgaacatgcaattggggaagaaaagaatgtagaagtgatttttgctatttctagatagaaagaaaatgtctgtttaccaaagataatgttatacatcctattttgtaatttgtgttgaaaaagagttcaatgtgcagttttccttaggtgttttaccttgtttgtctctataggtcatgatttctcgtgaagcagaacagatgccttgttaccatgaattcttgagtttacagtcaataatattgtactattaacggggatcagaagtaggaaggaacacataagagatagcagaggaaaacagaaaaacatttcctcttataaacttctgacagtaatttcgtcacaccaaagattcgtcagagtcaatcatgtgtctacaattattttatcagaaacttaacatggaagatattcctttttaactttgtggtaacttctttgaaggttatttagaaatatcctttggaacaattatttgattgtctactaaa

SEQ ID NO: 619630 - DNA, 133 bp, Homo sapiens
gttgtctctttagtgatccccttacagcttcagggctaaccacacacatgcactgagttcaggtagaggggctgaatgagactgagagggagaggctagtatgacaggaggaaatgtggaggatgaggttagg

SEQ ID NO: 619631 - DNA, 323 bp, Homo sapiens
gagaggacagcgtgaaagccgcaaattggggccaggcatggtggcttatgcctgtaatcccagcactttggaaggccgaagagagcagatcacctgagctcaggagtttgagaccagcctgggcaacatggcgaaaccccatttctaccaaaaaaaaaaaaaaatttaccctttggcgggggggggggcttatagccccagttcctaaggaggctgaggcagaaaatttgtttaaccccaagaggcaaaggtcgcagagagttgaaatccccttattccattccacccgggccaacagagaaaaactttgttaaaaaaaaaaa

SEQ ID NO: 619632 - DNA, 266 bp, Homo sapiens
  misc_feature (53)..(53): n is a, c, g, or t
  misc_feature (83)..(83): n is a, c, g, or t
  misc_feature (95)..(95): n is a, c, g, or t
  misc_feature (113)..(113): n is a, c, g, or t
acttctcttttctcgctcagaacaagtgtgcaaacgagcttctcctgcccctnctctgagatcagatcctgccttcagctganccatccactccncttcctgaggggaaaganagatggccaggcagagaacagaactggagcagtccatctagggaatgggactgtgagccatacttgtgaaacgtctggctgctattctagagcttttatttggtgtgttcgtgcacagctgtttgaaatgtttaataaagctttataaacttt

SEQ ID NO: 619633 - DNA, 454 bp, Homo sapiens
  misc_feature (5)..(5): n is a, c, g, or t
  misc_feature (17)..(17): n is a, c, g, or t
  misc_feature (35)..(35): n is a, c, g, or t
  misc_feature (39)..(40): n is a, c, g, or t
  misc_feature (105)..(105): n is a, c, g, or t
  misc_feature (115)..(115): n is a, c, g, or t
  misc_feature (138)..(138): n is a, c, g, or t
  misc_feature (201)..(201): n is a, c, g, or t
  misc_feature (219)..(219): n is a, c, g, or t
  misc_feature (279)..(279): n is a, c, g, or t
  misc_feature (356)..(356): n is a, c, g, or t
gcggntcgacggctccnagctgtgggcctcgctgnccgnntcgcccagtctcgcgagagttgggagtaaacagccccgaatggagtgcccaggcgtgttcgcgcnggaggcaggnttatcccgggcccgccggcatgnagctcccggcggcgcagattggctcacagtggttgattgatcaaccccattggacgtttgttnctgtggtacaaatgggantacaggactcagtcgtcacggcctgagtgagagaagccttatttccaagaatggaagaanaagcggagaaagaaatgaaagcctcctcttcaggctgaaccacaaaaggccatggggatttaacttttatttatgtntggacaagactgtaagatgggctgatcaagtaattgtttgcagcttttagctgaaacaaaaattcacttataatcaaagaagaaaaaagttgtgattt

SEQ ID NO: 619634 - DNA, 235 bp, Homo sapiens
  misc_feature (5)..(5): n is a, c, g, or t
cttanagcatcctaaccagcatctgtactttatttaattttttaatagccattctgactggcgtgagatggtatctcattgcagttttgatttgcatctctttgatgattagtggtttttcatgtttgttggcagcttgcgtagtcttcttttttttttttttttttgggaaagggattctcgctctgtggcccaggttgaattgcaggggtgcaatctcagctcatgtgcaagg

SEQ ID NO: 619635 - DNA, 1420 bp, Homo sapiens
tgccgcagccccctgcgcccccggtgcccccgacatgtcttccgcaaagtggtcctggcagagcaaattcctggcatgtgttctggtgcagccggtcaagaacgaccatgtgctatgatggacattcgcgtgtcccgtgttacctagggacagcacctatctgccgcctgtcaacctccaaagttacctggctggctgattcgtgcgatggccagctcgagtggcgtgtgccttatcctggtgctccccctaagccaacgaccgcggcctgcacttagaccaatggccctaccactgcaccggctgctgctggctgcaccctgtgtgcacctagctcctagcgcaccactcgaccttggctagtccctccaccaacctgcaccgcacacgtccactacgccccacgcctggccctccgcgcacgcgaccatgcacccgctgctccacctggcgctgctgcgccacgcatctcccccaccacggacaccgcgcgcctgcaccccctcccccctgcctgcacccagcaagccccgcgctgcgctgcgctaatcctcgcgcccgcgggtcgccaccatcctcaaccgcctgcacgctagcgcggcccttccatccggccccttgggcctaccccacttcaccgtggccctctgcacaacccctgcttgcattggcctaccacgccttgtccacgctgcccttgcccgcaccacacccgccttgcgccttatccttcctacttccgtggcgccactcacattggctgcgtctgccccacctcacgccccgccgccctctcgcagcgccctcgcgctcccccgggccccctgcgcgacatcaccgccccgcgttgcaccatcccctcctttgtcacgcccctcccacgttcccttaagccacaacgtgggctcccaacgccccttgcgccgcatcgagcttccagctcctacaagccttgtgcgccccagtggccacctgtggccttacgcctggggccctcacgccgagcccacaccttggcccacacgtgtgccaaccccacgccgcgcaagcgccgcggcttgtcccgccccactcctcccgactactggtaacagccgcccccccggtctcccctgtcgcggtcgcccccatcccccccctctttgctcgtctgtggtgcccctcatgtacatgccccctgtggctgtggtactcggcaaatcgtcgtgctcatcctcatacttctacctccggcgtgtgcggtgctctccccccctgctgctcctccgcatccttcgtcccctccgcgttcctcccatctcctcaatctccccatttgtcggcctcactcagcaacctctgcgccgacacccgtcgcagtcgtgcatctcgctcaccctccccgctcgcgtcctccttctctctcgtcctcccctcgcaa

SEQ ID NO: 619636 - DNA, 831 bp, Homo sapiens
ccaggtcgcagggcagtgggaatgaagccgagccactgagaaagggcaacagccgccacgaacacagaagacagccgacaaggcttccggcccaaaaacaaaggcggtgccaaaaatcaagaggcttccttggggataaagtacccccgagaccccggcccattctgaaaagccccggcgaaggcagcacgctgaagacacctcggaggcccagggcccttccgggatagtgtcggtaaggggttttcacagtgcaatctctgccccacgagaatagaagtttccacagatgcaagcagtttctctcagtcccggctgtgaacgtcgggtggccttgagcttagggaggaaaacagagcagtttttcactcagttttttgttccctgcccgagtttgctgaccccaattcgttgccaaaaagatgtgtcactcagaatatacaaatcccgtatgggtttgtgtcatcctctcttaatcattttttactaattctaataatcagactctagcttggctttcataattttcaatggctttgcttgatctgtggatgctttctctcatcaagatttgcagcaatttttagcccaggcagtatttactcatttataagcgaaaaatcaaagatgttggctgaaagatcaaaaggctcagtttagccaaccttgttgtttgtacacaggtgatgtcagtccattggattgtctttgaacgaagtatgttccaaaaaaagaattttaataatcagacaactgttctgttgagaaccattgcccttggtaaaataacattggggtttctgaaaatttttctttttgtttttgaacatt

SEQ ID NO: 619637 - DNA, 745 bp, Homo sapiens
gcacaccagctcatcagatgaacctcaggagatgtgaagttaccccagatgtaaacatttcaggccaaaaatttaacattacactcctgattccagttgcagaaggctgaatgaaatctggcttcgtgtgacaatgaaaaacagtatgcacactggatggcagcctgagattagcctccaaaggcaagaccatggcggacagttcttacaacttagaagttcagaatattctttcctttctgaagatgcagcatttaaacccagatcctcagttaataccagagcaagatcaccgacgtgatataactcctgaatgtgggtgtctcccggtatctaaaaaagtataagaacaagcaggaaaaaggatgcaaaaaacaatgccaggtatataagagattggataacagcgagaatcttggaggccatcagaatgtagctcagatgagtctaattgaagccaagatgagatttattcaagcttggagtcactactgaattggcatcactcacttccattgaaggttccaggggtgcaaaaaagaaagaaaattatggggaatgggtaagaaaagactgatcgggatggatgccagcactggagatgcaataaaacgatgggtttcagaagatggaaagggggatgtcatggggaatcaaatggtaccggaggagatgcgatgaagtacgatgtcctcattgacgagtcgtggcagggcagattatggggactattttacgtgaaaca

SEQ ID NO: 619638 - DNA, 399 bp, Homo sapiens
ggcgactctagacgatccctaacacgcaatctaaaaaagtataagaacaagcagataacagcgagaatcttggaggccatcagaatgtagctcagatgagtctaattgaagccaagatgagatttattcaagcttggagtcactactgaattggcatcactcacttccattgaaggttccaggggtgcaaaaaagaaagaaaattatggggaatgggtaagaaaagactgatcgggatggatgccagcactggagatgcaataaaacgatgggtttcagaagatggaaagggggatgtcatggggaatcaaatggtaccggaggagatgcgatgaagtacgatgtcctcattgacgagtcgtggcagggcagattatggggactattttacgtgaaaca

SEQ ID NO: 619639 - DNA, 230 bp, Homo sapiens
ggatctagtggagccttaccctggagcaaacctgtatctcctaaaaatacaaaattgaccgagcatgttggcgcatcctgtgatctcagctgctatggaaggctgaggcaggagaattgcttcaaactgggcagagtgttgcagtgagccaaggttgacccactgcactccagcctgggcaacaagagcgaaactccatctcaaaaaaaaaaggaaggaaccggtgccga

SEQ ID NO: 619640 - DNA, 251 bp, Homo sapiens
aaagctcttcttaaaaaacagtcccaatgcgagaagggaagaagaggtgggagtaggggcaaccatttatgctgagtatcatatcccctccggccacctctttggttcagccactgtatgcagctgattgtcacagcaggtgtggcccaacagtcttagcctcagctgcactgaggacctcttgcttctcagctgctgctggtcctgctcagcttgtcaaaatacttcccatttgcaggcttagtgcctat

SEQ ID NO: 619641 - DNA, 589 bp, Homo sapiens
  misc_feature (174)..(174): n is a, c, g, or t
ttcttaaccactcatttacagtagaggagattggggttagtttcagaggttaattaagtaaaccggctctgttacctcccgcaggctccaggcactgtcgccaagctggtgttcttcatgtgcaggtaaacgacctttagacgatgtgtatactagatttcgcgcaatgacagnatacatgagtcatgtgttaaaagcgatgcttcatatctgataatatcgtgcacaatcttcctggacttcaaagcagcagcgtatgtcatatgtggtgaccaggattcatcagatttataagtgagttgcaatgatatcatcatctgtttgaattcagatgtggtgtcgcgagcttgatgttcgagtcagccaaagactgtagtcgtaagggagacttgggttcatgagtagacaggacatctacaacaccgcaggtagttgagccataacttccgaatctttcatttcatatgcagcagatgtagtaggaatcaccatatgcgactcatgttcaagagacatataggtgagcatagaagtagagaagtaaattccccagccgcaggatcagctcatgatgtctcagacatcgaag

SEQ ID NO: 619642 - DNA, 450 bp, Homo sapiens
  misc_feature (56)..(58): n is a, c, g, or t
  misc_feature (63)..(63): n is a, c, g, or t
  misc_feature (87)..(87): n is a, c, g, or t
  misc_feature (92)..(92): n is a, c, g, or t
  misc_feature (98)..(98): n is a, c, g, or t
  misc_feature (115)..(115): n is a, c, g, or t
  misc_feature (165)..(165): n is a, c, g, or t
  misc_feature (178)..(178): n is a, c, g, or t
  misc_feature (190)..(190): n is a, c, g, or t
  misc_feature (198)..(198): n is a, c, g, or t
  misc_feature (211)..(211): n is a, c, g, or t
  misc_feature (248)..(248): n is a, c, g, or t
  misc_feature (422)..(422): n is a, c, g, or t
  misc_feature (434)..(436): n is a, c, g, or t
gattttgtgggaattatgctaactgctgccacctcaaaaacttgtgccacaactannncatanccacatgaagttgtaagaacaagnctacntgaagngggaacaaaattcaganctttttttcagactctatctttgcttgttcaagaagaaggttatgggtcnctttatcgtggtntgacaactcatntagtgagncagattccaaacncagccattatgatggccacctatgaattggtggtttncctactcaatggatagcagcacgaggactgctgtactgcaaaaaaagaagaccaaaagattacagtggaccatgggatacagaagccagcatggcagacagaagaaaaatagtttgggaacatgtaactattctaagtggaagttttgttgtaggaattatagtaatcacaccncattacttggcnnntcggtaatgtgaaa

SEQ ID NO: 619643 - DNA, 187 bp, Homo sapiens
cacattgcatcgtatggctggtcataatgtggccataaacaagtctactaaattacaaatgctggatagggtgtgtagacaagagaaccctcctacattgttgctgggattgtcagtaggtacaggcactatggggaacagtatggaagttcctcaaaagactaaaaatagaatgggcataagggga

SEQ ID NO: 619644 - DNA, 155 bp, Homo sapiens
gtgtacatgatgtattgattagtgatgattgattcgtgcgtctgaaaaatgttgtcataacgctaagttaataacagcaaaaagggctctgtagatattggaatcttcatcaataagatttcgaccttctgctcctctcaaaatcacattaagca

SEQ ID NO: 619645 - DNA, 259 bp, Homo sapiens
agcggcttcttttcgcgcgtctccgagatggcggcgccggcgctagccctcctcctcgccgtcgctgagcctgcgctgcgccgtgcgctcccgccggccttcccgcaggcgagctccaaccagggtcggcaggccatgtcgctgaggcaggcgtggcgaggtagttatacccgccatatgtgcgaagttggaatggcctataggtgcgcggagactagacgcccaggcatgacttggttgacatgaaggtaactacgga

SEQ ID NO: 619646 - DNA, 212 bp, Homo sapiens
acagtaccaacacataatgtgactcctaacacagtgaaccagcaatcaggagcacagcagttgtacagccggggtcctccatgcccctcatattgtgggatccactctaggatctttacaaggagcagcatcgtcagcatcccatcagcatacgagtgcctcccaaccatactcctcttttgtggatcaccatcacgtccggggtacacgag

SEQ ID NO: 619647 - DNA, 376 bp, Homo sapiens
  misc_feature (15)..(15): n is a, c, g, or t
  misc_feature (38)..(38): n is a, c, g, or t
  misc_feature (137)..(137): n is a, c, g, or t
  misc_feature (159)..(159): n is a, c, g, or t
  misc_feature (333)..(333): n is a, c, g, or t
  misc_feature (355)..(355): n is a, c, g, or t
ggggagcgaaaaatnggaggaaaaggggagactctgtntgattctctggggccaggagaccccatcaggcaggctacaaagtcctcggggaggctgaggatcacgggagcccagtagttggtggctgtagtttgcgncataggccactgcaccctagcnggggggaggcatgacccgggctctataaatatatgtcatagacggttagccatctagtactgtcggctaggaaaaggcctcatgggtaggcagaagatcatgtgatggagtgtcttctagttagcagggagtgtggtctaggtggagggagagctgcttggaggcggcaagganaatagccggcgcggccggtttngtagtagtaggagcgacccgg

SEQ ID NO: 619648 - DNA, 257 bp, Homo sapiens
tctggcccaacgttggtctcagatcaacgatggtcctcagcttcccaagtagctgggattgcaggtgcgcaccaccatgcccagctaatttttgtatttttagtggagatggtttcgccatgttggtcaggctggtctcgaacctcaggtgatccacctgcctgggcctcccaaggtgctgggattacaggcgtgagccaccatgtacaggctttttttcttttttttaatactgggtctcgttatgttgcccaggc

SEQ ID NO: 619649 - DNA, 581 bp, Homo sapiens
  misc_feature (68)..(68): n is a, c, g, or t
gcctaatggatgagaggcccccgcgcgcgtgtttattcggcgagggagagcctagttattctttcttnctttatttcgttcgttattcatatcgtctttcgttctttttgagacggaggtttcactctggtgcccaggctggagtgcaaggtatgatctcggctcactgcaacctctgcctcccgggttcaagcgattctcccacctcagcctcctgagtagctgggattgctaacacctgccactacttccagctaaatttgtattttagtagagatggggtttcaccatgttggccaggctagtcttgaactcttgacctcaggtgatccgtctgtctggcctcccaaaggctgggattacaggcatgattcaccgcccttttttttttttgtttttcttttttaaagacaacagtgggggtttccatctcgtgtgttggcccaaggcataagggggggcagcagtgtgaaaaaacagatctaaccgccgctcagggccagggttcgaccttcggggctcaaagcaatcctccgtgccttacctccaaaagttgtggaactacgggggcgcttaccacc

SEQ ID NO: 619650 - DNA, 686 bp, Homo sapiens
cgggttttttgggagaaatgtaactcggacacgttagcttttcaattgaaaagacacttaacccatgtcgggatgtcatctttggacaattagtcgttcccatgtggaagccaattagtcacactactgcatgtaaagcatagatttaacttttaacaggaaaatatgtggtaaaacccagaaagcatccatcatgaatgcaagatactttcaatacaaagtaagttatatagtaggtagttaagtttgcttttgtggacttaaatgtgtctcttcacttaaatcgggttgaatgtgtatatatgttgttcagcctgaaaacgacttagtttatatcctagctcactggaggcatgctgacataaccattacttctgtcccttctaattgtcatgtatatgcctaactggagctagtactttaattcttaacacaaaattactcagccattgtttccagcttccctcctacaatagaatgaagttttatttgatggcttgagatggctctatcaatattttgatttttttttcttcatgtgctacccatatattcttaccttgattactacagggaacatctagaataaatgtaatcctttggtatttcatcgctacatatcagctgaggtggttgatggcgtcgagatgatcaccttcacagtagaattgcctgtaaatactcgc

SEQ ID NO: 619651 - DNA, 139 bp, Homo sapiens
gggggggggctgggggggggggcggcacccccgcttatttttaatttccgtttttgtagcccccagccggggacgtcggaggtcctcgtccttgcggctttgcccccccattcccgcaaaaaaaggggtttggacccca

SEQ ID NO: 619652 - DNA, 253 bp, Homo sapiens
tgatattgccttgcataacatctgcaggcaggtgcgaggacaggctgagcttgtaaccacatcccctgtggaattgttgtcacaagctgtggcgcaggcctctggcactccagctgctgtcccgcatgagccaggcctgggtcagcaccgaggtctcctccagatccatgccccgaagtcggatggccatcagcataggcccgcatctgtgcgcgctgccgggtcccatttattaacagggggccacgaagcc

SEQ ID NO: 619653 - DNA, 437 bp, Homo sapiens
  misc_feature (10)..(10): n is a, c, g, or t
  misc_feature (69)..(69): n is a, c, g, or t
aaaagagacngggaaatagggggtagaagagaatggttccccaagaaaaggcccctaccccttaagccntggagactctcagcccctaagtagggaacaggcatttctgttttcatgcccccaaaagttaccttttggccccatgatgctcccccagtcctgtaccccatagaaaccccaaaccccgggctccagaagcagatgagccaacaaggagacggggagacaagcagacaaatggcgtagcagagaaaaagaagaggaggaacatctgaatgccaagagttcagctgggagtggtcagagaggagttccactgctgaatggccaaactccaggggacgatcatcttcccactccatcccccttccacctccccatccatcctactgagagccacctccactactcaataaaaccctacattcatccttcaa

SEQ ID NO: 619654 - DNA, 109 bp, Homo sapiens
gtagcaacatggtaggctgctgctgcatctcccctgctacagaggcgccgtgacgggagtcggacaggtcgcaggcggggccggggtccggagctggtgtctcagcgct

SEQ ID NO: 619655 - DNA, 184 bp, Homo sapiens
tgaagatgctgagccggaatccggacaattatgtccgcgaaaccaaggttggacttacagagagttccaggaacttatgtatcctccttacaatcctttgaagggtccaaggagatatatatagagagctttaatgctatccacaactctgagacgcgtatatttcacaaaccacattccctgc

SEQ ID NO: 619656 - DNA, 131 bp, Homo sapiens
agggattctatttgagcacaaattaactgagggggaaaatggtagcctgagtatttatatgtgtgtgtgtttgtgtgtgtgtgtgtgtgtgtgtatgtgtacttaaaataaattttaaatacacatacaca

SEQ ID NO: 619657 - DNA, 449 bp, Homo sapiens
atctagaggaccccacgcgcacgcggtcaatatatctccttatttatggggttggggtttgttatcaactctctgagagttcctcagatgttttggatactcatcctttatcaggtgtgtgttaacaaatatcttctctcagcctgtgcttgtgttgcattctaacatcttacagtgcattccagtgagttgataatccttgactagtagaattaaaatacctaattacaatgcgatgacattcacattagctgctcgtgccccaaacacagcatagtaagaaaataaagatgtacagtgcaatattagttggcggatcaagcagatcgtgaggaaagtggagccaatactgacgtgaagtccgtggcagcctgtgtcttacgaaaaatgttgagccgtagatgccgtcggaaatggtgacgggagcctcgaagcactctgaggcttgt

SEQ ID NO: 619658 - DNA, 457 bp, Homo sapiens
  misc_feature (12)..(12): n is a, c, g, or t
acctcctgttcnagggcaaccgtatttataacgtcacgacgctggcctctacacaaggggtttgcatgattttcacgcggaacgtagacaccctgagggcatacacacacggtgtacctgtaaggggacgactttgcacagaacccaggaaatgcaggggtgcagacatgaggaaaccccgctaactagcgaggttcttccactttaagtggttgacatagtggctacggatcgtcaaaaatacttacagagcgcgaaatcagtggccttgcagggcaatgactgacgtaggtaccccggcgattctgcaaaatcggtggtggtgagacctcttctcccctttcctgaggagactgatatcaggattcgaatccccatgaaaagggcagcctgtcaaacagcgttgaaaagtttccaggtaacagcgtccaaaagtttccagttgctcaagcttttt

SEQ ID NO: 619659 - DNA, 245 bp, Homo sapiens
ataacagctcgtaggctacacgggcactccaccaaagctccatgtctcgcgcgctagcgtagggggcttatgagcaaaatctctgatcggtaacgcttcacaaaagacctatatacaacgtcgttatcatcgaataactagcgttttatcctcattttttggggatcataaggtgagggtgtcaaacagcgttgaaaagtttccaggtaacagcgtccaaaagtttccagttgctcaagcttttt

SEQ ID NO: 619660 - DNA, 390 bp, Homo sapiens
  misc_feature (4)..(4): n is a, c, g, or t
  misc_feature (42)..(42): n is a, c, g, or t
  misc_feature (60)..(60): n is a, c, g, or t
  misc_feature (70)..(70): n is a, c, g, or t
  misc_feature (72)..(72): n is a, c, g, or t
  misc_feature (79)..(79): n is a, c, g, or t
  misc_feature (81)..(81): n is a, c, g, or t
  misc_feature (109)..(109): n is a, c, g, or t
  misc_feature (145)..(145): n is a, c, g, or t
  misc_feature (173)..(173): n is a, c, g, or t
  misc_feature (209)..(209): n is a, c, g, or t
  misc_feature (214)..(214): n is a, c, g, or t
  misc_feature (245)..(245): n is a, c, g, or t
  misc_feature (249)..(250): n is a, c, g, or t
  misc_feature (252)..(252): n is a, c, g, or t
  misc_feature (301)..(301): n is a, c, g, or t
  misc_feature (309)..(309): n is a, c, g, or t
  misc_feature (317)..(317): n is a, c, g, or t
  misc_feature (328)..(328): n is a, c, g, or t
  misc_feature (330)..(330): n is a, c, g, or t
  misc_feature (335)..(335): n is a, c, g, or t
  misc_feature (389)..(389): n is a, c, g, or t
attnttttttaagattaatatatttttttgtattttttacgntatgtggaagggaatgcnggagtaaaananccccctntnccctccgcccgcccacccgcccgcccgntcgcccgttcgcccgctcctgtggtttttctgagcntgcgggcgccgggaggggatgctgaggntgatggagctgcctccagggctagggccactcaccngaggncgggcggggcctgcacttgaagtcaggccgnaccnntntttttttggaagggtagccgacaaatccttccagagggaaagttctttntttaaggntgtacttnaaaggtcaatntnagggnttcctgtttgaagtcaagtagaggtaaaccggtcagttacagaaggaggatttnt

SEQ ID NO: 619661 - DNA, 1280 bp, Homo sapiens
tgtatggcttgtggactgaggtcgagttcagatcctcttacctaaccaagaagacaacggtaaggactggactctactccgcgcgcacagtattggtatgttgggagtaaaatgtggtaaagacaggacgctacgtactatgatatgtcacctgtagggtatggaattgacctggataaaccatggcatattgatacgttctgaaccaagctcggtattgacctctttggtcgattctcgtttgtaccctaccaagtacccgtgagacctaggatgagcacgaacgcctccaagaccggcggaaaccagattgaggcattcttaacaagacaggtttaaacgagaacacgacgcacgtgttggtacgcccttctagctgtggtatagataccatctggctccgcatggccaccagagggttccgggcctcgcgagactcagatggattgtcctataaaatagaaaacgttagggccagccgaatgttggtatagtcacatgagaaggcgattttggaatgcccgatgtacacttgctcttggtagtcctggatcacgctcacgggtcttaggagcggtaaggaaccccttctgattagggtgctgtggcattttgtatgacgctaggaggcctaataatgcggtctcctattaaagaagagcgttctagctgggtctcctaattaagagatccaatctatgggggactcggggagccggcggccaacttagactatccgggaaccgttcgtctgccccgacacgtggcccggagcagcgacaaatggggccagataggcatattctaaaagggtgaccgctgatgacaggactcaagagggacatcagagcgctgagccactaaagccggagctcttctttacgttcttcatgtaccctagtcttctttgtgttttttctctctcctcacggcagagcgagcaggagaaggccgcgaaagagaggacaagcgagagcgagcgcgacgcagacgcggcgcacgagccgacggagaggaccgaaagagaggagcgcgggacaggggagggggcgagaggggagagaggaggagggaacgcgagataagagagcagggggaccggagggggaacggaggagaacacagtgacgagggggagagaggagggggagagggcgacagagaggacggaaagaggtcggaggagaggggacgagcggcgacgacagagagaaggggaagcagggacagagtaggcgaaaaggaaagcgaggaagcggaggggagcaaagagagagacc

SEQ ID NO: 619662 - DNA, 545 bp, Homo sapiens
  misc_feature (247)..(249): n is a, c, g, or t
aggaccagtcttaaaaaaaaataaaaaataaaaaaggaaagtgtatggtcgctttagatagtgaggccaggatggtctctgagaaggtgacatgaggaccaatccctgaatgataagatggagcaactgaggaaagcttttgaggccggtggaatatctaatgtacatgtcctgatacaggaaaaatcacctagcttcctgctggctggggtcatagctttcatctctgtgtaaggctagtcctgcnnngcctagaagaggcttataatatatacctttccattcagcctgattgtccaaacacatcccattgtttaattagaacaccctgatccagggccaggtgcaatggctcatgcctgcaggagaatcgcttgagctcaggagatcaaaaccagcttggtcaacatagccagacccccatctctactaaaaatttaatttaaaaaaaaaaaatgctgagtgtggtggtacgcccccgtagcccgatacacaggaggctgaggcgggaggatcacttgaatctgggtgggagattgaggctg

SEQ ID NO: 619663 - DNA, 238 bp, Homo sapiens
aaaattcaaaacaagaaccaaaccaaaaaaatttaaggggaaaattattcaaatcggaaaggagacttaagttgatagtgagtggatgattgaggcagatttaaagtttggttgataacaggtagtacagattaaacatttacatatgtatacattttggactattgtagtttagtttttgcgcaacacatcttatctcttcctcactctgcttgttaatccagagtcttatgatgac

SEQ ID NO: 619664 - DNA, 267 bp, Homo sapiens
cacgaggctcgatctcagccaggatcatgagcccgaccgagtacatcgcagagagcagcacgaacgtgagcgcagagcccaggtagaagtcgcggcgggtgaccccgtagccgagtgcgtacgaaaacgtgagattgatcgtctgcacggcgacaacgagcatgtacacgaagatgtacagggatgccccgctccagctgattccgaccgaagccggccccacggtcccctcacccgtggcgcggtcgatgatgagccagatcgaca

SEQ ID NO: 619665 - DNA, 794 bp, Homo sapiens
gcctcctaactcctcatggtacccattctaatcgcaatggccatacctaatgcttaccgaacgaaaaattctaggctatatacaagctacgcaaaggccccgaacgttgtaggcccctacgggctactacaacccttcgcgtgacgccataaaactcttcaccaaagagcccctaaaacccggcactatctaccatcaccctctacatcgaccgccccgaccttagctctcagcgtcgctcttctactatgaacccccctccccatacccgaagcgcccgtggtcaacctcaacctagggctcctatttattgcgttagccaccgtctagcctagccgtgtactcaagtcctctgatcagggtgagcatcagaggtcaaactacgccctgactcggcgcacgtgcgagcagtagcccaaacaatctcagtatgaagtcaccctaggcagtcattgctagctatcaacatgacctaataagtggcatcctttaagcctctccagccttatcacaaacagaagaagcacctctgattactcctgccagtcatgacgccttgggcatcaatatgatttatactccactagctagcagagaccaagcgagacccccttcgaaccttgccgaaggggagtccgaactagtctcaggcttcaaacatcgaatacgccgcaggccccttcgccctaatacttcataggcgaatacacaagcattattataataacagcctcgacactacaatcttcctaggacacatatgacgaatctcccctgaatctacacaacaattg

SEQ ID NO: 619666 - DNA, 737 bp, Homo sapiens
tacatcttagtctgcagggtggcgtttaggtttatgtacgggatataaagtatcacaatacaatcttcactgtacataaaatatgtcttcatgtacagatctttactttaaaagctgaacattccaatttgcgcctaacacactcaccaagcccctgcccaccaagtatctcctttaacatcatctcagtcctgttggcaccatgcaccccacatgtaattcacattttatatacttacatcatgcatcgcacagcgcattgaatcactctagcaccattatctaacacctatttctctccatattcaatcatgcattacaacttttgcctcaacatccttacttacatatttcccatttgccttgaatctttagttcgatttccctcttactacccatgtgacacacaacaacaagtaccaaggaatgaggtcacctctgacttgagaatatcacttcccatccgtaatctactatgactcacaggacccccttggaaatcatcgttacctcttcggctaacttactcatattctatcttgtataatctgcactctactacatagcgtccttaaaccgggctcacgtatacaccatcccacaaccacatcgcctataagacaccccaccaccccatagcgaaaggcttgagcgaaatcaagcgactgaccataaactcaattatgcgactacctccacccagtggcaccaaaccccattccccggcaccttccacc

SEQ ID NO: 619667 - DNA, 394 bp, Homo sapiens
  misc_feature (1)..(1): n is a, c, g, or t
  misc_feature (228)..(228): n is a, c, g, or t
ntgcacaggaagccttcacagtggaagggggacttgggcccccacatttgaaacctgtaggtccccccagttcacctgccttattggggcccaacattgtacccagttggttgggaggaccagagcctgtctcagggaattgcctgttggggttatccagggagaaggggaggtgcaggaaagagggcccggcctcagctgtcaccagcatttttgaccaagtcctgntagtggggcccctgccctagggtttagagcatggacctcctgccctgggggtcatttggggccagggctttttggatgctttcctgctgccccagccagggttggagttttagccttgggatccagtgaagccagaagccaaataaactcaaaagttgtttcccca

SEQ ID NO: 619668 - DNA, 422 bp, Homo sapiens
tgatctaaggatccccaagaacagacactctgggcacaaagggagaatgtctctaaaaaaataaaaaattaaaaattagccgggcattgtggcacgttgcctgtggtcccagctactcaggagtctggggtgggaggactatatgaggccaggaggtcgagactgcagtgagctgtgattgtgccactgcactccagcctgagcaacagagagagaacctgtcaaaagaaaagaagaaaagaaaagagaaaaatggaaggaaggacagacacaagatgtctaatttgaattcacaagaacaaacgaaaaaaaaaattggtatttagggtcaatataaacggtagatggtcccttcaagaaaatacctgccttatacagaactacgtggctgtataaccccaaagtgtctgactaggggaacc

SEQ ID NO: 619669 - DNA, 115 bp, Homo sapiens
gtggtactctgaggatctcagtgctacctccacaaacagtcaaacaaataaaaggctgatttggggattttatcttgaatgttgagtgtagcactctgtttgtggaggtagcact

SEQ ID NO: 619670 - DNA, 359 bp, Homo sapiens
cctctccctctcttccctttctggactttagtctttcacttccaattttgtggatgatattttcggaataacggacttctacagacgcaacaaaaggactgaatttccttgcttactttgcatatacagactggattattttttttttttacagccttttccccaaaggattgtcttgctttttactgacatttggtatgtctcattcatcggaatctttcttattttctaccgtgttagaaaagcctgtaagaaatacgggatttgataatattttgacggcgggaaaaccccgaattgtttcttctttgagagtcatgcctaccttctggtgtggagaaattgccattggacaattg

SEQ ID NO: 619671 - DNA, 352 bp, Homo sapiens
ctatgacacccgagaccagacgagctacctatgagcagataaaagagcgcacaccggtatgtagcaaaatagtgggaagagatataggtagaggcgacaaacctaccgagcctgtggatagctggttggccaagatagaatcttaggtcaactttaaatttgcgccacagaaccctctaaatccccttggaaatttaactgtgaggccaaagaggaacaggtctttggacacttggaaaaaaccttgtagagagagtgaaaaatttaacacccatagtaggcctgcaggcaccaattaagaaagcgttcaagctcaacacccactacctccctatagaagaacttggtaggt

SEQ ID NO: 619672 - DNA, 335 bp, Homo sapiens
  misc_feature (56)..(56): n is a, c, g, or t
  misc_feature (78)..(78): n is a, c, g, or t
  misc_feature (117)..(117): n is a, c, g, or t
  misc_feature (168)..(168): n is a, c, g, or t
  misc_feature (183)..(183): n is a, c, g, or t
actctagaggtcccctcgaatcgacggtctctaatcataaatcagaagaactttanactttaacaagaaaaggataanaaggcataacaaggcaaaagtgctcaagaaaagaaggcnaagctcatttaactgtggaacctgaatctgaccataacctctgtcctaatnattaattcacaaaantacaggaaacagaagaatactgattacgtgagatactacgggatacaaccatcaaaatccaaactgtggaaaacaacaggatagatgacatacaggttactagctatttatcgccgggaataaaattgcgaggatgagaaaagatgaaagag

SEQ ID NO: 619673 - DNA, 110 bp, Homo sapiens
ggcatctgacttctgcatacctgaccttctggcatcctgaccttctggcatacctagagcttctggcatacctggaacttctggcatacctggagcttctgtgcatacct

SEQ ID NO: 619674 - DNA, 167 bp, Homo sapiens
tatacgacgtcgagtctcggaccgtattattaaataccaaaaaacattttgtttctatttaataataaaccacactgaaattattgccaatgaatcccaaagatttggtacaaatagtacaatccgtgatttgcttatcctctttcctgttcttcagtacaaatcag

SEQ ID NO: 619675 - DNA, 303 bp, Homo sapiens
tttcctacgtcggattttggagacgcatttttacctctaaatcgtgcgcgtcccatttcgcgttgcccaccgccgaaatcggggggcaacgccagaccaattgcgtgatacgccttctctggctccctccacccatggaccagcgcattgccgtgtgcgcactgtcatgtgtcttgttctgccgctgctctctgctcctccacgcatgtgccggagcacctcgtgcttcttgtcggcgtcccctccacagtcgtgtttctgccacacctcctctcatatttgttgaagcacggtcacctctgc

SEQ ID NO: 619676 - DNA, 298 bp, Homo sapiens
tgctcccattacagataatgccatggcagagaggaacgcgggatgctgaggaatgtgttccacgccaagagtgcagagctgaacaattgagtgtgtctaccaagcactgccatagattcagacgcagcaagacagatgatcactggaagctcagtgcgcactgctccaagtgcctaggcgattgaagctgcatgtcccatgctgagccatgaacagctgggtgctggatgaaacacgggtgtgcatcagacgggagtgcctgctattgcccgtgcatgcttgctgcagattccatggg

SEQ ID NO: 619677 - DNA, 476 bp, Homo sapiens
  misc_feature (203)..(203): n is a, c, g, or t
  misc_feature (210)..(210): n is a, c, g, or t
  misc_feature (212)..(212): n is a, c, g, or t
  misc_feature (221)..(221): n is a, c, g, or t
  misc_feature (223)..(223): n is a, c, g, or t
  misc_feature (230)..(230): n is a, c, g, or t
  misc_feature (234)..(234): n is a, c, g, or t
  misc_feature (240)..(240): n is a, c, g, or t
  misc_feature (248)..(248): n is a, c, g, or t
  misc_feature (288)..(289): n is a, c, g, or t
  misc_feature (312)..(312): n is a, c, g, or t
  misc_feature (318)..(318): n is a, c, g, or t
  misc_feature (324)..(324): n is a, c, g, or t
  misc_feature (327)..(328): n is a, c, g, or t
  misc_feature (336)..(336): n is a, c, g, or t
  misc_feature (340)..(340): n is a, c, g, or t
  misc_feature (342)..(342): n is a, c, g, or t
  misc_feature (344)..(344): n is a, c, g, or t
  misc_feature (353)..(353): n is a, c, g, or t
  misc_feature (357)..(358): n is a, c, g, or t
agagcggtctggggacaggtatgatcatgatgacgaggtagagcgcggtagccgtcgcgtgtgtcaagctggacagggtcatcctgagggtgcgactccgccgcgatggtgacccggttcctgggcccacgctaccgggagctggtcaagaactgggtcccgacggcctacacatggggcgctgtgggcgcgtggggctggtntgggctnancgattggcngntgatccnggantgggtnccttacancaatggcaagtttaagaaggataattaattacacaaaccnntcacagactgctctggtgcctgntggtgntagctnctnncacctcancacntncncatctggancagnncaagcctcaggatggacaagaggaaacccacagctcagcttcaggcttcttatgtttctgaaaacagcttggatattttaatgcacgttgcattaaacctcactgaaacctgaaaaaa

SEQ ID NO: 619678 - DNA, 653 bp, Homo sapiens
  misc_feature (2)..(2): n is a, c, g, or t
tngacagagttgtgcaggtctacctgggtaggagtgattataagcagtggggaagagaccatgagcacaagggcactagcccagtggcagcagaaggagcaggccattgagacggtgacaagccccagaactggcgactatcatcaagcacagagcccaagtgtacatggccatggagtgggaaaagtggtgccaattagcactccgagtaatccttactcctgatgcccacaccaggagcattctgtccttaaggatattctaccccagaaggagttgtgggggaggaggggggtgcatcgtaaagccatgctaagtgtgagaacatccaggttagacttacaaggtgtgggagtggcagcaggttctcgatgggttgaggctcttctggacaatggcccacccctgtttacccgagcaccaaccaggcagagacaggaatgctaatggctgggagtggtagtaaaactgaacagggtgtgtatgacatacgtatcaatgtatgtgcatatctgttcccatgtgtgctagagcatgtgttcaccagaaataaagctttgcacaaccatctgtttgtggatttggaaacagtaaaaagaagacagcggcacaaatttggctaagaagtgtattagaggctgagttcagctcct

SEQ ID NO: 619679 - DNA, 718 bp, Homo sapiens
  misc_feature (98)..(98): n is a, c, g, or t
  misc_feature (126)..(126): n is a, c, g, or t
  misc_feature (142)..(142): n is a, c, g, or t
  misc_feature (150)..(150): n is a, c, g, or t
  misc_feature (155)..(155): n is a, c, g, or t
  misc_feature (216)..(217): n is a, c, g, or t
  misc_feature (221)..(221): n is a, c, g, or t
  misc_feature (244)..(244): n is a, c, g, or t
  misc_feature (252)..(252): n is a, c, g, or t
  misc_feature (255)..(255): n is a, c, g, or t
  misc_feature (264)..(264): n is a, c, g, or t
  misc_feature (279)..(279): n is a, c, g, or t
  misc_feature (301)..(301): n is a, c, g, or t
  misc_feature (304)..(307): n is a, c, g, or t
  misc_feature (346)..(346): n is a, c, g, or t
  misc_feature (348)..(348): n is a, c, g, or t
  misc_feature (353)..(353): n is a, c, g, or t
  misc_feature (361)..(361): n is a, c, g, or t
  misc_feature (370)..(370): n is a, c, g, or t
  misc_feature (394)..(394): n is a, c, g, or t
  misc_feature (442)..(442): n is a, c, g, or t
  misc_feature (519)..(520): n is a, c, g, or t
  misc_feature (544)..(544): n is a, c, g, or t
  misc_feature (595)..(595): n is a, c, g, or t
  misc_feature (617)..(617): n is a, c, g, or t
  misc_feature (628)..(628): n is a, c, g, or t
  misc_feature (673)..(673): n is a, c, g, or t
tagcattaaataacactctttaaatggtacacctatgaagcaagaattaaatataaacccagtctaatcctgtacacttgtaattaattgtaacaatnttaagtagctcacttctatcccatttanaaattaaaaaaaagcncgtttccngtttncccctcaccactttgccttggcatcacaccacccctgcctcgggcttcagctgccggtccnncccngcccctcctcccagctgggctgnctccagtnccngccccagtntccaccaactgagcngcgtacgggggttgtgtctggnttnnnnatctaccaccccttcagagcaacttccaacatgggaccngngaggnagctcgcnttgcttggnctgaacagatttccggaggttttntcacaaggccctgaaaacttcctaagcctgctttctccttgcacagcnggggtggggctatggtgggtgcggggggggggggtggcgggggcggcaggggctctcaacttaggtctctgaatcanngtggggacagatgctgccttagtncttcttgcctcccagggccaggtttcttgtgaggagctttcctgggcgggngggggtcagtgtggagactgtnggggattccancttcactctgtctaagagggtcttcttaagggcagctggggagancttttcttggtcggccatggactgtagctctcgtgttcggataca

SEQ ID NO: 619680 - DNA, 782 bp, Homo sapiens
ctttctgacgagtagcgcgatttttggataatttcatttgtagtcacgatctagatttgcaggtcctcaaatgggagacccccaaatttctctgtccgcaatctgtcgccagggatgtgatacaggcccgatacatgtggaaaatgggggaagacccccgggtgagaagcttacaatttacggttttggtcttgggcaattgggcaccacggaaacaagaccttgccttgagaatctttgttgtatcttggggacttttactcttgcttgtttgactgcttaaacttccaaattctctgtattccaatcttgattgtggcgaatctacttccaaaaggaaaataatcccactttgtggatattaaatggaaggtttgctgttctgatctagttgtttcccgtggcacacgttttatgaaatatgttctataagatgtacacttttttcacttgtaccatagaaccattgtaaataaattgattaaagtgctgcaacttttgactgaattttttctagccactttttacaacgagaacaactaggaacttgagtattttgtgtacggtactagtttccatcctccctccccttcctcctcccctcctctctctctcttcctacctatttaattttcatttgtcatgaggtttttggatttgcccatgcatttcgctggacatcatgccccctgtcatagagaatataagctgatgattgtacccgtccttaattattcatgattcaataaacctgatgcttatttattccaaaaaacataaaa

SEQ ID NO: 619681 - DNA, 693 bp, Homo sapiens
  misc_feature (218)..(218): n is a, c, g, or t
  misc_feature (301)..(301): n is a, c, g, or t
  misc_feature (329)..(330): n is a, c, g, or t
  misc_feature (355)..(355): n is a, c, g, or t
  misc_feature (392)..(393): n is a, c, g, or t
  misc_feature (411)..(411): n is a, c, g, or t
  misc_feature (422)..(422): n is a, c, g, or t
  misc_feature (431)..(431): n is a, c, g, or t
  misc_feature (435)..(435): n is a, c, g, or t
  misc_feature (442)..(442): n is a, c, g, or t
  misc_feature (467)..(467): n is a, c, g, or t
acatgccagagctggatggtgggtgcccggcacggaggggctgcggaccaatggctctgccctgcaccttagggctcgggatgctgctggccctgccagggccttgggctcgggtggcagcgcggaggacagcgtgggctccagctctgtcaccgttgtcctgctgctgctgctgctcctactgctggccactggcctagcactggcctggcgccgcntcagccgtgactcagggggctactaccacccggcccgcctaggtccgcgctgtggggccgcacgcggcgcctgctctgggccngccccccaggtcgctggctgcaggcccnnagctgagctggggtccacagacaantgaccttgagcgacaggaggatgagcagggacacagnnctatgaccacgtcgcggntggtggcctgnaggcttgancctnggggaanggcgagcagcaatgtggagaggcgntccagcccaagaagcagggttcccctgtgcgtggcttgaggagagccagaagacatgtgacacggggaggggcgacctggtccttcggctccccaggaccagcgagcgcagggggcagtgctgaggccctgctgagtgacttgcacgcctttgctggcagcgcagccttgggatacagcgccaggcatttgggggccagtgcctccatgtcacgcgattgtagagc

SEQ ID NO: 619682 - DNA, 110 bp, Homo sapiens
agcccttagcgacagacctgttgggagcctgaagacagtcccatcctggtcctcaggtgtgactcacactcactgcagtttgctgctgcccctaaggtggtcccggtgtt

SEQ ID NO: 619683 - DNA, 320 bp, Homo sapiens
  misc_feature (59)..(59): n is a, c, g, or t
  misc_feature (67)..(67): n is a, c, g, or t
  misc_feature (193)..(193): n is a, c, g, or t
  misc_feature (200)..(200): n is a, c, g, or t
  misc_feature (236)..(236): n is a, c, g, or t
  misc_feature (241)..(241): n is a, c, g, or t
  misc_feature (286)..(286): n is a, c, g, or t
agaaggctgggcctaggccgctggatgctggagtgaaaggaagggagaaagggagcggnaagagtcnagaaggctgagtgttaagaggccaagtgcgacgcgcgtatccggcagacggactgacggacggcccgtgcttctgccgcggctgcggcgcccgcgcgagtcgcgtctaagcggcggcggcggtggnagcggcngaaaccgaaggggagccatggcggctgactgtcggnaggangatggagaacttaatgttctggatgatattttaactgaagtccanaacagatgatgaactgtataatccagagagtgac

SEQ ID NO: 619684 - DNA, 229 bp, Homo sapiens
accccaaactcccagcccatcacggtagatgcaaactattacactgagaaaggataagcaatgaggtcctgctgtacagcacaggaaactatacccagtctcttgggatagaacatgatggaatacagtataaaaaaaggaatgtatatttacgtatgactgggtcactttgctatacagtagaaattctcccaacactgtaaatcaacacggtaacaccacagctacg

SEQ ID NO: 619685 - DNA, 344 bp, Homo sapiens
ataggtaggtaatatattagagtctagcaagttcaataaatcatgagatttcccatcgttacacccttttgtattcaccttccttgaatcaaacattttcgagtgaactacgtgtttttattacagacatttgttgtattcatcgtcgtgactgtacatacctttcaggatgagactgcaagaatgttgggcaataatggttgaatcttttttccgattgtctttcatacttaagtgaagtgtcttgtctgcattatcctgccgggtatgtatccagtactacataggtgggttaaatgtggtaattctagttcagtgtcttaccctgaagagaaagttgtagg

SEQ ID NO: 619686 - DNA, 1098 bp, Homo sapiens
tctctctctttccctgcagaaggggcccggtgtccagctgcctattttctgcccggatctcgggctcctcatctctccggtctccgcaaactataaaggcccttcgggattaatgcagcaggccatgtgcctgtgtgttgcacacggcttgatgccccgggagccccgtcccgcccccgcccttacctgttgccgccttgcgagaccagggtctccctgtggcatacctgcatacggggcgccgcgacagattggtgagagccgggaaaccagagcgctgtgtgagaagcggcctgtgagagggccagaccaagggccaagcgtacgttcaagagagccctgcaccggttggccaaacaccccgcacaggagacgcctgtggtgcacgcccctgtgctgtgctcacaaaacaagccagcttctttcagccctgtgaagacctcgccgccacgggtgctacacggccacacgctcgcacagaagccctgtgcctgtgggccctctgtgccggatcgggcccacaagctgtgggcaccctgtggaacatttctcttaagaacagcgccttcatctcagaacttgtgtgttggtagaccaagccccccgtgtggttccccctgttgccgagagggcccacagccggaaccactcctgtgagacggggggccaaaagtgaaaaggccaggagccggtcacttcaccacaaaaagacacacacccacatcacggagcaaaacaccgctcgccccacaaataaacccatcagtagcggagatccctgcactggcgtgtgtgagcacctttcaccggcaccacccttagcaccagcacatagcgctctatgcaccgagagccacttggcccacaatcaaacccgggtgcaccctagccatcacgcgacactacaacacgacccaaaggcccgggcccacggcagggggttctggaaacacggtaccaaatgtgcgaattctagacacagaagaccgtttcttcaaagggaggacaggcagggtgaaatccacaaaaagaggttttataaaagttttggcggcctgagaacccgagaagaaaggcaaaaacggtagggtgagttgc

SEQ ID NO: 619687 - DNA, 276 bp, Homo sapiens
tacagagtgaatgtgaatagtacaaatacgtgtcaaacaagcgccgtcaataacggcgctccctggggttcaaccgcgcagcgcggtgatcaaatcggccagccaaggctcggcgtcagcttccggggtgacgctttcgctggcgtccaggcgcagcatcggctgcacttcgcggatgcccagttcggcgaacaattcgcgcatttgttcaccgccgccacagaaggtatcgccatagctggcgtcgcccaggccgatgaccgctcccggcaggcc

SEQ ID NO: 619688 - DNA, 141 bp, Homo sapiens
tttatcatagatggagacctacaaagttgtcagaccacatctacaaaatgccagtatcaggcggcgggtaagaaaccaaagtgatgtttggatgtacacgtgacaactattaagcttgggcggactggacacgcacgacta

SEQ ID NO: 619689 - DNA, 126 bp, Homo sapiens
atgaggatcccagcgtcaagatactgaggtggagcggagagcaggtgcatgtggcggatgatgagcctgcagggaggcatctgttgatgtccatgtgcctgccatgggctagttcacgattgttcc

SEQ ID NO: 619690 - DNA, 371 bp, Homo sapiens
tgaatggctcacggtgtgtgtggcacagtccatgcttttacccatatttacacagaagaatgcccacttggcccaggtagaagtagttagagtgtttggttccatgtgtcacatacctccaagagttcctccccacgatccaatcccaggtggaattgcctctcttgtcaaatcccttcttgatatgacccgcaatgcccttctctatgtgtgtatttctccagcgcttaagtagcgcactccccaatgtcctgttgcatctcttcccacatgtccgcatttttgatcacgccctttcgctcgcacatggtcccaatgtgccagagcccgtggaaaagggctctgcccgtctgccgcggtctcctagggct

SEQ ID NO: 619691 - DNA, 835 bp, Homo sapiens
gggagggaagccggccaggctcggtgaggaggcaaggttctgaggggacaggctgactggatggaccagaggtcccgggaggaagcactgagggagaagatctgccagtgagtctcgatggcccatgtctgcctaactccctgctgtgggcccttgacgccaaggagtcttcatggcctcttgttgagcaagaggatgtccaagcacgttgcaaggctccttgaagaaaagcgcctttgaaggccccctggagtgaggagggccctctgggtccttgggtgggttttgcgcaggggctccctggtaaacttggagggaggcaagggaagggttgggccttttccttcccttcattttccataactcctaaatgttttagcaaatgtcaaccccccgttggggggaaaggggttggcccctgtgtttggagcacaggagtcgtcacacccaagagaattccctttctccccacaaaggtagttcccatctcacaggggggaaggccctcttcacaaagggccttttccccaccaagtttacaccccattgtggaagtttaaaccccctttcctttctttggggagaaggcccaaaaattcccctttaatgtggaacgggaaccttctcacaaggacaaaccccaaatggaaatagaaggcgacagggcgggcccaaaacggccacctcttttcccctttgtggacctcgttgggagtgtcttggggacgttccccaacagggcaatgccactcacaaggttcacggacaaggttgctgccccacagcgtttgggagtcacccatgcttgtctctggggtcaccctttccacagtga

SEQ ID NO: 619692 - DNA, 163 bp, Homo sapiens
gtataggggacaggactatctttctttgagtgacgtctgtgccggccctgtagtccgcagaggggtctgagctgcactggccccagtgctggcatctggtgagcggacccaatacccctcacattccacaggcccatggggtcgcttttgtgacagagtccta

SEQ ID NO: 619693 - DNA, 146 bp, Homo sapiens
tagaggatacccgatgaagcatacatagattaccgcacgtgcacatggcggtacgagataacgtggaatggaggtgtggaatgtactgaaggagaggttgcgcaatgtagccggcaagcggaagcgaaccagcgagcgagttaagg

SEQ ID NO: 619694 - DNA, 967 bp, Homo sapiens
  misc_feature (469)..(469): n is a, c, g, or t
atccctgagaatccaaaattccccgtgccacctatcacaccccatcctaaaaaaaaaaaaaaaaaaaaaaaaaaaaaaaaaaaaaaaaaaaaaaaaaaaaaaaaaaaaaaaaaaaaagcgtgtggggggcgcgcgcgcgcggcgcccccgagaaaaacttttaaaacacccccgcgggggggcgcgcggggcgccccagagggcaaaggaaaagaggggccaaagggggtgtccccagaggagaaccacgcgcggggacacaaaacaaagggcggcggggtgtttctccacacacaaataaaaaaacagcgcgcgcggggggaacacacagaagggtgttgcggaagaacaacaacaccacaagagggaatcttcgagaggggtacaaatatacgaggggcggcatacataatacacaagagaggagagccacacagagagagacagcgccacacagatattataacanatatatagaccccccgggtagtcggggggggggacacacaaaaaaaaaaaaaaaaaaaagaaaaaaacataaaacaaagaaaaaaaacagaaaaccaccaccacacgagcaacaggacaaaacaaccaccgaaccaacgcaaacagacacgacaccagcacatgcacccgaatgacgcagacgatgactacacacaaaatcacaacagacaccaacccagcaccacaacacgaaagcccacagacagcagtgcctgaaatcagaccgccaaacacgaaaagcaagatagacaaacgaggaaacagaggaacacgaagcaccacggaagagacagaacaacgaacccaaacggcacaagacaggagaccggcagacaaacctgacaacacaacataacaaccaaacaactagcacacaacaaaagcacagcagacagcgaaccccaaagacacgcaccatacaaacaacaggacagccaaagaaaaccatagacggcaa

SEQ ID NO: 619695 - DNA, 317 bp, Homo sapiens
agtacattgccatcttcaggacgacttgacgggtttgggattgtgtacaaacttttataataaggatcctaaaactgtcgcctttaaatatcacagcagcctacctgtaggctaattctgggcagcgggctggcccctggtgtgagcattagaccaaccacagtgcctgattggtatagcctaatatgctttcctacagaatggaattggaggccgggcgcagtggctcacgcctgtaatcccagcacatgttgatgccaatgctggtggatcacctgatgtcaagatctcgataccatcctgtccaacgtggtgaa

SEQ ID NO: 619696 - DNA, 931 bp, Homo sapiens
gcgaacacctcatcacaggctcctttgttacggggatgaacggtagagttcctatctaagacaagcgctccacttctcactagatctcaaggactcaaggacatgctcagcaattctctcccttttccccacatcacttgcctctcaccaggaccatcccatgagcacagacatgctatcatttccctaatcttaaaatccctcagccgggcgcggtggctcacgcctgtaatcccaacacttggggaggccgagacaggttgatcacttgaagctggaagtttgagacaagcctggacgaactcggtggtggccactgcgcagaccagacttcgctcgtactcgtgcgcctcgcttcgcttttcctccgcaaccatgtctgacaaacccgatatggctgagatcgagaaattcgataagtcgaaactgaagaagacagagacgcaagagaaaaatccactgccttccaaagaaacgattgaacaggagaagcaagcaggcgaatcgtaatgaggcgtgcgccgccaatatgcactgtacattccacaagcattgccttcttattttacttcttttagctgtttaactttgtaagatgcaaagaggttggatcaagtttaaatgactgtgctgcccctttcacatcaaagaactactgacaacgaaggccgcgcctgcctttcccatctgtctatctatctggctggcagggaaggaaagaacttgcatgttggtgaaggaagaagtggggtggaagaagtgggggtgggacgacagtgaaatctagagtaaaaccaagctggcccaaggtgtcctgcaggctgtaaatgcagtttaatcagagtgccattttttttttagataaacttctttcaattcttggagttcacaattttttgaactcaaactttaagttctaaaacccaaataa

SEQ ID NO: 619697 - DNA, 346 bp, Homo sapiens
gagacgtgtagcatgcaacatagctttgtagggaagggattgcatctcctgaaaaatgcagacagtcccgtgctggtcactgtggctcacgcttgtaatcccagcattttaggaggccgaggtgagtggatcacctgaggtcaggagtttgagaccagcctggcccaacatggtgaaaccccgtctctaccgaaaatacaaaattatccgggcgtggtggtgcatgcctgtaatcccagctactctgaaggctgatgcaggagaatcatttagaacccgggaagcggaggttacagttagccgagattgcatcactgtactccagccattgcaacacggtctctca

SEQ ID NO: 619698 - DNA, 1006 bp, Homo sapiens
  misc_feature (628)..(628): n is a, c, g, or t
gcgaacacctcatcacaggctcctttgttacggggatgaacggtagagttcctatctaagacaagcgctccacttctcactagatctcaaggactcaaggacatgctcagcaattctctcccttttccccacatcacttgcctctcaccaggaccatcccatgagcacagacatgctatcatttccctaatcttaaaatccctcagccgggcgcggtggctcacgcctgtaatcccaacacttggggaggccgagacaggttgatcacttgaagctggaagtttgagacaagcctggacgaactcggtggtggccactgcgcagaccagacttcgctcgtactcgtgcgcctcgcttcgcttttcctccgcaaccatgtctgacaaacccgatatggctgagatcgagaaattcgataagtcgaaactgaagaagacagagacgcaagagaaaaatccactgccttccaaagaaacgattgaacaggagaagcaagcaggcgaatcgtaatgaggcgtgcgccgccaatatgcactgtacattccacaagcattgccttcttattttacttcttttagctgtttaactttgtaagatgcaaagaggttggatcaagtttaaagtgacngtgctgcccttttcacatcaaagaactactgacaacgaaggccgcgcctgcctttcccatctgtctatctatctggctggcagggaaggaaagaacttgcatgttggtgaaggaagaagtggggtggaagaagtgggggtgggacgacagtgaaatctagagtaaaaccaagctggcccaaggtgtcctgcaggctgtaaatgcagtttaatcagagtgccattttttttgagggttcaaactggatgtcaattatgggaatgcacaatttgttgaatatgcagattaacccggttgaaaaaggccgtaaaaaaaaatgactaaataaaagtatatgttcggggcgattggggccctgagaaaaagttttgaaaccct

SEQ ID NO: 619699 - DNA, 322 bp, Homo sapiens
tgtgtgtgggtgcttcgctagaaaaatgtgtgtgttgtggtggcgttgccgtttgagaactcggtttatttagtacggtggttttatgtgtattagatgttgtggatgttcctctggcacattgcagggatttattagtcagtttcgcgagtagtagtgtaatgaattagttactgagtggtgaatctcagtattgattatattatatgttggcgtgttagagtgtactgatctttttgcgctaattgttttctatcttgtttgcttctctctgactggtgtttattttttgtagcgcgcggagatatgttatgttttatgt

SEQ ID NO: 619700 - DNA, 991 bp, Homo sapiens
gcgaacacctcatcacaggctcctttgttacggggatgaacggtagagttcctatctaagacaagcgctccacttctcactagatctcaaggactcaaggacatgctcagcaattctctcccttttccccacatcacttgcctctcaccaggaccatcccatgagcacagacatgctatcatttccctaatcttaaaatccctcagccgggcgcggtggctcacgcctgtaatcccaacacttggggaggccgagacaggttgatcacttgaagctggaagtttgagacaagcctggacgaactcggtggtggccactgcgcagaccagacttcgctcgtactcgtgcgcctcgcttcgcttttcctccgcaaccatgtctgacaaacccgatatggctgagatcgagaaattcgataagtcgaaactgaagaagacagagacgcaagagaaaaatccactgccttccaaagaaacgattgaacaggagaagcaagcaggcgaatcgtaatgaggcgtgcgccgccaatatgcactgtacattccacaagcattgccttcttattttacttcttttagctgtttaactttgtaagatgcaaagaggttggatcaagtttaaatgactgtgctaggccctttcacatcaaagaactactgacaacgaaggccgcgcctgcctttcccatctgtctatctatctggctggcagggaaggaaagaacttgcatgttggtgaaggaagaagtggggtggaagaagtgggggtgggacgacagtgaaatctagagtaaaaccaagctggcccaaggtgtcctgcaggctgtaaatgcagtttaatcagagtgccattttttttatgtcacatgctttacatcttggaagccccccttattaatatgccacctatcagttcaaccttccactacattgcacattcaatcctagccactcccactacatgataataactccactttcatctgtgaccc

SEQ ID NO: 619701 - DNA, 146 bp, Homo sapiens
gtgctctatggtcgttaccggaatgcgagggttgtctagcatgttcagtatgagtggtgatggggaatgtccttgatcgatcctgatcactgactcgtggtcaacctttttcttttttatattttttttcataggtgttctaaggg

SEQ ID NO: 619702 - DNA, 361 bp, Homo sapiens
tgatctcagaggatccctgcgggttcatatttaggtttaagctctaagactcctgacccaacaatttatataactggctttccgtaggctgcggcttgaactaggtcagagaagccgaggagttcagatctatatagcacagaactacgtctcattctaaaacattgtcactactgttcgagtcgaccccattacgctgtttcaaattgtgtctcttttactgtgttctataattatattttgttcagagctaatctcaaatcttgctctgccttggttggctgtgctgttctcagtccgacatttacggactccagctttctccctcttgagtaccttggtcctaaatgtcctcccgcat

SEQ ID NO: 619703 - DNA, 574 bp, Homo sapiens
  misc_feature (574)..(574): n is a, c, g, or t
tataagtacaaattttgtgcctgggcatagtggctcgtgacctgtgatcccagcactttggtgggccggggctggaaggatcgctttgagcccagtgatgtttccagtggccagccctggggcaaacaatgtgcaactgaccccccgtgtctaacaaacacaggtttaccacacgttgggccacggttgtacgtgtgtaatgcgcctagtgtatcccatgctgctcgtggagacctgggtgcagaaatgaatcaactacaaatgcctcatggaagtgttttgcatgccaaaacggtggcacctggtagtataccctaggccaactttggcacaattccccaaaactcttgggtgccaaaacgagcatggcaaatgaaacccattgtgctccattcaagaaaagacgaacaagatcaacagagcggacaattcagcagcccacatttggtgagtcaaccctctgggggagcctctattgcggcacagcgcagtggcttctcaaccggagacacactgactatatagtccagttctcaccatatctatctactaataaaatgctggactcgaaccn

SEQ ID NO: 619704 - DNA, 945 bp, Homo sapiens
  misc_feature (623)..(623): n is a, c, g, or t
gcgaacacctcatcacaggctcctttgttacggggatgaacggtagagttcctatctaagacaagcgctccacttctcactagatctcaaggactcaaggacatgctcagcaattctctcccttttccccacatcacttgcctctcaccaggaccatcccatgagcacagacatgctatcatttccctaatcttaaaatccctcagccgggcgcggtggctcacgcctgtaatcccaacacttggggaggccgagacaggttgatcacttgaagctggaagtttgagacaagcctggacgaactcggtggtggccactgcgcagaccagacttcgctcgtactcgtgcgcctcgcttcgcttttcctccgcaaccatgtctgacaaacccgatatggctgagatcgagaaattcgataagtcgaaactgaagaagacagagacgcaagagaaaaatccactgccttccaaagaaacgattgaacaggagaagcaagcaggcgaatcgtaatgaggcgtgcgccgccaatatgcactgtacattccacaagcattgccttcttattttacttcttttagctgtttaactttgtaagatgcaaagaggttggatcaagtttcccnccccccccccccccccccccctttttttctccacatcaaagaactactgacaacgaaggccgcgcctgcctttcccatctgtctatctatctggctggcagggaaggaaagaacttgcatgttggtgaaggaagaagtggggtggaagaagtgggggtgggacgacagtgaaatctagagtaaaaccaagctggcccaaggtgtcctgcaggctgtaaatgcagtttaatcagagtgccattttttttttagataaacttctttcaattcttggagttcacaattttttgaactcaaactttaagttctaaaacccaaataa

SEQ ID NO: 619705 - DNA, 508 bp, Homo sapiens
agcgggcgttgagccgccgccgccgccgccgcctcctcagcttcagcctccgcgccaggcccggtcccgccgcgccactgtcggactaccgtaaaagatgacaacagcacatggggagcatggcagatccgaaaccagacacgacaagagacaggtgacggagagccgaccacacgtaccaaaaaggatgatttcacccaacggcataccagaacggaagaacagcacacacagacgagagacacaaggcgcggcccaacgacaaggggcaaccaccgacacatcgacaccaagaagctacaccagcaacaagaaaagcacacaaagacgtgacacagaacgacagggagagacatacctgagcaacagatcagagacacgagatcacggaaacagacaatgagcggacaaaacatacagtcataccaccccacagaacgacagaacaacgaaaccaacaccccacgagcaccacgcgcacaaaaagagtcgagaagactgacgaagg

SEQ ID NO: 619706 - DNA, 418 bp, Homo sapiens
gcacgagagccgggcataagactccggaacttttgccgcgtgcgaggcaccccccgccccccgcatatgttgtgctttcgcgcggaggagaggcgggaacccgagggcgcagaccgcatatgaggaggaatcggcggagtccgcggacaaaggcctggagccctgaggtgttggctggccccgcccgggtttccccacccactgtgcttctttccttccgtgcgccggtgctggcaggcaggtctattagagaaacttttcctgtgtgccttggagggcagagcatttaaggacacaacttggaagagaagaaggcggggcccgagccaaggctgggaatgtgtgcactttgtggggagagaaagtgggttgcttgggggacacgaaacttgcagcagggagctatggctttggtttt

SEQ ID NO: 619707 - DNA, 377 bp, Homo sapiens
tcagagacgtgtcgaatgttctggtgatgagagtatactatagcatattatctccagttctgatttcttcctcttcatcctcagtgacatccataactttgatggctgccaacgtgacccgttttaacatgtcgagcctaatagacttgtccataggttagttcctagtgtccaaagagctgtgcctcttgggactaacagttaaatttacaaggggatttagagggtactgtgcgcgaatttaacgttgaactaagattctatcgttggacaaccagctatcaccaggctcggcaggttagtcgcctctacctataaatcttcccactattttgctacataaacgggagtgctcttttagctgtgcttaggtagct

SEQ ID NO: 619708 - DNA, 167 bp, Homo sapiens
attcccgtttttgaaaaaaaaaaaaattttttttttctctagggaaagggacagggtttatattttggagccctcccgaaggggtaaaattgtaaaaatttttatctatgaggaaatgttaaggaggtgttttaaaaaacttaataaaaaaattcttttcctgtgga

SEQ ID NO: 619709 - DNA, 360 bp, Homo sapiens
  misc_feature (124)..(124): n is a, c, g, or t
  misc_feature (303)..(303): n is a, c, g, or t
gggaggtcgctggaaggacgcgcggcggggcccccggcccagggtatttcggtggaaagaagggaaaaagggcacgagcgggggacacgggctaaagtagaactcggaggccgggaagatcggntcctaaaccggggcctcgaagttcctaccggcggacgaaactttgctcttcggcgggccggtcccggcgtcggcacccggggaaaagcaaacaacaacttgcttgcgcggggctggagagcctgaagcccggccggaacggccgggaaatgctccggggctccccgcggggtcggggcngactcaagacaagggaccggaaaagaaccacgcaagaaagaaagccctatttcttgg

SEQ ID NO: 619710 - DNA, 273 bp, Homo sapiens
gttcttctgctcgttgtggccgccgatgttgtaggtctcgccgaccgcgccttcggtcaccaccttgaacagggcccgggcgtgatcctcgacatacagccagtcgcgcacctgcaggccgttgccgtacaccggcagcggcttgcctgccagggcgttgaggattaccagcggaatcagcttttcggggaagtggaacgggccgtagttgttggagcagttggtgatcagcaccggcagcccataggtacgctgccaggcgcggaccaggtg

SEQ ID NO: 619711 - DNA, 231 bp, Homo sapiens
tggaaatggagtttggctctgtgtggcccaggtgggagtgcaagggcaagatctcagctcaccacaccctcggccttctttttttcttcgtgtttaaaaactggtggtaaaatctagaataacaaaaagttggccatttaaaccatttttaagtggacagtgcaggggcataagtgacttccccatgtgttgtgtacccaccattataatccattcccagagggtgtccat

SEQ ID NO: 619712 - DNA, 460 bp, Homo sapiens
gccagggatactacccagctattcactccccttttcacagcccctcctgtccgaaacaaggaatgtttgccccctttcccttcccctgtttttgccacacaaccctttcggggggcttgtctatctatccagggtacatgtccccccatgcaggctacccagctggtggcctcctacggtcccaggtgcctccatttgactctcatgaggttgccgaggttgggttcagctcccatgatgatgaggataaagccgatgatgtgatagaggtccctgggaaatagctagggagcccctccccccctcccttggggcccccagcaggttgccccccaagctggaaggcagtgatttagccctttttagaataggccccttggcaggagggaaaaggaagaggccaaaggagggtggttggccaaagtggcaaagctctgttgctgtttacccaaagaggcca

SEQ ID NO: 619713 - DNA, 195 bp, Homo sapiens
gaatgtgctgcaatgcagaggaatggaatgggatggagtggaatgaaatggcatggaaaggaatggcaggacatggcgtggaccggcatggagtggcatggattgcagtgcagaggaatggaatgggatggagtggaatgacatggactggaacggactggccggccctggagtggcatggcctggcgtgcactg

SEQ ID NO: 619714 - DNA, 105 bp, Homo sapiens
cgtctactcaggagagaacattttttgtcctcaagaaaatacggaagaagccctgtggttattgctgattagtgaactcaatggccaaccgggacgctgtgctgg

SEQ ID NO: 619715 - DNA, 395 bp, Homo sapiens
taaggataagaagcaagtgaggttgggcacggtggctcacccctgtaatcccagcattttgggaggccgaggtgggtagatcacgaggtcaggagttcaagatcaacctggacaagcttgaacccgggaggcagagattgcagtgagccgagatcatgccactacactccagcctgggcgacagagtaagactccgtctcgggggcggggcaagcaaatgaaacaagatggacaaaaaaaaaaaaaccgggattggatcaagataagggggcccaaatgggatccatttggccagggttcccccgggccctcaacagtcacttaagagactccaggattgccccacacagacctgtttaaccaatataccacacagattggactggtttaatacc

SEQ ID NO: 619716 - DNA, 749 bp, Homo sapiens
gtggacgagatcctcgcggaaggtcgccgacacacgcctcgtgatcatcatgctggtcaacaatgagacgtggcattgtcatgcctgtccctgaaatcagtcagctgcattaaagccctgtaaccaggaacgggtggcacgctgggctacctcccatcctcgtgcacacggatgctgtcacaggccttggggaagctagcgcgtggatgtggaggacctggtgcgtggacttccttacagatcggtggggcacaagtttatatggtcccagggattggcggcactttatatacgagggacgttggtgaagtttaacccgtctctaccctatgctatttggaggtggacaaggaacggaatttcaggccagggacagagaacaaccccaatgatatgctggccttgggaaggccgcggagctggtgacccagaactgcgaggcttatgaggcccacatgacgggacgtccgcgagtacctggagagagaggtctgtggagctggattcggtcagaagagaatccatctgaatgagccgagtttccaggcagccatgcggttcccgatacctgtcaagttgtgcatccggggaccccgggttcaaggccaccggtggttgcttgcggcagtggcgagtgctgatggcacgtgtggtggccgcgtgccactctggacccctgggggccacagcaggtgcagctcggttctcgcctcccccaggtctgtccccagtgcttgctgagtacgggc

SEQ ID NO: 619717 - DNA, 632 bp, Homo sapiens
caagcagtcctccaaatgggctcatccagtttagaagaaattgccccagacgccggacatttcttactatggcctgagtttctccttgtccttaatatggtccagcactgaagtctatcaggacacaaacacacaagatctccttgcatggaaggagagctcgcaaaacagtctgttggtgaaaatcagtgcgccccgcctctgcattttcctgctcctctctttccctcccttgctgtgatgattcctctcccctcctccatccccactccccccgcggctctccttcttggatttccatttcaaatcccttccaatttcatatcagctgccccgcagtgtttgccggtccctcggaaattaatttagcgactttcacacggacatatcatttctaacttcaaagtcccggacgcgggggttgagcctctgtccaagggcacagacacggagactgcagtcagagccctgcccctccaggcgtttgcttgcaaaccacattagtcactgacaccccgacctgcctcccaagcagaggttttagcgctgtcctttgaaaattccccaagtcactgtagatatcaggatctgtcagtatgaatgataagctagagagaaaaacaaaacaaaac

SEQ ID NO: 619718 - DNA, 121 bp, Homo sapiens
ctagaggatccctctctatcagtcggcacctcgcgtattcatagtgcaccatcaccctccttaacctctacttctaccttacgccatattttacacacaaccccgagtgccgatgaactag

SEQ ID NO: 619719 - DNA, 182 bp, Homo sapiens
caaagtgtcttcaaaacatagtagtaaaaaaccagtatcacaaaactgagttacaagaatacttatatgtaatatacagtgcatcccttacctagagaagtctcattaacaacactcacattattactagagggtgcattattgcaatagctgcaccagggcacagggaagggcaacaatca

SEQ ID NO: 619720 - DNA, 298 bp, Homo sapiens
attcgcggccgcgtcgacttttttttttgagacggactctcgctctttcgccaggctggagtgcagtggcacaatctcggctcactgcaacctccacctcctgggttcaagtgattctcctgcctcagcctccccagtagctaggactacaggtgcttgccaccacgcacagataatttttgtatttttagtagagacggggtttctccatgttggccaggatggtctcgatctcttgacctcatgatctgcccgtcgacgcggccgctaatttagtaataagtagtcgatccgggaa

SEQ ID NO: 619721 - DNA, 207 bp, Homo sapiens
ggggaaaaaaaattttggggggggggaaatttttcccgggttttttgggccccaaatttggggttttttttttaaaggggccccttttccctttgggaagggttaccccccccccccctggcccccggggggggggggggggggttttttttttttttgggggttttttttttttttaggccttttttaaaatttttggggccccca

SEQ ID NO: 619722 - DNA, 160 bp, Homo sapiens
caccctgaagtgccaaatacttagctttaatcctttcattcattggatttattttgaggttggataacgggtaataattttttttttatctttggtaacactgttgaaaactttccagttgatttgaacgtgtgcagttataaactaacgttctatatgc

SEQ ID NO: 619723 - DNA, 197 bp, Homo sapiens
tctcgagagtgtgcatggagaagggggctttttttaaacttgaaatgaaaccagcccatggctgtgtgtgtttaggaggaggggagcctgtaaaggcctatttaccttgaatcccctctggcttacagctgctgagagcattaggagagcagacatacttctagaattgggcagtgggatgatggtgattgcgttgc

SEQ ID NO: 619724 - DNA, 254 bp, Homo sapiens
tcttaccttcctccaaaaccattaatatacggtgaagaacgaccacctgagtaagagtctaccaaggagctcatacgtcgacagcccacgtcctgttaaaaaataatataaaaatttacagtaaaaaattccgtcgtataaaatttaaactgcaggaaacctatagctctatttcccatattaaattttctacaagagttttcggcactacctcaagatgtaagtctttattgtaatcacgcctagagatagca

SEQ ID NO: 619725 - DNA, 680 bp, Homo sapiens
atcttgaagacacaacctggccaacatagtgaagccccatctctacaaaaaaacaaaaattagctgggcatggtagtggatgcctatagtcccagctactcgggaggctgaggcatgagaatcacttgaacctggaaggcagaggttgcactgagccaagatcgtaccagtgcactccaccctcggcaacacagtgagaccctgtctcaaaaaaaaaaaaaaaaaaggtttttttaccacaataaaaatttttttcttcgaaaattggaacaacactcgtggtgaacatggaacaggatctggtggggacattttcaacaaggggactaccaaggtcttggtcaaaggtcccgggaatcaccgagagacgacgtaattccagggaacaaattctcttggaacaaattggctctggagacaatttcccaacattttgccacaagagcaacacaattctcaccgcgtccgagagaagagtcatcaagcaagaccactctaagagcggcggggttaaaagcccgaaaagagaaaaatcccgacatatccgagaattttgttccacccatattaaaaccgggcttatcaagcaccaagagcaccaaagactacgaacaaacaaactacaaagagtacgaccacaccacactctgggcgagacgcacaccggaggggactcgtga

SEQ ID NO: 619726 - DNA, 107 bp, Homo sapiens
tccccaggctctgagaggggtgtggtgactccatttatattcttttctgcgctcttgtttttccaagggacactcagatgtctcattacgtttgttatagatgaatc

SEQ ID NO: 619727 - DNA, 150 bp, Homo sapiens
taaatgtaacacttaatataaacgaaggaatatagttattggctgggcatggtggctcacatctgtaatcccagacttttggacagtcaaggacaagggatcacttgaggccagtagttttgagaccagcccgggcaacacaacaagaca

SEQ ID NO: 619728 - DNA, 326 bp, Homo sapiens
  misc_feature (12)..(12): n is a, c, g, or t
  misc_feature (16)..(16): n is a, c, g, or t
  misc_feature (21)..(21): n is a, c, g, or t
  misc_feature (163)..(163): n is a, c, g, or t
  misc_feature (179)..(179): n is a, c, g, or t
tagaaacaccgnttgntgtancaagaggtgctacgtggaatagggatattgtgaccaggtccgagcggctcgcccgtggtggagctgagcaagtgcgctggtcagcgcggcagtgcaacggctctaacccgcccaccgccttttataaacctctaatttattntgtgaactttattatntgtttccgccaagggaaaaggtttattttgtaattattgtgatttcccgtggcccagcctggccagctcccccgggaggggcccgcttgcctcggctcctgctgcaccaacccagccgctgcccggcgccctctgtcctgacttcag

SEQ ID NO: 619729 - DNA, 349 bp, Homo sapiens
gtcaccattgtcactatataccagtctgctgaattgataagctttgttaggatagaagacaagagaggcctgggggtcttggtaatgtcgaatggttagagatgttgaggagcacccgaatatcttagaatagagctgaccccgctctcccccggcccgatcccgtttaagatgcattgataagcctctaatgaaactccaagtttacctctagacaggtttaatatttgatctcatcttctgaaagatcttactatcagtcttatacacagcgaggcggactaattaagaggcaagggtgataggaaactggacacacatccttctgcagacaggtgcagcgtaaaat

SEQ ID NO: 619730 - DNA, 899 bp, Homo sapiens
ctcattgtacccattctaatcgcaatggcattcctaatgcttaccgaacgaaaaattctaggctatatacaactacgcaaaggccccaacgttgtaggcccctacgggctactacaacccttcgctgacgccataaaactcttcaccaaagagcccctaaaaccggcaatctaccatcacctctaatcacggcccgacttagtctcacatcgtcttctatatgaaacccccttcccataccaacccctggtctaaactcaaactaggctcctatttattctaggcactctagagctagacgtttactcaatcctctgatcagggtgagcgatctaactcaaatacgccctgatcggggcactgcgagacagtatgccaaaaaatctcatatgaaagtcacccctagacatcattctatattcaattactaattaggtggtccctttaaactctctcacccttattacaaacaaagaaaactctggattaatcctgcatcatgagccttggcatatatgatttatctccacactagcagagacaacgaaaccccttcgaacttgcgaaagggagtcgaactagtctcaggcttcacatcgaatagcgagggccctttgcctattttatagcgataccaacattttttaataaaacctcaccaataaatttcctaggagaacatatgagcaatctccccgaagtctcaccacatattttgtgccagacctatttaactcccggctttgatttggacagaacccggtcggtggacaattaaatccttgaagtttccatccccgtgtttgttgttttccaaaatcggtccccacaaaaaagggggaaccaggagaggccttgaggccaggaaaggcgccgaagtggctggcacaatgcgtgcc

SEQ ID NO: 619731 - DNA, 1008 bp, Homo sapiens
  misc_feature (610)..(610): n is a, c, g, or t
tttatgtcggcgtagattcgtttcccatcccggctgggcccacttttccgtgctggaagataggcgtgcttgtcccgcccgtgtgggggcgcccccccagggtgtctcgagggtcttttcctccgccgcgtgcctatatgtgttgacgccgccgcgcggttcatgtggtcggtgcaccagtaagactatctttttggcggatattttcccatgctctatgtggggccaccccaccagttgttgtctgcgtagtgccccccgccgcgcgaggttgagatagaaccaatctcgggggggggaaaacacaacgccccggcgttgtcctccctggttgtatggggactgcctctcccgacaaacgctcttttagagagaggcggtttgtttgaaccacagaaacgacaaaaaaaaggaattgggggcgcccttggcccctcttgagtatggccgggaggcgcacgagaagggggacccacccaacgggacgatttataaggggagaggtcgacctctcactgccggcagtaccaaaaccaaccaggaacgtgcgccgctcgaagagggtgcaccccccgcaagacacacccccggcagtttttaccaaatgcgnggccctgcgagggacacaccacggaagttgcactacatctgtggtccccactctcaagaaggcacactcccctgtggataaccaccccggccaggagatgggggtgtcttatccgcgattccttgtgagcacacagagtcccgaatgttgaaggttcgcggcgcacacacacctcggtcacgggcccacgcgccatggaggggaggaaaactccaggagaatcctgtgcgtggctcatttatgaaactgaggtccaggtttcttcaacgtgcgggggggacaaaaaaaaaagcaggttattgaggggagtgcactacaaaatgtagaacaataacaatcatgctggagtctgggttacatggaaaaaaaaaaacaaaacccagaggcgaacaaaaaca

SEQ ID NO: 619732 - DNA, 266 bp, Homo sapiens
cggttattgtggtgtaccgtcaagtctcttctccaagtcatgattttcttttctgaggagatgttcatttgtgctggatatagattccagttataagtgatctcatatggtattgtcttgtctttctggctcatttcccgcaggatgagattctctagttccatccatgttgctacaaatggcattatgtcattcttttttatggccctttcttctgttgcaacatgagtatctagacaaagttctcaatgctattcagcaggatc

SEQ ID NO: 619733 - DNA, 240 bp, Homo sapiens
gctgaggcaggtggatcactgaggtcaggagtttgagaccagcctgccaacatagccaaatcccctctctactaaaagtacaaaagttagcttggcgtggtggcgcactcctgtaatcccagctactcaggaggctgaggcaggagagtttctttacccccaggtggagagttcagtgagccagagttcaccactccactctgccttgggaacgagagtaaactctgtccttaaaaaaaa

SEQ ID NO: 619734 - DNA, 375 bp, Homo sapiens
tcaatagaatggagtaattagctgatcatgccaatcataaatgaagcactaaggtgtgttcccacccactctgcatctaagaatcacatgggtatctgagcagaatcttactggtcaaagcatctctaacagcacatgggtatctgagagcatcttactggtcacagcatctctaacagcacatgggtatctgagagcatcttactggtcacagcgttgggagcctgtggcttcctctgcatggaagtctgtgcatcatgtgtgtagagcctatggaagtcagaaaagggtgtcagattctctggaaatggagttatagttgtttacgagcctccggatgggtgctgggaactgaactctggtcttcgtcgacgc

SEQ ID NO: 619735 - DNA, 272 bp, Homo sapiens
  misc_feature (4)..(4): n is a, c, g, or t
  misc_feature (181)..(181): n is a, c, g, or t
ggangttgcccacatccacctttaaacacggggcttgcaacttagctcacacctgaccaatcagagagctcactaaaatgctaattaggcaaagacaggaggtaaagaaatagccaatcatctattgcctgagagcacagcaggagggacaatgatcgggatataaacccaagtcttcgancggcaacggcaacccctttgggtcccctccctttgtatgggagctctgttttcatgctatttcactctattaaatcttgcaactgcaaaaa

SEQ ID NO: 619736 - DNA, 258 bp, Homo sapiens
  misc_feature (258)..(258): n is a, c, g, or t
gctagaaccacaccgccttcgttgcctgtgctttgtcagttttggatcctattggaacgatcgcttgatactatcgtcgcacacgcagcagagtcagtacgaggacgaaaggcatccacccctctcccggggcattcatacaggcgcaggttcgctgaacggcagtagccaccaataatgagagtcctcaaggcacccaggttccttagtcggtgtattgtggaagtgacgatacatttcccagaacagatcatgatn

SEQ ID NO: 619737 - DNA, 102 bp, Homo sapiens
acgagtaagaagatttattttgaaaattagaccctatgtacaacagcctcaaatcaagattagctggcgctggagtctcatatctttagctttgtccgctgg

SEQ ID NO: 619738 - DNA, 199 bp, Homo sapiens
gtaacctggtgttgggggtagaggattttctcgtgctaggtagtaatgtgtccctaagctccagatggactcctggctcgagctgtggtcagaacagagctctgggtggcctccatgacttccttggctccatcaatagatcccttccttttgagatgttctccctcgaaatttttcccggacttctattccgcgactc

SEQ ID NO: 619739 - DNA, 195 bp, Homo sapiens
tagcagtattcggattcagggccggcagttttatgctctgggtaaaggtgtatcatagtagagatgtagtggatcatgttgacaatacgcgtggatctcgaattcctgaactcaggtgatccaccgaccttggtctcccaaagtgctgggtttacaggcgtgagccagcacacccagcaatttgtttattttttt

SEQ ID NO: 619740 - DNA, 565 bp, Homo sapiens
gaatccaatccaaggttcccaaatcggcccgcacatccgtccctttaagggtagcgctggggatggtttcgagtattcttttgcgataagtctgggagtatagtgagaaaggctttaacgccctgcagagagaaaaactttccctcgagcgagcggggctcctacagagtgccgcaagcggagtgttggctcatgtccgaactcttgcgactccgcgctagggttgcgatactagtaggggtagccggcttagtgtagggggttgagtgggatatgctattattgctacttctgcgtctaggtatttgatgaatgttgattcttatgtttcgatgtcgcttggataccgagaaaagtcctccctgttaagggaggctaggtgtgaaaggataccgaggatcctttaaagcccctcgcgggcctggtagctcctttagactgatctttgtttgtggctggtagttctactggttaagaccattgacggagaaaggaggacctccgcttaaggatgcccctttgaattttgagctttcacccaggttaggtatattttcgactctcc

SEQ ID NO: 619741 - DNA, 151 bp, Homo sapiens
ggcaggaggcacgcgcgcggctgaggcgaggtcgctcggcgcatctgttgcggggccatggcggggaccgcgctcaaagaggctgatggccggagtacaaaacaattaacactggaatcctccggaagggatttgtagcaggccccatgaa

SEQ ID NO: 619742 - DNA, 415 bp, Homo sapiens
atcagatccaggtgaagtcaaatacttacatgtgaaaggtaatacagtaaatgattgaaaataaaatatgggagaatataagcttggatagaggaagattttaataaataggactcaatattattcattaatgttaatatcgacacatttagatacattaaaacctgtcttcattaaatgatttcataacgaaaatagaaaggttctcacggcatggaagaagaaatatgaaatgaaaataatcatcaaaaggtttgtataaagaccctatgcaaggttcctacaaagtattaagagaaaaagaaagtcaatagaaaagtggtttgtagattagttgcagtagtggccctggccattcatttcctcctttatccatactttttgtgactttgcagtaactctcatcaaaaggtag

SEQ ID NO: 619743 - DNA, 175 bp, Homo sapiens
agaaaaggttagctgccatgtggaatctgaaatcatatcaatgaactttcatgtcctgatgcattacgacacattgacctgtcttgcaccctgaatggaacttttacccagatgtgattcttaacatctgcattgttgtttggaaaataacagttcactggatgataaaaaaaaa

SEQ ID NO: 619744 - DNA, 189 bp, Homo sapiens
tggtatgtgcagtgcagctttatctgtggctgaaggtcggagccctggtgtaggtccaagagtccaaaagctgaagacttggagtctgatgttcgagggcaggtagcatccagtaatggagaaagatggaggccagaagacttagccagtctagcccttccatgttcctctgctcgctttgatcctatc

SEQ ID NO: 619745 - DNA, 505 bp, Homo sapiens
gtgtggcaggcagaataatggtccactgaagatgtccatgtcttaatccctggaacctgtgaatatgtcaccttagttggctagagggactttgcagttgtgatgaagcttaagcattttgagatgaggtgattatgctgagtaatcctgtgggcccagtgtaaacatgagttcttaagagctacagtcagagccgggtgtggtggctgacgcctgtaatcccaacactttgcgaggccaaggcgggttgattgcttgagcctgggagtttgagaccagcctggtcaacatggcaaaaccccatctctaccaaaaaaaaaaaaaaaaaaattcaaaagttaactaggcatggccagacctagtggtgcctataatcccagctacttgggaggctgaagtgggaggatcacctgagcctgggaggcagaggtgcagaggttccaatgagctgagattacaccactgcactccagcctgagttgtaacagagtgagaccctgtctca

SEQ ID NO: 619746 - DNA, 430 bp, Homo sapiens
acataggctgctaggctgcatgcttgcacggagaccttgccctctgagccaggctggccgtctggaggacagattcccagccactacgctgctggcttcaggctggcacatttacaatgcaaatctcttcaagtgatccccctgcctctgcctcccaaagtaccggggctataggcatgaaccattgcacctggccaattttattcttttttaaggccgagtagtgttccattatgtatatgtaccacattttcttcaacgtccattgttggatagttggtggattccatatcttggctattgtgaatcgtgctacagtgagcatgggtgtgcatggcaggattgctggagcccaggaggtcaacgctgcagtgagccgtgatcataccactgcactccagcctgggtcgacagtgagaccctgtctcag

SEQ ID NO: 619747 - DNA, 204 bp, Homo sapiens
aggctttatcaacctcagctcagagtcacttcctccaggaagccttccccagctcccttacaatatgtcctctgcttcttctctgtgttctacatgacgaccccattggagtcatgtttcattcaagtttatacactccaatgttttacacacagtagatgctcaagaaaggtttcttgttgaataaagaaacagtatggctta

SEQ ID NO: 619748 - DNA, 325 bp, Homo sapiens
actgcaagctgcaagctgccccttgggtgaatggggactgagtgggaatgtctgggtggttaaccccttttgacatgcagtggccctacagggaaccctcaacaaaattagttttaaaagactcattcaagaaatgcatatagagctgttcacttggcatttttagccctctcagaggtgatagacctctgaagagagaaactgagacacataagagcgtggaaatgactcattggtaaaacactgcagtctcacccaaaatcagcacacattgatctgcaacacaaaaaaaccctaggccacagctccattcctccttttaaga

SEQ ID NO: 619749 - DNA, 641 bp, Homo sapiens
aggcgggaggttgagcgcgtccgcgggctgggaggccgctggtacccgggggcatggctctcccccggagcaggttatcgttccttggcctggactcttggaggtcttcggtaagaactggcgttcctcttgtctaagcggccgagctttcggcgcgttcgccctgacgcccaggcccggggaggccgtcactcagaaactgctccagtccgagtccgccgcctcggagatgccgagagcctggtcctgccctctgcccccggccccttcctagactcgctacttcaggtcactaaaggcgccctcccaccagtttgacttctgttctgcgctctgcgccccgcgtctgtgcctctccgtaatgccggttccctggccatgtctttagagtttcgctccccgtcaaaccctcggggcagcgcggctgtcggtgtcgagccttggcacctccactgtgccaggtggaggcgcctggagtcccacgtgacgtaccgggcgagcagcacgctatgagaccgcgtcgatgggcggccgaccgacgtcatggcgatggcttgcggaacactccacctgacagggaagtccatggcgaaggacacagcggggcatctgtcagggttgacaagaggacggcacgactg

SEQ ID NO: 619750 - DNA, 392 bp, Homo sapiens
gggaatcgagtggcatgtgatctcattgttcaattcccacctatgagtgagaatatgcggtgttggtttttgttcttgcgatagtttccagagaatgatgatttccaatttcatccatgtccctacaaaggacatgaactcatcattttttatggctgcatagtattccatggtgtatatgtgccacattttcttaatccagtctatcattgttggacatttgggttggttcaagttacaagaaaaaaacaaacaaccccatcaaaaagtgggcaaaggacatgaacagacacttctcaaaagaagacatttatgcagccaaaaaacacatgaaaaaatgctcatcatcacatggccactcaataccggtattgagtggccatgtgagactc

SEQ ID NO: 619751 - DNA, 133 bp, Homo sapiens
gagtctcacgatccctatcaccctaaatttattatggcagcctgagtgggctgctctcgtattcaaacatgctttgtctcaggcgtttgacgtatgtatgcatttggttagctggcgattttgtataaggtgt

SEQ ID NO: 619752 - DNA, 209 bp, Homo sapiens
ccgatactatggcctctacgtgatagtgtaccacacgcgcgtggccgagacacactcacatgcgatgacggctcgctctgataccgaacaggttaggcaatctgtgcctgagacaaccgcacctctgtcgtagtgtttcacccagtccagctgttgattgccaggctgccacggatggtcgccacctatctggcctatgcgcagcgtgc

SEQ ID NO: 619753 - DNA, 823 bp, Homo sapiens
gatacaaatggttggccggacattggagggcccatagggaatcctcttgtgtaggtggcctgcgttctatgttggtgggaagtgggtactggggtgacgtccctgcattctgcctgtgccttttccctggcggctctcttttcgtgatacgtcttgtcgagcggagatgggcccgaggcaaggggccataccctaggacgcggctgctgtagttgccacgtctatgcggagagcagtccggagctgggtgctggggaaacggcggggccggcttagcctccgcgcgcgcactctggtgtgttcgggccctggtaggagggctcgcaggcgttagctaggcatttgtcgtcacgttttgcctgtttgcactatttctttttgtaagcatttggacctgtgtgaacgtatttcgagtctcctccttgctctgacactcttcaccgcgattccattgtctgataaggcgcagcgagagcagacactggtctgatcgggtacagtcgggtaactcactttacttaaatagtattggctgtttacactgctattatgtagtcctattgggcaccagtacctccaagtccgattcctcggaagtgtaaacactgcgtgacatgcaccactctgctcttaattcgcgcattgctatagatgcagtcgactcattcaattaggcaccccaatgggcacatcccgagtggaagacccgtatcacaatacttggagaactcgcaagcgggcacaacaatctgacccatggcctgtccaaaggcaactcttgctgcaaataagggcgccagggtataaggctagggacgcccca

SEQ ID NO: 619754 - DNA, 381 bp, Homo sapiens
  misc_feature (1)..(1): n is a, c, g, or t
  misc_feature (18)..(18): n is a, c, g, or t
  misc_feature (53)..(53): n is a, c, g, or t
  misc_feature (75)..(76): n is a, c, g, or t
  misc_feature (134)..(134): n is a, c, g, or t
  misc_feature (197)..(197): n is a, c, g, or t
  misc_feature (208)..(208): n is a, c, g, or t
  misc_feature (319)..(319): n is a, c, g, or t
ntccggccgatcaggttntattgacggcagaagaaaattcttcctttcacttntaaaaggggtttgcttaatttnngtaggggtttttccattctttgtgtgagttgactgtgttttccaccctaaaatctgtnttttctttcttcaaataataatatccaccacagctacttattctgaaaagaaagtggaagggntgtcaacaggnttccaccaggggggggggggcctggctcgtttcttcacaaagagtctacttttcctattagttccgagcccggggtgggtgggaaaactgtggggttgggcgagtggatcntcttggctggccatcacctcccctacggaactccagagtttgatcgtaggtgccttcttcct

SEQ ID NO: 619755 - DNA, 922 bp, Homo sapiens
  misc_feature (22)..(22): n is a, c, g, or t
  misc_feature (75)..(75): n is a, c, g, or t
  misc_feature (85)..(85): n is a, c, g, or t
  misc_feature (133)..(133): n is a, c, g, or t
  misc_feature (144)..(144): n is a, c, g, or t
  misc_feature (210)..(210): n is a, c, g, or t
  misc_feature (282)..(282): n is a, c, g, or t
  misc_feature (296)..(296): n is a, c, g, or t
  misc_feature (298)..(298): n is a, c, g, or t
  misc_feature (314)..(314): n is a, c, g, or t
  misc_feature (345)..(345): n is a, c, g, or t
  misc_feature (414)..(414): n is a, c, g, or t
  misc_feature (445)..(446): n is a, c, g, or t
  misc_feature (452)..(452): n is a, c, g, or t
  misc_feature (456)..(456): n is a, c, g, or t
  misc_feature (487)..(487): n is a, c, g, or t
  misc_feature (532)..(532): n is a, c, g, or t
  misc_feature (536)..(536): n is a, c, g, or t
  misc_feature (630)..(630): n is a, c, g, or t
  misc_feature (787)..(787): n is a, c, g, or t
  misc_feature (844)..(844): n is a, c, g, or t
ggaggcagagccacggcaaganccctgccaggtctgtgctgggccaaccaccaccacataaggcacccacggccngtgcagctcngaaggcaggcgagagccaggctgagggggagagaagagaggcggcctnattcccctggncggctccttgggcagcagatgaagcagctctgtggaaggttctgctgctgaagatgccctgggaanactcctcctgggcctgctggcagctggcccctgtccgtcggtagagggagtgcacccgctgcaggaggcagnctgcgagcccggcncngcgggtgacgacgccngccacaaccatcatgatgactgatatggccngggaatgattatccagtgtagacagggctgcaatccaaccgctgtcccccaggccagggatgccaaccnactggatgatgtagatccctatttgacaaannaatacnaagnagaccaccaagaagctgccagcgttgtcggncctccaggccttctcgatgggtcggtaccaacacaggacggcacngggngtgaagctccgccaccaccggctggcgaggcccaagtccactcccttggagctgttgcccgagaaccaggccaggcaggcaagcaggttcaganacagagtcactgaatgcaacatccacagatagtagagcatcttgcatatccgctggtagtcggcagggatctctgtggagaaatcctgatagaagcagggcttcacagggcaccacgagggcagagggggccagttgttctgtctcacatgcaagtnggctacagtgttctgcagctcccgctccttgcgttccagctcggcagctttcctgtncagttcttcctgctgccggagcaggcctgcctgggctgcagacaccacggcctggggggtcggctgggttggttcact

SEQ ID NO: 619756 - DNA, 250 bp, Homo sapiens
actatatactaatactgagcaatcggaaaaacaaatctacaatagccacccccccgccacgtgaaatatcgttgagacccattcatggatctcaaatccaaaaatgtgaaatgctcaaaacctaaaactttttgagcgctgaaatgactatcaaaggaaactacctcactttacagcacttctggactcttacgacgttgggatgctcccgtacactactttgcttcacggtccagcacactacttaacc

SEQ ID NO: 619757 - DNA, 1088 bp, Homo sapiens
ccacgcgtacgtgtggagccacatggcgacgatgaagtttcagtgggacctcaatgcctggatcaagagtgccgaggccttaggcaagattgtggcagagcgtcctgtcactaactctaacaggccctgtacctcatggcgccctccaacgacgccccagggcccctgagcaagcagggctcatggcagctagccagcccatggaggtgcaggaaggctatggcatttgggtcaggagatgatccctactcaatgtgcagagccccatgtgtcaggtgtgaaacggtcccgctcaggtgagggcgaggtgatgcggcttatgcgcaaggtgccacggagtgagccttgaacgcctggtacctggatcctcaacagttgacagccagcgcacccgatcttcaaggtacttcccaggcagtaccactgaggactacaagccttattgttcttgaacgtggcgctgcctgctgcagctaccggtcagccagggactgcgcctgcaaggaacccctggtgacccaaccctggctggcatggccatagtcaatgcaggaggagacggaggctagcattggagccctcctactgccactgagggccctgagaccatatctgtgctcatggctcattgcggagggtcctggtgctgagaggtcccgactggctcacttagtggcagcaccagctcaaggctggaacgttgtgcatctagagggtacgtcagcccaggagtgtggccggggaacccgtgatgaacattgccaccattggcaagtctgcaaagccaagggaacacggtaaaggtcacccaaagtaatcaggtacactgacggccactcacgcctgaggattcaaggcacacagtgtacggcaccccgccactgcacggaaccacgaccggaaggcaaaccgcccgccaggcaccaacacgggcgcggcaaaacacaccacaaccgaaggaagagtaacaacagagaagcgcagcacaccgggaccacaccagaaggcacagcaagaaaagaccaaaaacaacaccaagagagccagcaacaacagacccgcaaaccaaacgaagccacgagaaacaa

SEQ ID NO: 619758 - DNA, 151 bp, Homo sapiens
caacggagactttactcccatgacgtctcagactggcacaactttttgtcagctaagaccgctgctttccagtcctaattctgttctggtagatgttttaagtatttcatttttgttttgtttctagtgcgcctgtactgtgctctgaggt

SEQ ID NO: 619759 - DNA, 381 bp, Homo sapiens
gaggctgagacgggggagatcactcgagctcagaagttccagaccagcctgggctacacggcgaaactctatctctacaaaaatacaaaaattggctgggaaccggtggcgcgagcctgtagcacaagctactcggaaagctgagatggtaggattgccagggcccaggaggcagaggctgcagtgagccaagattgtgtcactgtactccagcctgtattaaaagaaaaaaagaaaaagaaaagaaactgaatagaaagcccagaaatggacccacacaaatatattcaactgatctttgacaaagaagcaaaggcaattcaatggagaaaggacagtcttttcaacaaatgatgctggaacaattaggtgttcatatgc

SEQ ID NO: 619760 - DNA, 1017 bp, Homo sapiens
  misc_feature (1)..(1): n is a, c, g, or t
  misc_feature (825)..(825): n is a, c, g, or t
nttgtgtttctgtttataagacagatagacgagcgacggagcaaggcaaattgagagagaagagagaacgaagaaaggacagtagtaggcaacgcacatactcagctgcaacttggtgtgtatctatattgattgacgtacacctgtacgtggtctgtgggtctgtcaaccggctgttgtcgttcataacaacgtctcgtgaatctgtatatgccggcctcagcctttgtttatctataaccgggtattgatctcttgttggctccaggaagataatggtttgtgtgccagcgtaaacattgttgagctgcacgggtcgtgtttactgtggtctcgttgctttctgttccgatcgagcccgtgcgtgggagcacacctgcacttggcgcacatggcggtacaaccacagaaggtggcgcgcctccccgcgaactgtgtgcgcgtgttgggccacagcatatcgtctgtcgccgatttaatccggtcctgtcaacaacccaggagcccatgtggggtggtgtatgccccaaagacgacgcgtgggtcgccttagtcgacaggcggccattctaacaactgtccagttcgcccattcgtactcgcgagtttcccctcttggtaaatcttccacacggagtgttcaaacacgcagtgctattacctaggggagatttgttcaccatcccatgccaagaaggcgtacctagatcaaactgcactgtccccccaccagttaacccacggtgctcccacactgttcaatacaatacgaggaccactggacaggtgttggtgacggcaaacgatgagggcgtcccggtcttnctttgccacaactctcataagagcagtgctgctacaagttggtgaactccacgcgagagtagttcatactgaggttacgcgatcgtcgggaggtacgacccaacgggtggcaccgacaataagtcggttggccctactatgagtgggttttccgcccttcataacaaaggggtaaaaaacgaccggcaagca

SEQ ID NO: 619761 - DNA, 168 bp, Homo sapiens
tataagtgtgaagaatgtggcaaaagctttattctgtcctctcatcttactacacataagataattcatactggagagaaaccctacaaatgtaaagaatgtggcaaagcttttaaccagtcctcaacccttatgaaacataagataattcatactggagagaaaccc

SEQ ID NO: 619762 - DNA, 634 bp, Homo sapiens
gctgagaatttgtacttcacaggatactacatttttcagttaatggtaaccctgcatcaagcaagtctattggcaccatttttccaacagtatgtgcttacttcatgtctctgtgccatattttggtaatcttcacaatatttcaaaccttttcattattgtatctcttatggtaacctgtgatcattaatctttgttgttactactgtaattattttggggcaccatgaaccacgcccacataggatggcaaacttaaccaataaatgcatgtattctgacggctcaaccaacgggctgttcccccatctctctccctttccttgggtctctctattccctgagacaaaacagtattgaaattaggccaatgaataaccttccagtgacttctgcagtgttcaagtagagcaaagatccacacgtctctcactggaaatcaaaaactagaaatgattaagcttagtgaggaaggcatgtcaaaagctgagatcagccaaaagctaggcctcttgcaccacttaggcttagttgccaatgcaaagcaacgtttcttgaaggtcattagaagtgctactccagtgaacacaggacttagaagaaagcagaatagccttattgctgatatgcagaa

SEQ ID NO: 619763 - DNA, 156 bp, Homo sapiens
aggcagctcaatattaatgagacagtttgaccaagtcactcctgctacctaggcaaaaaggaatctagtgaccatgtataatgagaccatgtaagatcctttttctattgtgattcagaacacatctataaaataccatgtacgacttcaccctgc

SEQ ID NO: 619764 - DNA, 629 bp, Homo sapiens
ggtgagcctcacgcctgtagtcccagcacttggggagggcgaggagggtggatcacgaggtcgagagatggagaccatcctgaccaacatggtgaaaccctgtctctgctgggaatgcagaaattggctgggcatggtggcgtgagcctgtggtcctagctactcgggaggctgaggcaggagaatagcctgaacctgggaatcggaggttgcagagccaggatcgccccactgcactccagcctggcaatagaccgagactccgtctccaaaaaaaaaaaaaattaccaattttaatttctttaaacttattttaaggataagtaaaggtatataaaacggggtttgggaccaaaattatctcggagtccggggtatttcgcaggtcaaaattttaaacctgtagaatcacattaaggtggtgggaaaaaattggtctgaaagatttggcataattggttaccagaatgagggtatctagggattgagaccagaaggtctagataaatactctatgttacattttaaaccttttattataagtctacattaaaccatttgggtaactctctaccaattgtgacggataaatcgtcaaggggaaatgaggctttaataatgaatatgac

SEQ ID NO: 619765 - DNA, 146 bp, Homo sapiens
gctggctgcaccacccaaaggcagcaagggggccgctgttgagcatgttcagcagcgtggcttcgctggctcccactttgtctccagtcttgatcagctgcacatcactcaggctttcaatggtgcccctgaagatttgttggtgg

SEQ ID NO: 619766 - DNA, 157 bp, Homo sapiens
  misc_feature (44)..(44): n is a, c, g, or t
  misc_feature (49)..(49): n is a, c, g, or t
  misc_feature (93)..(93): n is a, c, g, or t
  misc_feature (134)..(134): n is a, c, g, or t
caagcgcaccaccaccatgcaggtccctccacggggcgccctgnccgantctccgttcgtttgaagaccgaggcccctttctacccgacccgncacatccctgcccctcaaatcacaggcctgattgtccccangcgcgcgctccgggttgggctac

SEQ ID NO: 619767 - DNA, 839 bp, Homo sapiens
  misc_feature (448)..(448): n is a, c, g, or t
tggtccgaatttttgacaaggctgcggtgtctgcggtattctccgagtttcgaaatgccgcctaaggacaaaaaaaaaaaaaggacgctggaaatgtcggccaagaaagacaaagacccagtgaacaatatccgggggcagggccaaaaagaagaatgtttgtccaagggcaaatgttcgggacaagctcaataatcttagtcttgtttggacaaagtctacctatgataacactctgtagaggaagttcccaattataaactttataaccccgagtgtggtggctctctgagaagaactgaagaattcgaggctctccctgtggccgagggcagccctttcgaggagctcctttagtaagggcacttatcaaactgtggctttcaaagcacgagagtctcagagtatatttacacccagaaatataccagaggggggagaatgtctnccagtctgcgtggtgaacagtatgccttgaaatgaggtccaaccagtctgtcactttggggaacaatatcaaactcttttattacaactctcacaaaaaaaaacaaaaacaaacaaattccgcagaggacaatcaatgtggcgcggggtgcgcggaacaacagacgacgggctacacgaagaacaggcggcgcccacgtgtggccccaaacagcggttgattccctgaggaaccccagactcttttttctgtggtccaaccacacggctggggacaaaaacatggccagggggtccccccacatatgagggaaagcccgcaatataaaaattgtgccagaaaaacgcccggtggttacccccggcttaatacacggcagccgacacaacgc

SEQ ID NO: 619768 - DNA, 390 bp, Homo sapiens
  misc_feature (302)..(302): n is a, c, g, or t
  misc_feature (374)..(374): n is a, c, g, or t
ttgcctctagtgtcctccgctgcgggaaaaagaaggtctggttggatcccaatgagaccaatgaaatcgccaatgccaactcccgtcagcagatcaggaagctgatcaaggatgggctgatcatccgcaagcctgtgactgtccattcccgggctcgttgccggaaaaacaccctggcccgacggaagggcaggcatatgggcatagggaagaggaagggtactgccaatgctcggatgcctgagaaggtgacctggatgagaaggatgaggatcctgcgccggcttctcaaggagataccngggaatccaagaagattgaccgccattatgtatcacagcctgtacctgaaggtcaaagggaatgtgttcaanaacaagcgcatccttc

SEQ ID NO: 619769 - DNA, 132 bp, Homo sapiens
cacgatgatggcctctgatcgaagcgggcgttcatgggcggccagggttgagtctcgggtcggggcctgtggattgtcggtgcatcacggccgatggctggggctggcggggccgctcgctgcctctcgctc

SEQ ID NO: 619770 - DNA, 238 bp, Homo sapiens
  misc_feature (3)..(3): n is a, c, g, or t
ttntccaactaatacatttactatgaaaaagcttcctggccctacacactagctctatgtctatgacacatctcactccctatatataacagcaagtattcccccacaatcatagaaatatgtctgctacaagcgttactttgctagagtacaaaaatagaggatcaacaccctcttctttctagaacactaggactcgacacctaaaactgagaattcacaaaatctccgtgcgtac

SEQ ID NO: 619771 - DNA, 163 bp, Homo sapiens
  misc_feature (97)..(97): n is a, c, g, or t
aggaaatgttgtttggaagccttgctagacctggccatcctatgggaaaatttttttggggaaatgctgagacgctcaagcatgagccaagaaagantaatattgatacacatgctagattgagaagaattctggatgcgttactactcttctcattacatga

SEQ ID NO: 619772 - DNA, 996 bp, Homo sapiens
  misc_feature (33)..(33): n is a, c, g, or t
  misc_feature (66)..(66): n is a, c, g, or t
  misc_feature (85)..(85): n is a, c, g, or t
  misc_feature (89)..(89): n is a, c, g, or t
  misc_feature (99)..(99): n is a, c, g, or t
  misc_feature (101)..(102): n is a, c, g, or t
  misc_feature (139)..(139): n is a, c, g, or t
  misc_feature (143)..(143): n is a, c, g, or t
  misc_feature (188)..(190): n is a, c, g, or t
  misc_feature (193)..(193): n is a, c, g, or t
  misc_feature (221)..(221): n is a, c, g, or t
  misc_feature (277)..(277): n is a, c, g, or t
  misc_feature (301)..(301): n is a, c, g, or t
  misc_feature (313)..(313): n is a, c, g, or t
  misc_feature (357)..(357): n is a, c, g, or t
  misc_feature (406)..(406): n is a, c, g, or t
  misc_feature (457)..(457): n is a, c, g, or t
  misc_feature (508)..(508): n is a, c, g, or t
  misc_feature (511)..(511): n is a, c, g, or t
  misc_feature (525)..(525): n is a, c, g, or t
  misc_feature (545)..(545): n is a, c, g, or t
  misc_feature (547)..(547): n is a, c, g, or t
  misc_feature (854)..(854): n is a, c, g, or t
  misc_feature (915)..(915): n is a, c, g, or t
  misc_feature (957)..(957): n is a, c, g, or t
tatctaaaattcaagaaattaaattatttaatntaatccatcaacctctcatagcaaatatttganaaaacaaatttatattcanattnttattttcantnnggaagtaagaagttgcagctcagtacacgtaaagttnaganagagatggagacatccagcccacttctctggaacaggaaagatgnnnggngagggaacacaggtcagtgtggggacangggtcacggtggacacgggggtgggctgtctctccacctcctcacattatgctaanaggaacgcagacacattcagatgnctttgcagaaanagatgccataggctcttgaagtcacaaaggagaggtgtgaatanatcctgcatctcagtcccacacaggcagctgtctcaggctttacaatcnatgagagactcatcatatccctgggcactgttgctggacgcagcctgatancagctccctccttttccacctgagctcttcctcctacacatcacaacagcnatnacagctcctagganagctaggacagccaggatancnaggccagcaacgatgcccacgatggggatggtgggctgggaagatggctcccatctcagggtgaggggctctggcagcccctcgtgctgcacatggcacgtgtatctctgctcttctccagaaggcaccaccacagctgcccacttctggaaggttccatctcctgctggcctggtctccacaagctcggtgtcctgagtttggtcctcgccatcccgctgccaggtcagtgtgatctccgcagggtagaagcccagggcccagcacctcagggtggcctcatggtcagagacgggatggtgggtcngtgtgtctttgggtgttcgcgcgctgcaggtctccttcccgttctccaggtatctgcggancactccacgcacgtgcctccaggtaggctctccactgctcgnctcacgggccgcttccacttgcgctgggtgatctgagcg

SEQ ID NO: 619773 - DNA, 548 bp, Homo sapiens
acagttacgcaacagcatactaacacagctgctatagtcccggatgtgcaattgttaaagtgtcatgactagatgaacacagcttgtcaggaacgaacactagaacgatttgagtagaggctgctgctcaccttttgtgacctgaggaatcccatgcctgttttaaattcttaaccgcacaatgcagcacatgagtgccagaaatagcactgaatcaagaaaatagccattgcggagatgccctcttgagtctttctgtccatcccattctattctgtactgtgactacagttcaggaagtatggtaaggggtcttaaataagaggaaagagcaagtttgctcagtcaagtgatcagatcacgaatctagatccccagttctaaggccttatcacctcccctgcccataggccaacaaccatagttcctcacattagtgattagcagactctttgtggacgagtgaatttcacaaacagcacaatttcagaagaaatcgagggcacaggccctcacttttcttcttttgacgcatcctcctgtgatgt

SEQ ID NO: 619774 - DNA, 303 bp, Homo sapiens
cgatctagaggtcccgtggggagagggggtctcactcatttgctgggacagggagtaaaatccactccacttggcaccccccgggccggggcaggtgacggcttgggcccctgaccggggagacactaagagctcacactggtggggcacctctgggagctggacgggggagattctcctggaatcctgcggctcccgctggggtctgggacaccctggtggctccccggatcacagggatgggcttacacacttcttccggtggtcctggggcccttggcactggattcacattctagaagg

SEQ ID NO: 619775 - DNA, 402 bp, Homo sapiens
ctttccattttttattaattgcagcacagagaaaagaggcttaatggttaaagaaatttatgttttttaaacagggtgttggctttacaccagcgttgaagaaaaacagatgaataagctttcgagcttcatttggtttctcttattctcatgggaggctgagatgcttttaaatgtgatgctataagcctaatggagtttgacttgtagcaacaagttttttaccctccttgggaaagcacgtctgcttatcgggagccttgcatctcttctctacaaaagctgtgaaatcattcataacagctttcacctgctcttttgctgccttgggcttgtgtttcacgagctcaacaagtgcattttgggtcttgataagcctgtccttctcagaaactggtgccc

SEQ ID NO: 619776 - DNA, 277 bp, Homo sapiens
tgtggtcgtctctagcacgatcccctgacgagcgcctctcttgaatacaggattaaccaacgaagacgactccctgaccatctttggcggtggcagagcgggaccaggcagttacacgctcctctcggccaggctcggtcagctccaggtcccggggccggtctggccgtcctagcacggtgaggtaggccttggcccaggtcttggtctagctcggtgctcagtcctcggggccgtgtctggagggcaccttcagacttccgcgcgcctggctctg

SEQ ID NO: 619777 - DNA, 207 bp, Homo sapiens
tcgacagtacttcgttggactacgtcgggcaacaattatcgtgcactcggatcttgacagaagatgtctggagtctcggcgatgtgcagcaacaagttcgtccacactgacatcaagaagtgtttggaccctcggcgtgtgcagcaagaacttcgtccattgtgatctttccaccaacagtcaatgtgtggtgcctcggagtgtgca

SEQ ID NO: 619778 - DNA, 921 bp, Homo sapiens
  misc_feature (825)..(825): n is a, c, g, or t
tggcttcaaaaagttttttttccattgggcccaaggtgggtaaggatagttaaaaaagttgcctatgggtctgggagggaaaggtttaggaaaaagcctctataatttggaagggggcccttcaaaagttcgctgtgggctctcagaagaggctcttagctcggtgctgtgaagaagttgagccattctcgaaaaaaatacgtcgcccagcccagccctcgcgggccacccagccgtggtgggaggtgggctcagggtggctccacccaatctctctggaataagcttcactctcctcatctaggaaaaggtaagttcctccgaggaaagtatcacagaagcagtggggtgtctccgagcgcggagtacagacaacccagggcacatgtgaaaaactccaacagggggcaccgtggtatctcagccgtcttgttctctccaggggcccagtggcacagcacttaacagtgaggcgtatcgtggggaattttaaaccccaccttcatctctctcgagcgcgtggcctctcgtagaagtgtctcacgtggaagacaaatacgcgcgcggcgggacccacgcgtggatcacgagcaactctctcgagggaagaagcggcctcgtataagccccgtcacgagcgcctcacctctatgaacatagcggagcgcgacctaaaaaaagtcccggcgctggtacaagaaaggcaacccaagcctctctccctcgctacgcgtggtcaccgacgcaatgacaacatacgcggcagaccgccacaacggacagcacacccatgtcgcttgaagtggctcacccccccgaccccancggtgcgcccagccgcgggctgtcccccaaatgggggcacacgccccgccgggcgaaccctcaaacaggccggaaccacgggatcacgacccgagg

SEQ ID NO: 619779 - DNA, 1329 bp, Homo sapiens
  misc_feature (209)..(209): n is a, c, g, or t
  misc_feature (301)..(301): n is a, c, g, or t
  misc_feature (457)..(457): n is a, c, g, or t
gataccaaggacgcgtgggagcacagataattccgtagacctgtgccgatgaacagactgttccatggcatgcttgcgtgcgtgcctgcttgctatatgtccttggcagcgtccgacggctaggcagacgcgcgcgcgtaggctagggaactaggatccacgcctgccttcctccggtccttgggacgctaggcacgtcaccgatactnttcacggccatgtacatcgctggctaagccttgctatagcgccatcgcgagcattcaaacggctccattgccgactatcggtggtctctgtngcgcacgtgcccccaagacaagcgcattccccgaaagcaaatcactgcacactgccggcgttcgacattcttgcgacttccatttgcgtggagctccctcggggctagcaagtgctcaatcctaatactcgcgagcattcccgtcaacgacggagncgaattgaggccctcgctatttccctaggggttcgcaaagcccaacgaaagtgtgggtcgcctccaccacccttgtggtacggtcattcatgcgccctcgtcatgttcctttgaggaaaattctcggaatttgctcgaaaagcttgtttcctagcccttgttgatggtcccccccaagggcctggtgggctcgggggtgttcgtcgcttgagcttcccgagatgaaccaccacgttttccacatttaggtcgaacccctacacgtggaatgcattcctggacaagggtgcctgcacccatggcatgaacaaaaggtctattccggaaagcgtgtcctgcctataccacaaggcaaattttcttttttttacctccgcggcacgtttgcatttttaccccggggaaaggatcactcataaggaaacacccgaaagatatcaccagcgtttgtgttattcaccctttggagactccgggcgggggccggtaaaggcaaagccttataattttgcccttggcgccgaatacttcaaacgattactcgcccccagaaccccttagttgcccacacgctagtccgtttgagctaaccaactttagcgaaagacgcgatatttcgcctcgcgaaagtgtcaacttgagataagaatcgcgtgtttacccaaataggtggggaccttgtgccgaacataaggattgttggggcaccagaataaggggaaccgttccctttcccctttgccctcttaattgaaaaatctcccagagagaaactttggataccgagaacctttgtcgccccgttggtggggttcctgtaaaacttctctgtttggggccgcgctttaaacctaaaaggcccacacatttgg

SEQ ID NO: 619780 - DNA, 226 bp, Homo sapiens
atcgagccgctccggttaaggctgcagtgcaagtccacaatctcaaaagtaggaagccagcagtgcagccttcagtctgtggtcaaaggtccaagagtcccaaagctgaagaacttggagtctattgtttgagggcatgaaagcacccagcacagaagaaagatgtaggctggaagactaagccagtctagtctttccatgttcctctgcctgcttttatcctagc

SEQ ID NO: 619781 - DNA, 235 bp, Homo sapiens
tagctttagactactatcattacctttaggggggggaggagggagtaatacactgggggtaacgggtttaagagtggtgtgttcagctgaacctcctaaatataaaggctagaaacaaaattaacttcccacatccccccctaaggtgatcttaaggactttcagagaagtttccctttgggcatgtgttttcacagatgatgaaggagcaactcccaaaaaaggggcggccgct

SEQ ID NO: 619782 - DNA, 281 bp, Homo sapiens
tgctcagcggactaatggacagcaagcgattactgtgtttccagaaaaggcgggcacaacccccaaatgctgcttaggactccattgtcaccatggtcttgatgtcgctcactaacatgaggtcacacaggcaagaaaaggacagaggcagagacagaatcctgaggacaggtgtggcctccagtctccggtcttgggccccacacaccctgagccacaaatcctttttccttgagaaataggatcgtacatagaatcttcttatacattcatatggttgt

SEQ ID NO: 619783 - DNA, 344 bp, Homo sapiens
gccgtgagccctgatcgtcgggcccatcctcagcgcagtacctggaagaaaagtctgacagcaaagaaggaggagctgctgaatgccatggtggcaaaacatggggaaccgggaggacccaatcccccaggactcctttgaaggcgtggacgaggacgagtgggactagcctgagaccacgtaacctccactcaactgtgctgccacttccatagtgcaaacatcacggtcatcctcaagctggaagatacctcatctggcaccaggacacctgtaacgcctgacactcctgccattacccgatgggaacttaccaattcatctgggcgctcaggcaagttaca

SEQ ID NO: 619784 - DNA, 117 bp, Homo sapiens
aactcttccttggacttcaaccttagctgggcgctgtagccgcagcaggagcagctgtggtggctgcagccacaggggcagtctgccacaaaggcagatggatcagccaagcaaggc

SEQ ID NO: 619785 - DNA, 570 bp, Homo sapiens
  misc_feature (41)..(41): n is a, c, g, or t
tgctcccatcacggtattactcgacaataccagagacgaangaacttgatttaagaacaggacaatgaccttaacggacacctcactaaagaagatataaagatggcgagtatgcatatgaaaaaaagtcacataatcaggaaaatgcaaattaaaacaataccactacacacctattagaatggccaaaacccattaacaatgacaatatcaaatgctggtgagaatgtgaacagaaactcccattcattactggtgggaatataaaatggtaccatcactttgaaagacagtttagaggtttcttgcaaaactaaaggtattcttaccatatgatccagcaactgtgttccttgctatttacccaaacgaactgaaaacttatgtccacacaaaagacacgcacacagatgtttgatgtttatagcagctttattcacgattgccaaaactagggagcaaccaagatgtccttcagcaagtaaatggacaaataaacccgggtatatccagataatagaatagtcaagtgcaaaagaaaaaaaaaagctgtcaaaccgtgaaaagcca

SEQ ID NO: 619786 - DNA, 124 bp, Homo sapiens
atccacttcgggagcaagtgtgttaattttccttttcattacaggaaagattagcgtttcattgcacacactatgtccatcttagcccatcttggaataccgatgctcgatacttcgtaatctt

SEQ ID NO: 619787 - DNA, 454 bp, Homo sapiens
  misc_feature (4)..(4): n is a, c, g, or t
  misc_feature (255)..(255): n is a, c, g, or t
  misc_feature (363)..(363): n is a, c, g, or t
  misc_feature (438)..(438): n is a, c, g, or t
ccantttatacttcaacaaatgcaatgcagaagaaagagtatttatcttttttcccttcatgatcgcaacagaaatagttttagaatgtggatctaggccaacactcacccagagaaaggaagaggactggggcaaagggatctctgggtaggtggctgtgtgtttggatttccagtgcagaacctctcttgtggctattttggggtcctgagacatccacttatgtgaccctgtcagcagcccccctgggaaantacgaaggcaagggggacaaagggaaagggagagctatggggggcacttttggcatccctccattagtgttgatccagagaggggagatgcttaaaggttaacccctntagttttgcctcccaagcattactgttacatcgagggttgattaaataaggcctccaagattaggcttttaggtngggagaggttgcacgg

SEQ ID NO: 619788 - DNA, 177 bp, Homo sapiens
cggaagagtccaaatcctaattcttcagagagtcagatatttgcgtggaggtgagtcccagcagtcggtggcgttcacaaggcttccaggtgattcttaacgcctgctcaagctggagaacccctggtgtggatttgcatcatttgaatttgtagtacataggatacagtagggaga

SEQ ID NO: 619789 - DNA, 326 bp, Homo sapiens
gggaagccactgccacccacccagtgaaacactatcacgaacaattctctacctctctatactaatctccctacaaatctccatgaattataacatacacaggcacagaactactcatattttatatcttctccgaaaccacacttatccccacctgggttatcaacacccgatgaggcatccagccagaacggctgaacgcaggcacatactccctattcttcaccctagtagggtcccttcccctactcatcggagtagtttacactcacaacaccctaggctcacttaaacattcctacctactcactcctcactgggccaag

SEQ ID NO: 619790 - DNA, 117 bp, Homo sapiens
cacggttccctggtagtgtagtgctgtgtgtgcctatgcattatggatactgcatagtagttcagaatgcaccccactatgggaaggacaaggtagggagtctatttctacggaaca

SEQ ID NO: 619791 - DNA, 266 bp, Homo sapiens
tagtactaaactgatgccggacatgatgcgggctgctgtcatcccagtacgcaggagatagaacagcggaattgcttgaacccagggtgatagcacctctgcacatccagcctggggaagagattgagactctgcctcgaaaaaacaggtgatctggagaatcactcccctcatacctccttaagtctacatggaacagtcacaaaaatcattcctacatcacagccaggtgaggtggcacatgcaagtaaatccaagatgctcag

SEQ ID NO: 619792 - DNA, 102 bp, Homo sapiens
tgtgtcatggaaagcatcactttcgtctactaattggtaatctgtcatttcctgttaggaagcactcccagatctgtatccagagccgcagccgggcgcgat

SEQ ID NO: 619793 - DNA, 100 bp, Homo sapiens
gtattatctgttactctttatgtgtaggtagggaagcaactttgcttgcatagagagagaagatcttgtaggtcagcttcagaacttatatcaataagct

SEQ ID NO: 619794 - DNA, 137 bp, Homo sapiens
tagcagcgcattgggctagcatgtatggttctgtcccagctgcctgtctcagcagcagcgggtctccctgcctcaggccctgcaccctgaccaccttgcatccgtgtcatttcccctccccatgcgtggattgccag

SEQ ID NO: 619795 - DNA, 556 bp, Homo sapiens
ggatagactggccagcacgcataggagcctgtgcgcgacccagctgctgctctacgaggacgcggcggagcatgctaggagagctgctgagcgttgcactaccggggaatcacttcacacggtgcaggcgtacgtacacacgctgttcagcctggaccaagcacagggcgcgcatgtgcctgctcatgactttctggacagactgtgttgtctagacaacctggaagcctcactcagtcgactggaggtggacaagagaatggtcaagactgttgtggacagcttggatgcatactcagtcaacatagaaaccaactagaacattgtggaatcagccaactggctactagataacctgacagaatgatctggatgggaggttcgtgagagtagctatcagacacatgaagggctcacatgaatttgtgtgcagcgcgcgtattcaaagtctctttggtcatagccaaacgatgacgtgtttttactgacgcgtcccctaccgcaataatttggctctcataactcacttacaatatctcatctgtactgctggttt

SEQ ID NO: 619796 - DNA, 200 bp, Homo sapiens
tctagaggatcgcccggtagatgggactctctctgactaaatacttgaaaggtgagcagatagaaaaacaatgagccttggaaagtttctgagatggatctgtagtcagcgattactgttgagtagcagtatcattgttgacatttaccccagataagcctgaaccttccctagattaatcacttttcagttgccacggt

SEQ ID NO: 619797 - DNA, 915 bp, Homo sapiens
ctaaggagcgttactccggcatgaatatgccccaggtacagggccgggagcaaggacaagacggaaccgccggagtgctcgcggactcctgaggatgggactggtgctgtccgtgtggtgctggcggctggcgcctgggtctgtcttgactcgtcgtggtgactctgggctcgcaggtagagtgctcaatgccgtacttgtctactccacgataggaggcatcgcagcacagcgttacgaatcgtcatagatgccccggacatccggagatgtcttggggtggcggacatctcgacctgtccaatcgtgcaaaatgtctattcaccgacatcaaactcgggtctgtacacgaaaggaatccctagatgatgggctcgcgttggccatccgtgggcaatcagagccgtgtgcacatacctgcatgcaagagatggcatcgccatgccgtgccgtgatgtccacaatcctagttgttctcacccatcgttccgaggactcactgtggtggtggtgtgggacacgctcatgtgcgtgaggccgcagtctgacgcctgtgttgcatgctcctgggctccacctgtggtgcggggacgttgtctcatctgtggaacgatctctttggctgagcggtgccgaaggggggtcccctggccgtggggggtcctcccccactatgggccgaggagcactccctccaggatgatgggccaactcctggtaatgagactcctaattgggtgccccaaatgggggatcccccctgggaagaagggactccagtgggcatgcccctcccgggaaatgcgggctcttccccctgggaatggaaggcttttttgacctttggcgcaccagagattggaagatggcccgcagaaaggggtggccaatctctaggcggctttacacaaaaca

SEQ ID NO: 619798 - DNA, 519 bp, Homo sapiens
ctacgatcaagttaattactcaaagcaaaagttgtccatataatacattggtcgtcaatttttatttccacatggtttcacaggactgaatgacttgctcacaatcccaggaggaattataagttttgctcttcaaaaaagggtgttactgtcgtaaggggaaaagccctcattgacaaaaaaatgactctaatgaaaacaaattcaagaatgatccactggtactgcaggttacagaaaagctgccaaagatcagttccccacctctagcaagcaaaggggatcaagggctaaaaataccttagaaaaatcaaacagcccctgctacccatgcttatataagggccaaacttgcaaatgtttccttttcgaccatgctgcccaaatgtgaaggaattacatataaggctaaaatctggcgaatgttatcacttcttcctgttgtttgtggaatataatatctctgcgagaggaactgggacaaacccgtgacattcttttagttcctggcaaaagggg

SEQ ID NO: 619799 - DNA, 165 bp, Homo sapiens
tcatagctgttccaaggatccccaatgtctctcctacgaacgtttgaactgttcagtgttggagttttgaaaaacgcatcatgtttggtttgtttgttgtggttttttgtttttgcaggtattaatctccagaaatagctctaaagttctggaatcaatgttaag

SEQ ID NO: 619800 - DNA, 318 bp, Homo sapiens
tttctgaccgcagctccagcgccgggtgggggccacgatgcaggtgctggtcgattccgcaccggccttgggccgcaagggcggggtggggcgcagctacgccgacgcaccggagatcgacggggtcgtgaagcttctgccgccggagaaggcgtccaagaccctgaaggtcggcgagttcaccaaggcccgtatcgtcggcgccgagggccacgacctgattgccgtgccggtgtgacggtcggcacggccgcctggccgcctgaaggcggcgccttgccagccggtgccggcggtatgcacggcaacccgaaggga

SEQ ID NO: 619801 - DNA, 973 bp, Homo sapiens
ggtgagtgactaaaactcctatctgtgaggtgcaggctgggcgctcgatgcagcatgcgtcgtgatctgccggcgtgtacagcgggaatctgggagtgcagaggcagctctgcgagttaatgcacgtatttaaaactcccgggacctgcggacgctatgaacagggaagcagctcgaggatattccatgacctgagatagcaaagttgccaccagatacaagtgtgggatggcattccaggtcaagacgttcctgaaccagcatgtcaggcatgtggggtctccgcgcctgtgaagaaagaggagtcgccgagctagtgagaacatcccccagtgaacgtgcgtctcaaaccgtgggaccacccggatgagccccccacggaaactgctgaagagcaaagggagtgacaaagactttgtgattgtccgcgaggcctaagctaaatcgagagaactttccaggtgtatcatgggactcccttccggatgagctgcgtcttggggaatcttaatcctgtctgtgcctccctgacctgctaaaggtctctgagtgtctgtaagatagtgagatcgctagcagtcatagatgagtctctatggcagaccttacgacctcaccaggtaaaaagtctgcacccggatgtgactggccggcttgctgtctcaaggggggtacttggcttccacggttgcgccacgatgcagttaagtagagcaacgagtgcgtagaagattttcaagccctttgtcgtggtcacgccagtgagctataaactcagtatagaggtgtccaccctcaaagggctactggtccagtggtacacagtgagaaataaagctagaaggctggggttaggacccgatggaaacgctcgaacagctccctagcgggtaactccgggggtagcaactcagtgtttcaatcacacctccagtggagaccccggtgagacgagcacatactttctgtaaga

SEQ ID NO: 619802 - DNA, 132 bp, Homo sapiens
ctaccccgcgtgcaggggtgtacaaggagctgggttacacagggtgaagaagcatctgcaggacctgtcctggagaaatctccagagctcggacaatgaattctgaaggcactggggagcccagaccggcag

SEQ ID NO: 619803 - DNA, 168 bp, Homo sapiens
  misc_feature (150)..(150): n is a, c, g, or t
  misc_feature (153)..(153): n is a, c, g, or t
tttaagtccctggggggcccccttggggggccccccgctcccaggttcccctttggtgttatgtcaggctttttgcaaggaaaacccccttggggaaaaatggaaaaggccaaaaaaaattaataaatttccattggccctggggtgagntgngggtttttgcaagga

SEQ ID NO: 619804 - DNA, 1287 bp, Homo sapiens
cgcagctggctcacgtccgtaatcccgagattttgggaggccgaggtgcgtggatcgcttgagggtccggatttcgagatcagctgggcatagagggtcaaaactccctcgtctctatctaataagatacagaagaaacaattagctgggctgtggctggcaatgctgtctaataatcccagggcactacaggcagtgctggaggcgagggagaacctgctgggaaccccatggatggcacgagaaggcaatgcagatcacggtcgaggatcactgcctagcatccaacttcacaggccgtcgggccgactagtggcacagtgatgacttcgtcagagagaactaggataatggtggcctttacttacaagcctctcgcgagattatcatacgtgtcacaggggacatttgtagggctagagctccatacgctgtgtggcccctgcaaacgccgtcgcatttaacggtgtacacaacaggttctgtaaacagcagcccgccacttcccgtgtgggataatctaggggggcttaagtaagtgatcacgcataatttccccattgcgtgaattgtggacatgtaagctacgagggcactgtaagagggcaacacacgagagctacatcggtactacggttggcacatctaagagctcaggagaattgtcacaataataaaaaggtgtggagaaaaaaggtgagagaaaaacgtttggtgattagaacacttaagagtatagtgcccatagaaatttttgaggaaaacaggtgaacccatgcatgatatgtaccgcaaaaggtgatgtaacgtgagacaggataatacaacaaggaaaaggccttatttaattgggcaaagatttcagagtggaaggttgtgtagaattaaaagagcacaacaatatagagtttgtggaagcaaagtgggacaaattaggggaagttagatatgtacaaaagattataaagaacaggtgatgtgcgtcactcagtttggcacaggacagtgtggatagcaaacgtttactcgtgggccatagtgtcttcgcgaactgtcttctgcaactcttggggctgttaaaagaagccaggagaaaccgccaaggtaagtatcctcttgggcggagacgtaagtgacacgagcgtcattgggggcaacaggccaagtcatgcgggtagcccgctttaagcactgttgactatgtatgtgccccgaaggagaaagcacctatacaaggtctgagagcttggtatcttaaaaaatggttggggcagacaatatccatca

SEQ ID NO: 619805 - DNA, 163 bp, Homo sapiens
gcggatttcacacatgcctagcagaccagaacctctcggcagttgctacggacttacgaaggacaaagcgagagctgcactgtgatgtgaatctttcattatctttaatgaggcaaaggatctagtgtaaaaacacagcaaacaaaaggtgaggtctaatgag

SEQ ID NO: 619806 - DNA, 499 bp, Homo sapiens
  misc_feature (460)..(460): n is a, c, g, or t
tcgggctggtgtgcagtggcacgatattggctcactgcaaccttctcctcccaggttcaagtgattctctcgcctcagtctcacgagtagctaggactataggcgctggccactacacccagataattttttccttttttggatttttggtagacacagggtttcaccatttttgccaggctggtctcaaactcctgacctcaagtgatctgctcgccttggcctcccaaagtgctgggattacaggcatgcaccacagtgcccggcctattttcatttttattggaatgaaaaaaatgaactaaatcccttcaaattagaagtgagctccaaagaatcactaatatattattttcttcaacgttttctcaaaaggcaccctcaaggtaagtaatttaaaatgtacctagaacataattttcaactatgtattcaaatcacaggataagttttgtataanaaataagtgttagttttgatcttgagaatgtgctacata

SEQ ID NO: 619807 - DNA, 1170 bp, Homo sapiens
ggcggcgcgcttagttgccggagctgaacggcgcggagctggtctgaggctgagcctgagcctgagctgatgctgctggctggtggggcctgatgagtgactgctgcagtgtggcggctgttgccatgtcgcactggtcacatgccactggctgggggtggctgccgctgcgccgccgaacgggaggatgcctgccctgagcagcgctggcctggcctactggcctgtacctgctgcatcgacttggagctggctgcaatgccttaactgatgatgcctgcgagggcatgcggcctgctggctgtcttcaagccgtgggaggagcggaccgaccgctccaagtttgttgaaagtgatgcagatgaagagcttctgtttaatattccatttacgggcaattgtcaagctcaaaggcatcattataacgggcagaggatgatgactcacagccctctgagatgagactgtacaagaatattccacagatgtcctttgatgatacagaaagggagccagatcagacctttagtctgaaccgggatcttacaggagaattagagtatgctacaaaaatttctcggtttttcaaatgtctatcatctctcaattcatatttcagaaaagttcggagcagatacgacaaaggtctttatattggctgagaggaggagtggacttgagcttcgccgaaacgaggtgaccatctgcaattacgaagcatctgccaaaccagcaagacataggggtcatcaggttgcccagagaacactttatttctacaggctggccaagtgtccatagaggagctgtgtcagtcgaagtgtacgagtacctgtgggaaggagagaggggatgagtgtcaagaagaaagtggttgcacaagccttgcaaggttggcatgggaggagtactgggaaagcgtgagttgggagaaacgaaacactggtagagtttgtgatgaggtgcacgagagacacatggggtataaggagggctgaaaagtattgagaggggcacatgagagagaaggaaaaggagatatcaagaagggagggacacaagagtagtgtggagatgatgtgataaagtcgtgtgtaatgaaaaaggaggagatgagatgcgagagtagagagacgagcgacgtgattgaattgtgttgttttcttataa

SEQ ID NO: 619808 - DNA, 185 bp, Homo sapiens
attagtttccaaggccgataacgattcttccttctctgtggtgccaacgccttgcgtgaatttagacaggcataaaactagaaatgctgaaaaaaaaaacgacttcaaaggcatattaggacgtcccaagtaacgaacggtctacaattgactattctatagaacgcgctaaaatctcagccaag

SEQ ID NO: 619809 - DNA, 494 bp, Homo sapiens
  misc_feature (43)..(43): n is a, c, g, or t
  misc_feature (46)..(46): n is a, c, g, or t
  misc_feature (460)..(460): n is a, c, g, or t
ctgtgtgagcgcctgacccctcgccttcccccgcgggtgcgtnggncatttagcttacaggggcaccctggcactaacccagccctaggcagtggctttatgagtggacccaggaggacaaacgtggcaggcacggccttgcaacctcatgggaagctggctgcagcccggggatccttcctggactctggactggtggctggcaatgggccctgtgggacacagaacccagatgaaagtaggtgggacttcctgtctcgtggcctgcagagtgctgggcctgaggcacttctcagccgcctgtgtcctgagagtgtggatgttgcagtgtcctgagagtgtggatgttgcagtggccaaatcaacccctggtcacacccaagtgctcatgctcagctcttgccctgccattaggaagctggacaagctggttaggaaagggcaatcttttaggtctttnttaagaattaaagaagatctgtaatttttatttt

SEQ ID NO: 619810 - DNA, 399 bp, Homo sapiens
  misc_feature (239)..(239): n is a, c, g, or t
ttttggccctgtccctgccctggggtccaacaggtcatccctccctttttttctctcctttggcggttggtcccggaggcacttggggtaatctccccctagcttcaagctgtacatagggcctcccagtgcaaatcctcctgcccataccgtgcacccttaaaagcctgggtgtgcataaagcgccccctactttcccagttaactcccacgttttctttccctgaagcttggtattntgtctatgtgcccacttctgacttttaaggtgggcacgttagggaagcacagcccccgcgcctgccttgcttccctgtcccccgaaatgtgtctgtttctttttgaaagtaaaatatacataatataaataaaaatgtataaatactgctttggttttga

SEQ ID NO: 619811 - DNA, 992 bp, Homo sapiens
agagactcttcagatcctggatctctcaaatcggcttttacaccctgatcccccacgacttggggatgaacaagcctccggtcctgaacaatgcagacagcgtgcaggccaaggtggaaatgcttgacaacctgctggacatcgaggtggcctacagtctgctcaggggagggtctgatgatagcagcaaggatcccatcgatgtcaactatgagaagctcaaaactgacattgaaggtggttgacagagtattctgtagagaagccgagatcatcaggaagtatgttagagaactactcatgcaaccatcagcacaagtgcgtatgacttgtgaaagtcatcgagtaatctttaaggatagagcgtgaaggcgacctgccagcgtggacaagcccttttaagcagcttcataaccgaagattgctgtgtcacgggtccaggatcaccaatctttgctgggactcctgtcccagggttcttcggatagtgcccgcctgaagtcgcccgtgacagtgctacatgttggtaaagggatctatttcgtctgacatggtctccaagagtgccaagtactgcatacgtctcagggagaaccaataggccttgatcctgtgggagaagttgcccttggtaaacatgtatgaactgaagcacgcttcacattatagcaagtaaaccgaaggatctagcacaggtggtccaaacggtttgggggcagaacctaccccctgatccttcagctaaccttaatcctggatggtggtagacgttcctcttgggaccgggattccatctgctgtgattgaacaccgctctaatctataacaaagaacctgtcttgaaataggcccggaaactcgaacatctgtggaacgaatcattaggacacccgggatatggaagacccaacccgagcaggataataccaaagatgtgacaaaaggcgcagagcagtgctacacaaaccacaaggaaaaacaggctcaaaaga

SEQ ID NO: 619812 - DNA, 298 bp, Homo sapiens
ctgcatgtgggcatctgttgtggacataaagggaggtacagctaggcttttttttttaagttggggttctggtttttttacccaggctggagtgcagtggcacaatctcagctcactgcaacctccgcctctgggactcgagcaattctcctgcctcgacctccctagtagctgggattgcaggtgcccgccaccacgcccggctaattttttgtatttttggtagagacgggatttcaccatgttggccagcctagtctcgaactcctgacctcaggtgatccacctgcctcagtct

SEQ ID NO: 619813 - DNA, 993 bp, Homo sapiens
aaagcttcttgtagttgcttcctttattcagaaaagaacatgcgataccacggtatatcatttgctcttcattaaagaacagtttttctaaatgttgggggaaatgtgcatagtcattactcagtcaaaaagttgtgttctcatgagcctaaaggatccattctagatttttattatcgtgttatatattgtgtgtgtgttgtgtgttgtgtgttgtagtttccgatagaatattgcatatggtaacatttttttccctcttaggtaattcagaggcgactctccagcactaataggaagataaacactcgcattgtaaacccatatgtctctttgagaatcgctctactctatctctcctaacatgtaaatactataggatgatcagtcactcgttgcatagtttgatggtggacacagagttgtacggtagaaaaaggctatacactatgtcaaatagctgcatcaccatatgtgacatttcgtagacatacgtgcaccaactctcttagagatgggcgtatcgatcattacacatagatgctcatcattacatccgctagcggcttaagatttggtgaacatactcttcctatcatatgggagagagacatttctatctacggtgctccatcaccagactgagagtttctctcatcatcaccagcatgtgagggaataaattaacaaaaaactgaataaggcgtcgttcttacagcttcagccttaccgtaactactacaagttgacaagttgcctcacctttcataccatggattttcctctcagagggggtcagtctcgctttgaggcatacaaatgttaggaactttcacgtggtaggcgacacatctggtaataaaccaggtcttttggatgaactcgcgatgttgtggaggaaatgtggctccatttgaaaaccctaaaacatgatggttgagatgtgtcgtggcgcccctttaagagaccatgggttggtaaaaacactggcgg

SEQ ID NO: 619814 - DNA, 457 bp, Homo sapiens
gcacgtgtcttttattagagcatcagaccctctcccgatacaggaactctgaggtcaacttgctatgacttatactaggaaactgcaaaccaatagcacgaaattctgctcgtctccttagtactgcctacaatcaaatcaattttatttcgaaaggcaatacagtagtgcatacgaaaaagtgaaaacagaacctgtcccatggaactggaggaacagcagtgtgccgacggtcatatagcactcaacagttaagtccaaaccattcggttcagagttagcttatccccatttaggcaatcagttcgtcacaaatcttggtgagtgcttctatttctttattcttctgctcccagcgtcctttccagggcgtcccactcgcagctgctccttccggaggctggcctggtgggcggattgctccttgcttggccttgccatatgcaagggtaccgag

SEQ ID NO: 619815 - DNA, 271 bp, Homo sapiens
  misc_feature (22)..(22): n is a, c, g, or t
  misc_feature (29)..(29): n is a, c, g, or t
  misc_feature (41)..(41): n is a, c, g, or t
  misc_feature (83)..(83): n is a, c, g, or t
  misc_feature (101)..(101): n is a, c, g, or t
  misc_feature (145)..(145): n is a, c, g, or t
  misc_feature (242)..(242): n is a, c, g, or t
  misc_feature (245)..(245): n is a, c, g, or t
gacatctagaggaccccgaaancctaatnacgggcaaggtnatgtgctgggataatgaacagactagagatgtcagatgattnattagctgagtacagtgnttgtcatatagcagggtggtcagtagatatttgctgaataaaanaatgaatatactgacttggataaaagttattctatattctcttcctccaaggtaatagaaatagcactggctgtctcttcattagacagcattagcnganaggtcatcgaggcgtacttagggttt

SEQ ID NO: 619816 - DNA, 226 bp, Homo sapiens
caacgcatgtgccgctcccctgttccgagatggtctgctgctccgccggagcctgggtgatctggccatcgtccctgctgcgtttacctgacagccccggattctctagcttggcagcctcttggatcgctgctggacagtcgcctcggaagcctccttctcctgaaccttctgagcctcgatctcggcgaagacatcgaccttctccggagcggcacatccgttg

SEQ ID NO: 619817 - DNA, 395 bp, Homo sapiens
agaaacagaatcccagctgggcgtggtggctcacacctgtaatcctagcactctaggaggttgaggtgggagggtcgcttgagcccaggagttcgagaccagcctgggcaacatggagagaccctgttgctacaaaaaaattttaaaaattagctgggcatggtggtgtgtgcctgtagtcccagctactgggtggagatggaaagatggcttgagcccaggaagttgaagctgcagtgagccgtgtgtgcgccagtgcatggcagactgggtgacagagtaagagcctgtctaaaaaaaaaaataagggaaaataagggaaaaaagaagggaaacagaaccccatctctaccccagaagtccgtcaggtgtgctagtcgtagtaacacatatcg

SEQ ID NO: 619818 - DNA, 347 bp, Homo sapiens
  misc_feature (43)..(43): n is a, c, g, or t
atttgtattgggtatttttttttaattataaaggaaacaaaangttcattgttaagaacctcaggccgggcacggtggctcaagcctgtaatcccagcactttgggaggcctaggcgggcggatcatgaggtcaggagatcgagaccatcctggctaacacggtgaaaccccgtctctactaaaaatacaaaaaattaactggacgtggtggtgggtgcctgtagtcccagctacttgggaggctgagacaggagaatggcatgaacccgggaggcggagcttgcagtgagccgagatcgcgccactgcactccagcctgggcaacagagcaagactccgtctcaag

SEQ ID NO: 619819 - DNA, 289 bp, Homo sapiens
gagtgcagtggcacaatctatggctcactacagcctccgcctcctggttcaagcgattcttgtgcctcagcctctggagtacttgggactacaggcatgtgcaccacacctgggtaatttttgtacttttttaaatagagatggggtttctctatattggccaggctggtctcaaactcctgacctcaagtgatcctcccactttggcctcccaaagtgctgggattaacaggcatgagctatagcacctaggccttttgttccttttctttagttttacaatctttat

SEQ ID NO: 619820 - DNA, 145 bp, Homo sapiens
cttacacaatagcttttattagtaaagatacctctttacggactccactttatgactccctaaaggccctattgtcgaaggccccctatcgtctgggtcaatagtatcttgccgcgtactctctaaaactaggccgctctatggt

SEQ ID NO: 619821 - DNA, 476 bp, Homo sapiens
aaccacataagaacggctagaaataaaccgaacagaattgcaatggcagaattgacaactggcttaccatttcagctgttcaaggcctgactggtctacctgcacttcctagtaagatgactcacggtaccattacagaattatctcacgctagggtcaaacctgatttctaccaccgagtgtgtggtagaggcatgtttctcagaacccagagccaagataaggaacagtctccaattccctgttctctcccctccctccttcacccttcattccaggcaagtctcctaggcaagtgtgtcccatcctcatcctcttttttttttttttttttcttttttcgcccaggggtctttttttggagggtaccgatggccactgagacgttcacaaaggacaaaaaattttatttctccccccccccagggtctccttggtccccctgttttcccgattcccacagagggtgattgtca

SEQ ID NO: 619822 - DNA, 134 bp, Homo sapiens
atgctagaggcgttagacaacaagctgatcttggtaactgactcttggcattatattctccagacaatcaccatgacgacgtaaacatgaaactttatttttcctagaacaatccagttgagtggcgaattcca

SEQ ID NO: 619823 - DNA, 885 bp, Homo sapiens
gctcttactcctttggaaccgcggctgggcagaacggctgatcgagcccctcaccaattctgcatccacagcgacgtctggcagtgtctctcctctatgaagtgtgtgaacagacggatagcaggctcatctcgctgtcctccggaccatgcccaatccacagtcgccgagctatccgaagacttagtgttcagaaattaaggatatagatcgaggactccgatcagaacttgaagatacctggggctgctaggcgatgtccaagatcctgagagatcccatcccaagtccgtgcagtcccacaaggacctcatcctgcagtgcctggacgcacgaggacgagtgcatccggctgcgggccctggagcctgctctatgggatggtgtccagagaagaactctgatggcacgtatgcgtgaagaagctgtatgatcccacgtagacaaggctacgtagggtaccatctaccgtgacgagctgtcagcatgatcattgacatctgccagagcagtgccatatacgcagtacatcaccaactacgagtggtacgatcagcatcctggtggtgctgaccggtggagggcacagggacggccaactcatcgggcgccaaatagctggactgtggccatccgcgtgaaaggcatccgcaagtgcgccggtcccagatgtctgcgcggttgacagtgcacacctggtggccagcagcacccaagcggaagggatctgggaaggtgagtagctggcggctggatgctgggggaagctcaagaagcctttgggggaacgcaccacaattggggggctggggggcacaggcccagtgcaagcaaaccggcgggtttggaaagggggaggccggccagctgagggaaggcaccgga

SEQ ID NO: 619824 - DNA, 462 bp, Homo sapiens
  misc_feature (131)..(131): n is a, c, g, or t
tgtctatttctaaggaccagctgtagactttctcagaggagcatcctgtgctcctgactgaggcgcctttataacccatcgaaaaagaccgggaacgagctgtcgaagtatttctttcgaagaccttcaantgtgcccagctcttttcatctctcatgcaatgcgtgtacgtcacgcctttactgctaccgagggcaggaccagcagggggtggtgctggacttctaggaggatggatgatcacgccatgtctgtgcgccactctatcgagggctattgccagtgtccccactccatcatgcgcatcgacatcgcgggccgggacgtctctcggcttcctgacgcctgctacctgcgtaaggagaggctacagatgttccactcatcctctgagatttgagattgtcaaggaccagtacgagaacgagcctgttacctatccataaatccccaaaaggatga

SEQ ID NO: 619825 - DNA, 285 bp, Homo sapiens
  misc_feature (20)..(20): n is a, c, g, or t
  misc_feature (75)..(75): n is a, c, g, or t
  misc_feature (134)..(134): n is a, c, g, or t
  misc_feature (136)..(136): n is a, c, g, or t
  misc_feature (141)..(141): n is a, c, g, or t
  misc_feature (170)..(170): n is a, c, g, or t
  misc_feature (247)..(248): n is a, c, g, or t
cggtaactaccccggctgcncacagctcggcgctccattcccgctccctcacacaccggcctcagccgcaccggnagtagaagatggtgaaagaacaacttactacgattgtttttggggggtcaacccaatgntnctcgnggaagaatttgaaaaaggcttataggaancttggcctttgaagtaccatcctgataagaacccaaatgaaggagagaagtttaaacagatttctcaagcttacgannttcgtctctgatgcaaagaaaaggggaattatatgac

SEQ ID NO: 619826 - DNA, 996 bp, Homo sapiens
cggggtgaagatggcggccttctccgagatgggtgtaatgccatgagcattgcacaagctagtggcacagcagatggcattggctccatccacaactgcatcatcccaggcgtgaatctcatcacccactagcatcttcaggcaggcaggtgcatagtaactttataggctgcagcaacaccaggcacagtggccactaacactggctgcttattaggtcatatcccagcttcatcccagcatcagctttcatgcacacactcgtgcacaagcaccgacacgcaggccacaggccacaacacacaggcaaacacaccaaccacattcaacaactagggtgcgttcagctgcatgcaacacagatggcgcagatgcacacccaatcatgcacagcaggcatcgtggcattcttttgccaaaattaggggatccagcatgggtccttgtgtggaggtccaaccagccaggagcagaggtcaacaggggacatgaggcaatgggcgatggtaagaagcctcaactaacaggcgcatttgacatgcaacacaggggcaaacgacgttacttcatggaacagtatcacttgatccaatggcaacccaacaggggggtttacattgccaagcgggactacgagcgaatgagattcctcaccccaactggacaaaggggaccaatcacttcatcggggacgcacattagcgggttaacgtcggaaccaaacgggatacacgggaaatctccggggcccatatagcggctgggcacaaccaaggggaaccacaggaaacagatgtaggcccaagtaaaaggaagaaagacaaacctttgtggaagtcacaagattatagtgggggcaggaagggggaacagttccgacgtataggtgggccagtggaagttaagcccaaatttggtgggaaactggaattgacaccgatgggcagttaattaggaagtacaaggggggacagttgggttcaagaatgtacttag

SEQ ID NO: 619827 - DNA, 249 bp, Homo sapiens
  misc_feature (34)..(34): n is a, c, g, or t
  misc_feature (106)..(106): n is a, c, g, or t
  misc_feature (118)..(118): n is a, c, g, or t
  misc_feature (151)..(151): n is a, c, g, or t
cccatatacaattttaacatttctaatatatttnaaacaagtgaagttaatatgcatccaaaatatttcaacctgtaatcaacataaaattttaatgagatatttnatattatttttnggtactgaatcttcaaaatccagagtgtatttnacacttaccgcacatctccattcagactagtcacatttttaagtgctcagtagccacatgtggctggtggctactggattagacagcacgagtctgga

SEQ ID NO: 619828 - DNA, 383 bp, Homo sapiens
ttgttatcagtaataaagcagagacatgacattactccaggcgtgaagtacagtggtgcaaccacatgcgcacaggtgatcctcccacctcagcctcccaagtagccggaaccacaggcgtgaacaccatgcctagctaatttttaaaattttttataaagacggggtctcaccatgtttcccaggctggtcttgaactcctggccttaagcaatcttcctgactctgcctcccaaagtgctgagattataagtgtgagccactggaaccagccaatcttgcttgtttctagcaaaactggtcagcctcacctacagtgatcaaaataggtaaaagtaggggccacttttcgtaaggagggaaagaaagcattgtctttcagt

SEQ ID NO: 619829 - DNA, 118 bp, Homo sapiens
cgcaagttctgcaggtagaaactgaaacgctgcaagcggaacgcaactcccgatcgaaatccatcggcgcggccaaagcgcgtggggaagacatcgagccgctgcgtcgcgaagtgaa

SEQ ID NO: 619830 - DNA, 180 bp, Homo sapiens
tcggtagtgtctgtgtgtctgcgtcgtgtctgtagacgtcgcctgtccgggtggctggagctgggtctgacccgttgtatggtttgacctgatatactcgattctcccctggcgcctcctcctctggtgttctctccatgtccccctcccaactccccatgcgcagttcttactcgtaca

SEQ ID NO: 619831 - DNA, 775 bp, Homo sapiens
aactcccaaagttggtggtccccgcatacataaaacgggggggcccgttatattgacattctagacagagatccctcacaggcgcactttatcccgcggtaggtaaatttactagggggattttattagggggagacattttaccgcgaggggcgagaaccgcattaggtagaggagttgtagtgcgcggagtatactacacaggagtctagtactactcatacctcgcggggggactcaacgccacatatacacaccacactcgtcgcgggggtggaccacacggcggcgcggcgcccccccataggaaggtggccccccagcagacaccttatcagggggccccaccgcggcccgcgctggggggggcacccaccacccccggggacggaatggcgcacgcccccctctctggggggaaggcccccacgggggcgcgcggggcgacatccgcgcgcagagccctctcaccgcgggagggattcacccacacccctctcccgctcgtggccacacacacaccccgggggaaaaaccccaaccgtgtctcctgggcaaaaccggcaacaatgagcctcggtgcgctcgccagggcgaacgtcactcgggagactcgacgcaccgggaccgacgtcggcgggaagggccacgggaggaatacaagggcttgacaccacgaggcacgtggagggtgccacctgcagccccagcctggcccaccagagccaccacctcggtccaccacagagaaggaaaccccgtctcacataaacgc

SEQ ID NO: 619832 - DNA, 238 bp, Homo sapiens
caggttcgcggtagcaggattgtctcgatttcctactcgtgatccgcccgctcggcctcccaaacgtggtgggattacatggcgtgagccattgactccggcaatatattttatgtttcagtagagacggggttatgccatgttatccagaatggtcttgaagtcctgatctcaagcaatctgttcgtcttatcctcccaaagtgctggtattacagctgtgaggcattgcactccgg

SEQ ID NO: 619833 - DNA, 684 bp, Homo sapiens
gttatttcaaaaataaagatcactctggagggtttcatgcagacatttaaatgctatggcccagaaatgccatacatcatatggcctcacaaagaattaaccaggattagttgtgtggctccaaagaatcatgacaagaaggtcggatagtgcagcctatcttgtacccaacagtagagagctgtggtacacaattctgcagactactgctactggtagtaatccttgtccatatgataacctgccagctaaacagtctcttcctgtagctttatggcccaagtcttccattttttagggcaaactgccagagtagccaccagcttagagggaaacattgttatcaggggaacccgcccccaatatttcaacatagattctttatattttccctaagtgtcggccagtctgagcaataaagagaaagaatacaaagagaagaattttacagctgggccgctggggatgacatcacatatcagtagatccgtgatgcccacctgagctgcaaaaacctgcagtttttattagggatttcaaaaggtgaaggtgtgtatgaacagggagttggtacaaagatcacttgcttcaaaggctgcagagcaaagatcacatgcttctgagggaaccaggccagggcacaaatcggaactcctgtaggctctatattcggtgccgttttgc

SEQ ID NO: 619834 - DNA, 256 bp, Homo sapiens
ctgcggtgattctagaggatcccgatacccacctgagttcatttctatcgattgggcaccaacagtgaggtgaagcaactctaaggaggtttgaggttcaggcacaccagtctcagggtgtcctctccacacccctcagtgtggtatcctaaagatctttatggctgtctctgagtcttatgctgcctccggccttgatgatttctgatgctttttttattcctttatttccgtggtcattagcaggtgggtacgt

SEQ ID NO: 619835 - DNA, 497 bp, Homo sapiens
ggcggacattctgactgagcgtgcctaccgcatggagaagctcccgcggtcctacaagaacatctgtctgggctttaagacacccaaggaggctattgagggcacctacattgacaggacttgcccgttcagtgatactgtgttcatatcggggcggatcctctgtggcggggtgaccaagatgaagatgcagaggaccattgtcatccgccgagactatctgcactacattctgatgtacgaccgtttctagaagctgccacaagaacatgtctgtacacctgtccgactgcttcaaggacgtccagatcggtgacatcgtcacattggccgagtgcactactctgagcacgacagtgcgctttaacgtgctcaaggtcaccaatgctgccggcaccacgaagcagtttcagaagttctgatgctgtacatcggtccgctcatcacattgaaatagagttatttgctcattcccagtaagctactaaactgatgta

SEQ ID NO: 619836 - DNA, 1380 bp, Homo sapiens
cttcaccagtcgctccaccttctccaccaactaccgtgtccctgggctctgtccatgtctggcccagtctacggcgcccgggtccgtgctcgagtcacgctgcggccagcgtctattcaggcgctggggtgctctgagttcccgcgagtctccgtgtcccgcatccatcaggctatcagtggagcaggtatcggagtgtcccgtgcgtggcctgttgccaccgggaatacgccgggggtctgtcctgactgggaaggcactcccaggcaatcgagaatcggacgactcactgtcaaagctcttagacgacccgctcatggaccttcttatcccgtggtacacgagttgatgagatgcctggcagacctcgagaacgcagagaaggccgtggaagatgccatagagagttcctgggtacctactctgcgaggataggacatgggtaccccccagtgttccatgcagacttgcgacgccaatttacgttcaaaaggactcaatcggaggggaaccctgagaggcctccaggagtctttctgccaccattacctggtgcgaacaactgcccctgcattcggtttcctgccacgaatttgaccaattgcccacagatcctatgcttggctttgagtcagcaccttttcacggagacgtcaacagttaatttcacgcaccaccgcatgcctagcgccatttggcgcccaagtgacctttgtgagtgagagacacaccgacccattcccaattgaggactcccccgccaaacatggttccaattcgcattcgaccaccaccacaattatttccaccagcggacgttggcttagccttgcggaccgaaacacggatgcacttcggaaggggcctcccttccaacggggaggagacatgccacagcttcctctctgctgacaagtgaacacgaaacagcgcaacgacacacggcagtgcaacaggttacaacaacagggcccattcaccagaggcccccacagaaattttggcccgatgacattcttggggggtttttgtatccgcggttgggcacgagcttaagaaatggtccccccccgagaatttcatccactgcgaaacccctccgacgccaaaggcattccacttggcgcaacaagcaattcccggagagcccccaaatctatcggcctccggagaccttgggtcttccggctcaaacgtcaccaccccggacggcatgggaaggccgtaagagaaccacacaggtactcgtgggggttcttccacagccgagcaagtttggacggaagcaaacacacccaagacagtgttgggtcacccccacaacacaggtctctcgctagacgcgtctggcaaggccctggctcgcagacaacgacatca

SEQ ID NO: 619837 - DNA, 133 bp, Homo sapiens
actacccgtgccataagttttctgatttacgttcttagtatatcgtctctgagagcattatcatgtctctctcatatacatcgaggcaacactcactactatcatcgcgatatctaggcaacaatgcctggtt

SEQ ID NO: 619838 - DNA, 687 bp, Homo sapiens
  misc_feature (126)..(126): n is a, c, g, or t
  misc_feature (132)..(132): n is a, c, g, or t
  misc_feature (453)..(453): n is a, c, g, or t
  misc_feature (485)..(485): n is a, c, g, or t
  misc_feature (539)..(539): n is a, c, g, or t
gaagaggagcagcacttcaggaggttagcagtcttgttacaccttttctagctgtacatcccatcccaggagcgaagacagtccctgggagtcagcgacagctcagacagaatcgctgctaccagnagaccnagacacattccaccccagtggggcgctcccataccactcatggatctgaatcagatggacactcacatgggagtcaagaaggtggagcaaacacaacctctggtcctataaggacaccccaaattccagaatggctgatcatcttggcatccctcttggccttggctttgattcttgcagtttgcattgcagtcaacagtcgaagaaggtgtgggcagaagaaaaagctagtgatcaacagtggcaatggcagctgtggaggacagcaaagccaagtggactcaacggagaggccagcaagtctcaggaaatggtgcactntggtgaaccaaggagtcgtcagaaactccagnccatgtttatgacagctgatgagacaaggaacctgcagaatgtggacattgaantggggtgtaactctaaccccattatattgcaaagacacaacagttgccatcataaccattacagggaagtggtacagctcccacatacaatgaggggtagagtgtttcattataaatttttttcagcataaaatttttttctctttta

SEQ ID NO: 619839 - DNA, 302 bp, Homo sapiens
  misc_feature (211)..(211): n is a, c, g, or t
cgcaatgaagacatagtcacgtaacaactctgtataagcttttctggtttatctgaaaactggcaattctttccttttataaggtctaattaaacatggaaagtggcatatgtactctttgagtgttccctcatttccatcaactactttccacagtggacacaggcttgaccttaggggctgatatggagccccactcctggtgtactgnttgggctcattttcttgggcagcagagggtataggctacggctagttggatcaggaggaaaggtgcctgatgatattggggtggaatctca

SEQ ID NO: 619840 - DNA, 628 bp, Homo sapiens
  misc_feature (394)..(394): n is a, c, g, or t
  misc_feature (426)..(426): n is a, c, g, or t
  misc_feature (480)..(480): n is a, c, g, or t
ccaaaaaacgcacttaggcattgcacacacatccacacgcatcctctcacttcatcagtgcactataactgagcttcaggggtgagaggatcggtgcgctcccataccactcatggatctgaatcagatggacactcacatgggagtcaagaaggtggagcaaacacaacctctggtcctataaggacaccccaaattccagaatggctgatcatcttggcatccctcttggccttggctttgattcttgcagtttgcattgcagtcaacagtcgaagaaggtgtgggcagaagaaaaagctagtgatcaacagtggcaatggcagctgtggaggacagcaaagccaagtggactcaacggagaggccagcaagtctcaggaaatggtgcactntggtgaaccaaggagtcgtcagaaactccagnccatgtttatgacagctgatgagacaaggaacctgcagaatgtggacattgaantggggtgtaactctaaccccattatattgcaaagacacaacagttgccatcataaccattacagggaagtggtacagctcccacatacaatgaggggtagagtgtttcattataaatttttttcagcataaaatttttttctctttta

SEQ ID NO: 619841 - DNA, 466 bp, Homo sapiens
  misc_feature (85)..(85): n is a, c, g, or t
cgtggggcccaaaaccccccctttccaagggggcgcacttcgcgcaaccctttccctttgggtgttaccccaaaaaatttttttnaaaccctttcttccttttcaaaggagggaggtggcccccccttggggggtttaaaaatcccaaattttttgggggggggggaaaattcccccacaaaattttttggggttttcccttttttccccttccaaaaaggttttaaaaaaaattcttcccccccggggtttccccaccccttccccaaacccagggaaagggggggggtttatttttcgggccaaaaaaaccggggcctttgaaagggccccaatttcccccccccttttgggggtttttcccggggggttttgagagggggcaaatttttccccccccccccttccccctaaaaaaaaaaaagttttttaatttttttttttttaaccatttttgggccgtcca

SEQ ID NO: 619842 - DNA, 619 bp, Homo sapiens
atcggatcattgagacctgggtaaggtctaggttcatgagtagatcacggcgattaatctatataaagtactctagttacctatctgtgagcaaagcccttcatgttaaaaggtggtaggctttaaacacataaagcaaaacatgtccaattcttgattatgaggtataaagctgcaattaaattatccagccatcagcttgtaggatattggaagcttagttgattgatccttaaaggttttataaataaatcagaataaatccaatgttacaagatttgattcagacaccttacagatttctagagaggctaagtaaaatactatataacctttaaaccagccagtcctggggtttactcggaaaacagtatttctccaaccattttttaacccacaatcttttatactaaatatggaaattttaccctactgagagattcagagtccctaaggtggctgtcctgcatagagaatcatatattctaattagccccagtagccaagaaaatgctgtctaccttaactttctgaagtctgtaattctttttatttcaggtgggatatggtttacaaaacatactctcaataacaaaagatataacatttccaagagtga

SEQ ID NO: 619843 - DNA, 889 bp, Homo sapiens
  misc_feature (328)..(328): n is a, c, g, or t
  misc_feature (334)..(334): n is a, c, g, or t
  misc_feature (655)..(655): n is a, c, g, or t
  misc_feature (687)..(687): n is a, c, g, or t
  misc_feature (741)..(741): n is a, c, g, or t
ggaccgggacaggacctctggcaatgaccacgcagcagagtaattctcagagcttctggacagcacaggaaggcttggaagaagatagagaccatccgaccactggtactcggacatcaagccataggaatgatgtcacaggtggaagaagagaccccgatcgttctgaaggctcaactactgtactggaagggtatacctctcattacccacacgcgaaggaaagccggaccttcatcccagtgacctcagctaagactgggtcctgtggagttactgcagttactgttggagattcccactctaatgtcaatcgttccttatcagnagaccnagacacattccaccccagtggggcgctcccataccactcatggatctgaatcagatggacactcacatgggagtcaagaaggtggagcaaacacaacctctggtcctataaggacaccccaaattccagaatggctgatcatcttggcatccctcttggccttggctttgattcttgcagtttgcattgcagtcaacagtcgaagaaggtgtgggcagaagaaaaagctagtgatcaacagtggcaatggcagctgtggaggacagcaaagccaagtggactcaacggagaggccagcaagtctcaggaaatggtgcactntggtgaaccaaggagtcgtcagaaactccagnccatgtttatgacagctgatgagacaaggaacctgcagaatgtggacattgaantggggtgtaactctaaccccattatattgcaaagacacaacagttgccatcataaccattacagggaagtggtacagctcccacatacaatgaggggtagagtgtttcattataaatttttttcagcataaaatttttttctctttta

SEQ ID NO: 619844 - DNA, 267 bp, Homo sapiens
  misc_feature (168)..(168): n is a, c, g, or t
gatgataaacccttattcgatcaaccctctctccctaaggaggcctgcccccgttaaccggctttttgcccaaattgggccatttattcgaagaatttcacaaaaaacaattagccttcattcattccccacccattcgattagccatccatctcacccttccttggncttaagcttgggtggattccttcttagaagtctcgacctgtgcagtgcattgcatatgctttggtcgcttggcccgtctcgttttaccaaccgttcgtt

SEQ ID NO: 619845 - DNA, 115 bp, Homo sapiens
acctgactccggcctcaaagctcgaggcttgactgtcacggggctgtgtcctcgggtccgggactctccctcccccaggcagtgtctggtctgggatgctgtcactccggcatga

SEQ ID NO: 619846 - DNA, 301 bp, Homo sapiens
  misc_feature (37)..(37): n is a, c, g, or t
  misc_feature (103)..(103): n is a, c, g, or t
  misc_feature (137)..(137): n is a, c, g, or t
  misc_feature (140)..(140): n is a, c, g, or t
  misc_feature (146)..(146): n is a, c, g, or t
  misc_feature (177)..(177): n is a, c, g, or t
  misc_feature (182)..(182): n is a, c, g, or t
  misc_feature (188)..(188): n is a, c, g, or t
  misc_feature (197)..(197): n is a, c, g, or t
  misc_feature (199)..(199): n is a, c, g, or t
  misc_feature (285)..(285): n is a, c, g, or t
  misc_feature (289)..(289): n is a, c, g, or t
ggggggctggactcaggtgcccccgtaggtgcaaaancaacatccacatctcactcctcccggtgctttttgcggtattcctgcagcgctttctccgccacgntttccataaatttagggttcttcttggagacttntanaggganggtcacagtgatgggatcagagtaaaagagnttcangaccanctcagtganancggaaggaacgtccgagtcagaagtgtgggaagccaccgtggtgacccgcagatagtactggtcttcgccttgcgtgaggtttgcnagcngggacatccagt

SEQ ID NO: 619847 - DNA, 677 bp, Homo sapiens
  misc_feature (513)..(513): n is a, c, g, or t
ggagagagagaactagtctcgagtttgggttttttttttttggtttaaaatccggtaaatgggaatgactcatcatcgggacagcaattagggatgggccatataggggggacagggaaaaaggaggggaggcaggggaggcaaggctctggcggggcttgtggacttgatacccagggcccgggccacacttgcttggaagaggaaggggtaggacgggggcagggtgacagtaggtatgctcgggggtgggtggggtgcttggtaagggctgtcgggcttccacttctggttttggagctgatgggccagccagtccaggccttcgtacagccggtccccgttggttggcacaggtggcctgaattgtcccagtcacgggggacagacaggggaatgcaggcccagctggtcgggagactctcagcagggtcaatagcataaggcaagatccggtaggttggcaaaagacaagggaggtacaggaatccgggagctcgtcctcggccaganattctcattcgagctctttcgccggggccctacattaagctcgctcccggatcattggggtgtcagaaccagcagatttttcagacccttgtggggtgtaccggagaagaaggtggtctccaaaagggggtcagaatctggccccgtggccacccaagattcca

SEQ ID NO: 619848 - DNA, 343 bp, Homo sapiens
gcggccgcctactactactactgctcgaattcaagcttctaacgatgtacggggacatgttggccagtagtgtatttagttatttaaggagggctcaatcaacaggtttaaatggtgtgctattcataattattgcaaaaataggccgggcctgtgattccagcactttgggaggccaaggcaggtgaatcacttgaggccgggagtttgagatcagcctggccagcgtggtgaaactccatctctactaaaaataccaaaagtggcgggcgtggtgacaggtgcctctggtcccagctgctcgggaggctgaggcaggagaatcgcttgaacccaagagtcg

SEQ ID NO: 619849 - DNA, 192 bp, Homo sapiens
cctaaaaaagtggtctaaatgattaacgtgcccacagccgctgcccagtcccctcacacactccctcattcacagacacacacgcaggaacacactcgcacatgcaaaaacacacaggttcatacacacagactcaacctctcatacacatatgcactcacacacaccaatcatgcactcacacagttatct

SEQ ID NO: 619850 - DNA, 197 bp, Homo sapiens
atcagggatgatccaagaacatctgactgcagaactgacgctctcagtggacagggcatctgtatagcctgagagctgtggcagacacgtcttgtaaacattagattttagtatacgagtgcagtattgcagagtctagaggaattaatgtttccttgattaacatgattttcctggtagaaacatccagggcatgg

SEQ ID NO: 619851 - DNA, 104 bp, Homo sapiens
tgtcaccgtagccccagactgggcagagaaaggaaatggcacatcactcacagctgacagtctagagactcgtcagtgattatatcagagaaggctgtcttccg

SEQ ID NO: 619852 - DNA, 110 bp, Homo sapiens
ttacaacccttttgatgggcccaatgagaacccggaagccgagctgcctctcacggcgggaaagtacctctacgtctatggggacatggatgaggatgggttctatgaag

SEQ ID NO: 619853 - DNA, 307 bp, Homo sapiens
ctgggtaaaattttttttttgttgagacggattttttatgttgcccaggctggtttcaggctcctggggtcaaatggtcctcctgcctcagctttcaaaggcacaggccaagttggaggtttgtcccttgccatcaagcccaacaaaagggtttaaaccctttaatgaaatgactttcataaattggttatgttggtgggcaagttttttaagctggaaattgtaaattcctcctgaaaagttttttcatgcaggttccatgaactaatactccaataaaggatggttttgggggtcaatttttgga

SEQ ID NO: 619854 - DNA, 532 bp, Homo sapiens
ttctagaggatcccgactcatccaacgccgcacatttatttatgtttgttacaactgcatccaggaatcaatatgcctgccgaccgtggtggattagcatcttaatgtgctgctggatatgatttgttagtattttgcgtgaggatttttggtgtctatgtttatcaggatacttagcacaagttttcttttttctttgtatctctgccaggttttggtatcagaatgatgctgacctcatagaatgagttagggagaagtccctcctccttgattttttggaatagttttgttggttttgtaccagctctttcttttatgtctggtagaatttggctgtgaatccgtatgtcccagggctttttcttgttggtagcttattacagaatcaattttagaactcattattggtctgttcaggatttcagtttcttcctggttcaatcttgggagatggtatgcttcctggaatttattctttttttttctaggttttttagtttgtgtgcatagcggcgtgggatgcagtcgg

SEQ ID NO: 619855 - DNA, 1253 bp, Homo sapiens
  misc_feature (108)..(108): n is a, c, g, or t
  misc_feature (349)..(349): n is a, c, g, or t
  misc_feature (509)..(509): n is a, c, g, or t
gcggtgtctaactgctcgctctgttattgctgtagcttgtagagtcgcatcctgcgtggtgcattggtagtgatctgtcctcactgattccggtcggcagatcacgcngggtgttacacaaaacttcctttttaaaggtgcaacccgtcctcaggagttcgccccttggcggcgaacctccgcaattccccaacacctgggttttgtggcccgccccccccttagggtagagggaccccccgggcgcccccggaattcccaagcgcttcccgggacttctttaagccttaaggcccctccgggggaccggggattaaaccaagtgggtcgaaacccaccacgggggtanacaacgctttatggcaccccatttaaggggccctcaatttttaaggggggaacacgcttaatgagagagcacaaatgtttggaacacagaaaaaagccagggcgtgggttaccccgggttccgcgaaatttccccgcggataaaatttcggtcggaaacnccaacggccgtttcacgcggctttggcccctcggggggaaaactctctgggacaacccctctggggcctctttgggaaaggtcttctctgtgagaagatcctccttcacaaaagctcggaggttctgttcgcctctctataagagaatatcttggccccacagtggccccttatagagatatcacagcgagaacccctgagagtgcccacagagagtgaactgcgcacagttgtcacacagggagaagaaagagagaattgttggtcctgaacacaccttggtggcacatccaaaatgcctcggagatccccgttgagcacaccccacaaaccccacacaagggagaggaaagccctggggaaagtggcccacgtgagacttatatggccacaagggtttgagatgccttaaaccccccccaatttcttgtgaagaatggagatggcccagtgcacagcggtgagccttgaaagtgtttgcacatgggcacatgttgtgggagaaatctctgcggtttctcccctgtgagaagcgcttgaattctcctgccaatatatggaggaggctctggaagtcctgctctgtgtggtccacggtcctttccacaccctgagaacttggctccacccacctgagaataatcctcctttggggaaaaggcttggcacacaccaagcacggcttttcaagaaagtgccacgttgatccaatgaataaattaacgagcctatttttctttgcca

SEQ ID NO: 619856 - DNA, 109 bp, Homo sapiens
tcctgacaggctgatgagagttatgaattagattttctattacaatgagatcaacactttaagactactgataaaactaaatttcgtggggatagacagtgagcagtga

SEQ ID NO: 619857 - DNA, 103 bp, Homo sapiens
catggaattgcgattggactcagggtcaggtgaggggtttcggtctctcaggaagttaggccataatttctgcaggttcagtgattaacttggatccagtccc

SEQ ID NO: 619858 - DNA, 462 bp, Homo sapiens
tttatttgtccccctttctctttttcatcgttccaaggtaaacgccttgattgccgtaaaactttaaagcactggtattgcaaggctcccggcctccaccattgggtttttaaaacccgaaaaattgccttggctattcaaaagatttctaatccatggggggtttccttgggctgcccggctggaaaaacttcttaagtgggggcagggtgcggactcttgtttctagggccctgactggacggaagctggaagtaaaaatgggattacactctttgccttatggaggaaggtccaccataataattgtgccccggctgaccttgttgccaccagggtaggcctgcgcacggctcttaaagactttttcaaaggcagggaaaggcagatttttcattttcttttcgatcaaggcaagcttggcatttttttcctaaagtggacatacccgcctaggtaggc

SEQ ID NO: 619859 - DNA, 113 bp, Homo sapiens
ccctcgtccgacggtacccaacaaatggcgaagtcgaatggctatcggttccttgataccatgaattcacttttataaacttcagaaatcacgtctaagtctccataatgctg

SEQ ID NO: 619860 - DNA, 203 bp, Homo sapiens
gtgactctagacgatcccgttctagcctcgccgagtgtagtggctcacgccataatcccagcactttgggaggctattgcttagcgcaggagtttgagactagcctggacaacatagggagaccctgtctccacaaaacttttttaaaaaaatcagtggggtggccgggtgtggtggctcacacctgtaatcccagcactttg

SEQ ID NO: 619861 - DNA, 103 bp, Homo sapiens
accataacgacgctttcataacaccctccgtaacagcgcttcataacagccctcctaacatgcgctcctagtggctaagatggagccaccgcggcgctcgtta

SEQ ID NO: 619862 - DNA, 106 bp, Homo sapiens
tggtactctctctaaatagcctattctaggtaccccacacaagtggaatcatatactagtcctttagtagtctagcttatttcactgagacatacatgtagtcaaa

SEQ ID NO: 619863 - DNA, 244 bp, Homo sapiens
tttctgaattcacgacgcgtttcaccacatagcggttcatgcttggcatatcccatttcggtcacacgtagcaccgttgtctgacctccaaatatcgttcagctgtgagcctggtcgactcttgagcatcctccagtacccgagcatacttgcttgcctgctggtcgatcgtgatattacaaacatctgaggtgcatgtcttccctggacaatgtaccgtcgacgactgtgatgcaccgttgct

SEQ ID NO: 619864 - DNA, 303 bp, Homo sapiens
catgaagcgagacacaagtgacgcctctagaaacgtggttagtgcaactgaggaaggaatatttaatcttatgtgattctaatgggctcacctttaaacagccgcatgtggttactgtatgggctagcacagccctagagcctgacgaaagcaaaccaaagaccaccagctgggtcccaaacagaaggccgcaggggtagaaccatccacctcaactcatccagccccatcagaaggcaccaggaacagggcaagagaacaaggcaaaaacccacccagccacgatgaaagatcactcagtca

SEQ ID NO: 619865 - DNA, 102 bp, Homo sapiens
aatgtcaagtaactataagccctacatgtcagtcaaacataaaaagcattactcaggagaactctgcctaattcaatcagcaaggaagaggaggaattcgcc

SEQ ID NO: 619866 - DNA, 331 bp, Homo sapiens
  misc_feature (16)..(16): n is a, c, g, or t
tcatctgatatggttnggctctgtgtctccacccaaatctcatgttgaattatgatccccagagttggaagtggggcatggagggaggtgactggatcatggggatggtttctaatggtgtagcaccattcccttagtgttgtctcatgatagagttctcatgagatctggttgtttgaaagtgtgtagtgtctcccccttcgctctctctctcctgacagccatgtgaagatgtgtttgcttctccttcaccttccgccatgattgtaagtttcctgaggcctccccaaatgcagaagcctgtgtagcttgcagctatgagccgttcctg

SEQ ID NO: 619867 - DNA, 692 bp, Homo sapiens
taggaaatgaggtccagagcagtgattttttttttccaagagtatttaagtaatttggggttttacagaacccagtactaaaacacaggtcttctgacttttgagcttttggctcttcagctttcccttataaataaatgttgggattaatggattgatgtcaaaaataggtcccttttagtgttggctccttccgactccaggtcagattctttttttaaaatttctttctaaaaaagcttaactcagattcttaatacagattgtcccaaagcacattaggatggtggagttattcttaccaacttcagtctgaattacttttaaatttgtccccaaaggtggtttggacattatgggtttactctgatctttattctcgtgtcttctgaagtcccgtgtaatagatactctaacccaagaaagtgatggctatttagatttcctttggcttacaattctcattcccaaagatgtctcccttgggttgtccaaaaagcttcctgaggtatagtaacttttagaagaggaattaccgctttataatccattggggcccttgagaatggtgctatgtgtggacaggtgtctaggctggtattattccaggttgcatgaaaagcccagaaaccttgatgacagatggtctggttttaaagcattttttacgtaaaatcatcatggtgcaccct

SEQ ID NO: 619868 - DNA, 206 bp, Homo sapiens
gtctgtggttctgtaaatggcatgcctatttgcagcaatcctgagtgctagatttgcatcttggttctctttgctaatgcatattctgctaacgaccactcataaaccacttggccatgaggttcctctttctcttattctttagaggacatatcatgtttgtgcaaatggtgtgccaatctgcacaggtcacggtaacaccacag

SEQ ID NO: 619869 - DNA, 567 bp, Homo sapiens
caacgatggtcctcagcttgtgatcgagagtcaattctcctaataaactccccttcatagattcatctattctacgagtcctgtccctctagagagccccaactaatacaggcactgaggggtgggggagagctccagttctcagctccttcacctgcttctctgtcacagttttgggattcctcatcaccttggtggcacggaagccattacagatgggcaatggccattttaaagtgttctcaaggcggagtgtcctgcagtccatggctgtgagctgttgactggagaggaaggcaagaatgattcttctctgtggtgtgggagtcagatgattttaaaccatccaaagacagaacagctatgttaacagccacataggttgctagatgatattaaatctgtagtcagctagaaaacccagttcttttcatatttaccactgatcaactttagtcacagaagcataggtctgcaattgatacagaaaactcatttcagctgaggaccatcgttcaacgatggtcctcagctgtatttataccactttccagaaacctggtcagt

SEQ ID NO: 619870 - DNA, 414 bp, Homo sapiens
gtgactctcgcaggatttcaggattcgtagatcagttaagggaagatagtcggaggctggctttggctgcgaaaagagacaccaacgaacagagaagagaaggagaaccaggagaacaaagaaggaaactagaagaaatgaagccataaataaagagaactttgaactccaagctgctcaagaaaaaggaaaagcttaaagttgaagatgagcctgaagtcttgacagaacctccaagtgccacaaccactaactaccataggtatattctgcaacctggacaactttgggaggttctcatgggtaaaagaaattataccataactacaaccagttcaaagaggaaaaaccaggaaaaataaaattacttccagaaaacgttcaaattatattttgatgattctacgaaatcct

SEQ ID NO: 619871 - DNA, 749 bp, Homo sapiens
gaactcgggggcggccactgcgcagaccagcacttcgctcgttagtcgtgcgcctcgctctcctgcattcttgctccgcgaaccattgtctggacaaagagccacgatatggcttggagtatcagagagacattctgatcaagtgcgaaactgacacgaagaccagagacgcgacgagaaagagatccgactgcctttccgagaagagaacgagttgagacaaggagatagaaatgcaggcggaatgcgtaactgaggcgtgcagccgtcatatatgcacatgtacattgcccttacatggcattggccttgcttattgtcacgttcttttggagctgtttagcctttgttagatgcacagaggttggatcaagtttaagatgactgtgctgccccgtttcacatctaaagaactacgtgacaacgaaggccgcgcctgccttgtcccatctgtctatctatctggctggctaggggagaggaacaagaactttgcagtgtgggtgaaggacagaagtggggtggcaagaagtggggtgggacgacagtgaaatctagagtaaaaccaagctggcccaaggtgtgcctgcgaggctgtaagtgcagtttaatcagagtggcatgtctctggtggtccaaatggtttaaattatggggatgcccaattttgttaagtttgcaaatagaggttttaatagttaaaaaaacgtgaagataaaatttttttgggggcagggctcgaaaaatta

SEQ ID NO: 619872 - DNA, 286 bp, Homo sapiens
atgctgcggttactctgaggactccccgtggccggaccacgtagtcgtaggttcaccagcgacgccgcgagtcgagagaggagccgcgggcgccgtgatagagcaggaggggccggagtattgggaccggaccacacagatctacaaggcccaggcacagattgaccgagagagcctgcggaacctgcgcggttactacaaccagagcgaggccgggtctcacatcatccagaggatgtatggctgcgaggtggggccctacgtgtccggccacggttaccgagct

SEQ ID NO: 619873 - DNA, 200 bp, Homo sapiens
cattgtatgagcctggactgccagcttctgtattatttaaccagtagcccgtgttaagtctaccacctcttatatctttaccacagaaaacacaaggtcttatagtgatcaggtcattttccccaccacagattactgatacaggtcatatttactcagtttccaactgagattagtatatttgtcatagaaaatatctg

SEQ ID NO: 619874 - DNA, 1034 bp, Homo sapiens
tggggagtcatgtgccccttaataagctgacgccattatcttgaaagggataaagcgggaggattgggtggccccgaatgccgggccggccatgcttaacggggcttgtaggtagatgggaaaactcgcccaggtagtgggccgatcatctcgggcttgatctccaccgggttagaagtgtcttgccgttgtaaacgcccaccatgctggcccaccatctcgggtaggatagatcattgtcccgcaggtgcgtcttcaccaatttccgggcattctccaggggcggggcctccttctggcgccttgccgcaggcgcttccacgcagggagctgctgctttccgccgcaaggccccgggttcacgcctgccgccgcttggccgccgcatctggtcacacgttctgctataagctggctcgaaaggactattgcccagcagtctggcgtacgagtgtccaagccgcgggtaaggtagaacttcgccgaaagggtccgtatactaaccttctggctcctaacttctggccattcttcgccggagaagacgccaggatgcaccaggggggtggcccaggggcccccttgggtgggcccttgcggagtggggaaaacccgcggatgagctcaccgcaggagcgtatacgcaccagggggcaatccggggagcccgagaggcacagcgcgcctgatgagaccgcggcccgggtggcaccgaaggcgcccgcgggacgactccaggcgcgagcggccagggccccgaagggcaaatcaacgggacgactggacatttcgcccccgttataacccaacaaatgttggggcccgcacttgggcctccaaagcggcacgccttgacgtcattcgagggtttccccccggcagcggagcacacactccagaccgtctgttcaccccccgtgggtccctaatgaacggggaccgatccccaacgtcatctcatctgggattccctatctacggggggggggaccctcctctacccaaggcgactgcaagcacgtcgaacaccacct

SEQ ID NO: 619875 - DNA, 291 bp, Homo sapiens
accttcgacgatactcacctaatagatcggaacatctttcgtgtgatgtatggcggctggtacaacagccgtgcacagctgatagtccaccttttacaaccactctaaaaaacctttgggcactatacagacgtcaaggctactttgatgctgcagaaacgttataatgaagctgctatcaggtctcttacacagggtcttgacaatgttcacaaacagagggtggcacaagtgctcaatgaccctaagaacatcgataagcgcaggagccgttagagtctccgtcgaact

SEQ ID NO: 619876 - DNA, 381 bp, Homo sapiens
gatatcacgcttatccacactgctgagtgggttataaagtctaagccattgtaaaatacttaacaagctgcagataccatgtgaacttcgtgtcataattcttgctgcacgtcacgagtgtaaattaaagaaatggtaggactcatattattcagttgtaccccagtatttaaaaatgactctcttaagccttaacaagtcactatgctttgtcctgactgccagcaattatattacattattcattaatgttcattcattcagaaacaaaaatttcaaggcagtcgagcagtcaaagaggcttaattagtttgtgggcagttttcatatgctctgtgaaatgtgtccagatgtgacatagttttttttttttaaatatgg

SEQ ID NO: 619877 - DNA, 309 bp, Homo sapiens
  misc_feature (269)..(269): n is a, c, g, or t
  misc_feature (292)..(292): n is a, c, g, or t
tcggtacccccatcaggagtcaggctttaggaaatcagaactcagaaaacgagatcctcctggaaggcgatgatgatactctgtcatccgtggatgagaaagatttagagaatcttgccggtcctgttagcctgagcacaccagctcagcttgtggccccctctgttgtagtaaagggcactctttctgtcacctcctccgaactctattttgaggtggatgaagaggatcctaacttcaaaaatcgaccccaaggtgagaagatgaangggtttcattttttcttatgagnggaataggtcagcgttg

SEQ ID NO: 619878 - DNA, 1006 bp, Homo sapiens
  misc_feature (115)..(115): n is a, c, g, or t
acagtaggaatagacgtagacacacgagcatatttcaccgtccgctaccataatcatcgctatccccagccgtgcgtcgaaatgtagttatacgctgacgtcgaccacgactccnacggcaacgcaactcatgaagagtgactctgcatgcatgatgcgtcgtgagaccctaggattcatctttcttttcgaccgtaggtggccgtgactggcgttgtagttagcagagactcatcactgagacatcgtgactacgactgacagcgtactacgttggtagctcgacttccactatgtcctatcagataggagcttgtattgtgccatcataggatggcttcattgcagcgtgatttcccctattctcaggctacagcctgagagcctaaaccgttacgccaagaatccatttcagtatcatattcatcggcgtaatagtctaactttctgtgcccacaaggactttcgtcggcctatccggaatgccccgtactgtgactcggactaccccgatgcatactagccagtagtgagacatcctatcatctgtaggctcattcatttctctaacagcagtactattagtaagtctgcagtgagtcgagaaagccgtcgcttcgaagggaaaagtcctaatacgtagaagaaccctccataaacctggaggtgactagtctggatgccgccgccaaccgtgatcacacatttcgaagaagccgtaatacggtaaatctagactagagatgggacggaattcgaaccgccgcaaggtggtttcgaggactaatcgcatgtgctccatggacttgttttatagatgcaagccacaagcttagggttgatagcccacggttggaggccgcatggagcctgacagaaggcttttgggaaccacgttcctttgggaccaggtcccaataagggatatcgaaactcggggccgatagatttcgcacagaaaggccctgcgaggacaaagtgtgggatatctcccacaaaataaggc

SEQ ID NO: 619879 - DNA, 400 bp, Homo sapiens
accagtcctggccagggcagttaccaggacggtctccggaggccgggattcgcggagggtccagcagcaggaagaaaccccaggaggaagaaacctcagacagatcgccggcgaggcagcgcgggatcccagcctcaggcgtgcgcggacggtgtgcgggtgagtctccccaaaagtggagcccttgtgatgacgagcacaggtccgcctgcgtgcccgtgggcggccctctcaccggtggctctcagtcgtggagagcagaacccggcagcttcaggggctgcctgcgggagggtgttccctgctgtacgtgtgtgttcgtcatgggtgtgtgtgtctgtgtgttggggggggtgcgtctgtgtgtgtgtctgtgtgtgtgcgcgcgcagtgcctgtct

SEQ ID NO: 619880 - DNA, 1127 bp, Homo sapiens
cacccccagggtgggccttagcccctggggttgtcccttatagtgaaggaagaagcccctttgtggcgccgccgctttgtggtggaggaagtgtatgcccgcgcttgtgccccgtggggcaaagagggggttcccactatttggtcccccaccaatcatttggggccacacagcactcccctcttgtccccgggtcacaagtccagtgtcctgggagcctgtggcccccgtgcccctctccacgttgggagggttgtctctcgcggcgctctgtggtcaccccccgtggggacactttctctgaagcgttcctgtgtgcccgctgggttctctgtggcccccggggcctccctgtgggcgcacgggtccacctccccccagggcctcactggctttctttagtgggtgcctcccgaggccccccttggtgttgaagaccccacgaaaagaaaggggagaacccaccgaggaaatttggatcccgcggtgcacattttgtcaccaaatcgtccacggggaactccctctgtggagggacccccccgcccccttcctggaggttgcggaatccacggattagcttttccggattttttctcggtggggatattctgggcccactgtaggtgtgttaaccaccgggagcatttcttggggcaacggcgcctttctcacccgctgttcccatgcgctctcctctataggccccaaggtgaatccctggaccacagcgcaccacggccaagaacccagaggtgtatcgggcttcttttcaggcttcacaggacccccggcgaattacggtgcgtcccccatgccggtggagatcgtaattgctgaaaataatgttgggctctgcgccccccctaccaagctttccacagagacactctgtgaaggacccggcaattctggaacgtggtgccgccacagaagcccgcaagcgtaaagaaggaacctgggcctcgcagatagggttctgtggccccagcaccccgcctcccaccctcggccgggcgactgggtcctcccctccagtttcttctttggaacaacccccccctttccccccctcccctgcccccaaacccgtttccaaaaaatttacgtttatttcccccccctta

SEQ ID NO: 619881 - DNA, 975 bp, Homo sapiens
gttctcaccgataaagcacgtaatcgacggtgtgaactcatgttggctggggggcctcccggggcgcgcggagaggctggggtgcgcccacatgcagcatgcttgtgctcaatggcagggtccgtcgttctcgagtgtgcagagggcggtgagagctcaagtctcgttcccacctcccaccgcagatcccccggttgggtgagtggatgccctggactggggatagccaggtgggagtccgtcgctgtgtggactgtggatctcggaagttatgtggactccatgggaggctctcgtcggaattggcaccgcactacttcgtagtccctctcccatagactatgctctgggaagcgcctctgcactccgatcctagacggaaacccttcggggccaggagtttgaaaaccgtggaatgtgaccatgactggtggctagtcgatttgcacggtgactggattacactctctcattcatggtcacttccgaagcgctttagtgccttccgtccctaaaccgcaacagcagaacggttctccccgggttgtcactgatccgcaagggccggaaagggccttcgtttacccgggatcacctctcccctcaatttacctgctaactgtcatccaacttctgtactgggagaaatccctcctcctcgggtgctgccggttccggagtgactcggcagcagaccgagggccggggctgccggtgtcaccggtcagccaatggctgatcttctggagctgaggactcgggaaaacatgcatgaagcaacttgagctgttagagggtgaaatccgagagatatctggaggccaaagcggatacacggtttggaaaccatgagtaacgcgagcaatcgatcattgaagcgacctaggggatggcgcagcacggggttaggcagggccaagttggtttacaagcggtgcaatggaaatggggttaaagtttcagcgtgaaggcgcc

SEQ ID NO: 619882 - DNA, 855 bp, Homo sapiens
ggcccgcttggtgtggagccggtgtccagtggtacacatttggtcgtggagcgaattttgtggtcctggtgctctgcccctgtgtggaaccgacgtcgtctgtgtgggcgcgcccgccatatttttctgcggcggctcgcttttgtatatatggtgcgctgtgggtccccccgggagtctatctcgtggtgattgtcttcctcttcctgtcgtaaggtatttctctcttcaaggagtcgcttgtcgtgatgctggcacctttttgcgtcatcacgccgggagatggttctcccgcggctcgccggtggtgcgccctcggtgtggtgaggttgattgtccctctctctcacccgcggtgtcgacccactctttgtgtgggtaacctcaccacagtgatgtcgccggttccgccatctgtttgtcgtggagtctcttgctcgttttcttcgcgatgcgggccccacacggtgagtctgtcgctctttcgccgcggaggtggtccacgcatctgtgccgcgcgtgggggtgctcagttcgcgagttgcctaaccccgctgtggcccgtgcattctctggtgatttctctctcgtcagcgcggggtgatccccccgagcggtggttttctcgaagtaatgttttgctctcggggaaggaggcgcctctcgcacgcacacattggggtgccaaacgcctcttctcatttctcgggggcacaaattctttgcacagtggtaacattcttgtcgtcgccactgcacgcctgctgtcgggctcggcgccaccactgccccttcacgggacaatgtggggttcattcaaagaaaagctggcacccgttctgtcataacgcaaaa

SEQ ID NO: 619883 - DNA, 347 bp, Homo sapiens
  misc_feature (35)..(35): n is a, c, g, or t
  misc_feature (42)..(43): n is a, c, g, or t
  misc_feature (53)..(53): n is a, c, g, or t
  misc_feature (61)..(61): n is a, c, g, or t
  misc_feature (75)..(75): n is a, c, g, or t
  misc_feature (105)..(105): n is a, c, g, or t
  misc_feature (127)..(127): n is a, c, g, or t
  misc_feature (132)..(132): n is a, c, g, or t
  misc_feature (143)..(143): n is a, c, g, or t
  misc_feature (174)..(174): n is a, c, g, or t
  misc_feature (182)..(182): n is a, c, g, or t
  misc_feature (192)..(192): n is a, c, g, or t
  misc_feature (209)..(209): n is a, c, g, or t
  misc_feature (242)..(242): n is a, c, g, or t
  misc_feature (278)..(280): n is a, c, g, or t
  misc_feature (284)..(284): n is a, c, g, or t
  misc_feature (288)..(288): n is a, c, g, or t
  misc_feature (312)..(312): n is a, c, g, or t
  misc_feature (332)..(332): n is a, c, g, or t
  misc_feature (342)..(342): n is a, c, g, or t
tggtgacaatgtcacataatgaatgctattgaaanggttaannagatacagcncggagttntgagcactctactngcaagacttaaatagttcgagtataaatgncgtttttttcttgtgctggacnaactnataagcgatgntcttgttaatgcatttttgatgggaagaaanggtacatntttacaaagnggttttatgaaaagaanaaaaattgacgtcttgcttgtacatataggagnaatactattatattatgtagtccgttaacacctacnnnaaangttnaggggttttctccttggttgtagngtggcccagaattgcattcngaatgaatangggtt

SEQ ID NO: 619884 - DNA, 185 bp, Homo sapiens
  misc_feature (100)..(100): n is a, c, g, or t
  misc_feature (168)..(168): n is a, c, g, or t
aaaagtaaaaaaaaaaaaaaaaaaaaaaaggattagcaggcatggtggtgtgtgcctgtagtcccatctacttgggaggctgaggtgggaggattgcttnagcccaggaggtcgaggctgcagtgaactgtggtcttgtcattgcactccatcctggacaagagagtnaggccctatctctttta

SEQ ID NO: 619885 - DNA, 502 bp, Homo sapiens
cgagttagagagagttacgagagagagagagagagagagagagagagagagagagtagagagtttagagagagagagcccgagagagtgagggggagttttttatagtgttgagttagtcccttattttataggttctcttctccctcttttccttccgtctttctcgttccttcatgtctctttctctcttcttcctctctctctctctctctcctctcccttctcttctcttcctatcctcattttctcttcttttcttcttcctctttccttctttgtctcttctttctcctcttctctgcttttctcctcctcttttcccttccttcatttatttctttcctttctctctctcttttccttctctctctcttctctctgcttttctttcctctccttttctctctctcttgcattctcctctctattctctcttctcttctttccactccccttctatccttttctctctctcctctatcctcctcttcctctctcct

SEQ ID NO: 619886 - DNA, 144 bp, Homo sapiens
attgtaactatggacttaggtgatgatgtgtcatgtcggctcatcaactataacaaacataccactctggtgggggatgctgatgatgagggaggctgtgcctgtgtgggggaaatacatgggaaatttctgtgcccatttcaa

SEQ ID NO: 619887 - DNA, 462 bp, Homo sapiens
  misc_feature (22)..(22): n is a, c, g, or t
  misc_feature (97)..(97): n is a, c, g, or t
  misc_feature (219)..(219): n is a, c, g, or t
  misc_feature (250)..(250): n is a, c, g, or t
  misc_feature (268)..(268): n is a, c, g, or t
  misc_feature (325)..(325): n is a, c, g, or t
  misc_feature (376)..(377): n is a, c, g, or t
  misc_feature (435)..(435): n is a, c, g, or t
  misc_feature (438)..(438): n is a, c, g, or t
ttgtgaagaaccctcactggcnaaaccctcacccttgaggtcgagcccagtgacaccattgagaatgtcaaagccgaaattcaggacaaggagggtntcccacctgaccagcagcgtctggttttgccggcgaacagctggaggatggccgctctctctcggactgcaacatccagaaagagtccaccctgcacctggtgttgcgcctgcgaggtggcnttattgagccttctctccgccggcttgcccngaaatgcatctgcgacgngatgatctgccgcaagtgctgtgctcgccttgcccctcgtgctgtcgactgccgcgngaagaagtgtggtcacaccaacaacctgcgtcccgtgaagaaggtcaaatnnggtggttctttccttgaagggcagcctcctgcccaggccccgtggccctggagcctcntgncgtgtccctttcattgactggagc

SEQ ID NO: 619888 - DNA, 81 bp, Homo sapiens
catcctgaagacagcagcttctacatctgcagcccctgggtcaatgagcagttcttcgggccagggacacggctcaccgtg

SEQ ID NO: 619889 - DNA, 821 bp, Homo sapiens
cctgcgctgtgcgagtgtctgggagatggctggggcttcagcacctcgtgcgtcctgggccgcggacacccccgctggggcctggatgcccaacagtgacatcgacttgagcaacctggagctggctggagaagtacctggaagcttctgacctgcatagcctggctgcctggtgcatgatgcatgtgatgtgctgcatgtggccccagacacttgtgttgtgctggaaccctacctgacagaagtaattttccgtggtggaagaaagaacaacgattctccaaatgacgaaagattttgatagttggtggcttgccgtccacaccaaatgtctccctgtgatccccaaacatgctacttgtgaactgtgaaacaatgtgccatccaaaggtgatgcttcggcgtgccaattgttgggaatgatgtgatgctgtgggcttgcacctgaccctacctgccagcatggccaacgttgttccactagcttgtggactggccagttggctgtgggcgctcgacttgcgtgcatgcaacggtgaacaccttggttgtgctctccataactcacacaaatgccaagctgttccttggtggcctttgaaccggtaacttctacttgggggcctcctaagccccggacgatccccttgtttacccacagtggttgccccacccctttttggtcgcccccccgtaagcgtacccctccccttggcctctgctgtcccctaccgcctggtcgtggggtgacgcgcttggacctgacttggccttgtggcttccttggtggccacttgcattggtgcacttcccagccgatc

SEQ ID NO: 619890 - DNA, 385 bp, Homo sapiens
  misc_feature (93)..(93): n is a, c, g, or t
  misc_feature (159)..(159): n is a, c, g, or t
ctcaacctcttcctcttccaggggttccggctggtgccgttcctggtggagctgcgggcagtgatggactgggtgtggacggacactatgtcnttccctgtccagctggctgtgtgtggttgacgggatgccaacatcttcatcatcaaatgcagccgngagacagagaaggttcatgaagatttgcccgttttcttctaaaagttctatagctgtagctctgaagtttcgctctttgatccactttgagaaatacccgcagcccatagggctggagaagaagaagatcgtcaagtacggcgtgggtggccttatcatcctcttcctcatcgccattatctggctcccgctgctcttcatgtcgctggtgcgctccgtggttggg

SEQ ID NO: 619891 - DNA, 143 bp, Homo sapiens
tctagagaatcccctgaatggaagcagcacatatacaacgagattgtgaacatctaaccccattgcccggaaggactcacggcgccggaatggcatgaagctggagggactcatcttgcatggcaccggcgggcaaacactgg

SEQ ID NO: 619892 - DNA, 295 bp, Homo sapiens
ctagagatcccagtacagcgcaggcgtgtggaatggtattgtcggtcatagctttgtgtgtagtacggctctggtagtattttgtagctggagagatggtataattgtgacagcaacaagtattttatccccatttcacagatgaagatataggctcagggaaaataaataaatatccccaagagtcaccgggtactgtgcccaccccaagacacattctaagagctggcacatgttaattttaatgattatctgggtgaatgtattaataaaaggggaaagtggagccggtggt

SEQ ID NO: 619893 - DNA, 613 bp, Homo sapiens
  misc_feature (243)..(243): n is a, c, g, or t
  misc_feature (275)..(275): n is a, c, g, or t
  misc_feature (280)..(280): n is a, c, g, or t
  misc_feature (282)..(282): n is a, c, g, or t
  misc_feature (284)..(284): n is a, c, g, or t
  misc_feature (287)..(288): n is a, c, g, or t
  misc_feature (302)..(303): n is a, c, g, or t
  misc_feature (322)..(322): n is a, c, g, or t
  misc_feature (340)..(340): n is a, c, g, or t
  misc_feature (342)..(342): n is a, c, g, or t
  misc_feature (368)..(368): n is a, c, g, or t
  misc_feature (371)..(371): n is a, c, g, or t
  misc_feature (390)..(390): n is a, c, g, or t
  misc_feature (395)..(395): n is a, c, g, or t
  misc_feature (397)..(397): n is a, c, g, or t
  misc_feature (400)..(401): n is a, c, g, or t
  misc_feature (406)..(407): n is a, c, g, or t
  misc_feature (416)..(416): n is a, c, g, or t
  misc_feature (421)..(421): n is a, c, g, or t
  misc_feature (423)..(424): n is a, c, g, or t
  misc_feature (434)..(434): n is a, c, g, or t
  misc_feature (438)..(438): n is a, c, g, or t
  misc_feature (442)..(442): n is a, c, g, or t
  misc_feature (468)..(468): n is a, c, g, or t
  misc_feature (480)..(481): n is a, c, g, or t
  misc_feature (485)..(486): n is a, c, g, or t
  misc_feature (491)..(491): n is a, c, g, or t
  misc_feature (494)..(494): n is a, c, g, or t
  misc_feature (499)..(499): n is a, c, g, or t
  misc_feature (516)..(516): n is a, c, g, or t
  misc_feature (540)..(540): n is a, c, g, or t
  misc_feature (544)..(545): n is a, c, g, or t
  misc_feature (549)..(550): n is a, c, g, or t
  misc_feature (613)..(613): n is a, c, g, or t
cccgggggggaggaagcgccgggcgccgcgcgagaccgcagcggggcgggcggccagccggggcagccggggaagccggggaggacgggggcgggccgggcgggcgggaggcagggcggacggggacccgcggggaggcggcgggagcggccccgggggggaccggggggggcggggaccccagtcgaggggacacaaccggcccgggcaggggggggggcggcggcgcccggcagcaaaagnagcaggggcggaagcggaagaagaagcgagcncagcnanancanngtgtgggggggganngggggcagggggggcgggngcgcggagccgcggggtngngctgagcggcagcagccaccagggcngangcgcgcagaggccctgcgncggcnanganncaagnngccggcgcngagancnntgccggcgangcgncccnctcctctcgcctgcgggatgagggcnttggcatggacnncttnncaganganggganagaagaggggaaagaangggagaggaataggagagaagaanaagnnaaannaaaaagcgcagcgcgcagcgcgcaaaagcgcgcgcaaaaaatgcaaaaagcaaagcttttggn

SEQ ID NO: 619894 - DNA, 367 bp, Homo sapiens
  misc_feature (114)..(114): n is a, c, g, or t
  misc_feature (298)..(298): n is a, c, g, or t
  misc_feature (330)..(330): n is a, c, g, or t
ccactgaaaaagagctccaaattcccccctcaccccagaccctggtaaccactaccttcactttctttctgaatttcccttcacatgagtgggatcaaacaagagttgtcctcntgtgtttagcattcttacttagcaagccatcaactgctcgaacagtcactggggcaactacttttcgcccagtgtcctccagaaaagaaagatctggagggtcaggccactctttttcttaaaaataatggggtgcagaagggtagggatgaacctcttcctcctttgccactttagctttagntcaaaggaactccaactttttattatttgcangagttagctttctttgttttcacatctttggccttgc

SEQ ID NO: 619895 - DNA, 600 bp, Homo sapiens
cgcagtggctcacgcctgtaatcccagcactttgggaggccaaggcaggtagatcacctgaggccaggagttcgagatcaacctggccaacatggcgaaaccctatcactactaaaaatacaaaaattaacctggcgtggtggcacgcgcctgtaatctcagctactcgggaggctgaggcaggagaatcacttgaacctgggaggcagaggttgcagtgagccgaaatcacgccattccactccagcctaggcaacagagcgaactctgtctcaaaaaaagaaagttgggttgtaggctgggagcagtggctcatgcctgaatcccagcactttgggaggctgaggcaggcagattgcttgagcccaggagtttgacaccagtttgggcaacatggtgaaaccccctcttctacaaaaaattagccaactgtggtggtgagtgcctgtgatcccagctgctcgggaggatcacttaagcccgggagatggaggctgctatgaggtgtgattgtaccattgcactccagcctaggtgacagagttgaacacccatctcaaaaaacaaaaggctgggtgcagtggtcatgctgtaatccat

SEQ ID NO: 619896 - DNA, 171 bp, Homo sapiens
  misc_feature (49)..(49): n is a, c, g, or t
ttcctgcattgatgagatccgcatcagcttcgtctttcaagtgggctantgcccaggcccaagactccatattcactttgaagatgaacagtcatgttgggactgatgaagttgctggccagaagaggaatcccaatacccaagttagcgtacatgccgtcctcaaactcc

SEQ ID NO: 619897 - DNA, 346 bp, Homo sapiens
cccccggggtttcccctttttgcttccgggcggttttttggggggaatttggggggggtaccctttttccccggggacccggtttgcccgtttttgggtttttttccgcccccctttgggggttttggcccccggggcccaaattttgggccggggttttgctttttttgccccggggggggggccatgtggggtttttgggccccccccccctttccccccccggggatttgtttttccctggggggggggggtttccgggggccggggtccccccccttccccccccccgggggggcgggggggggccccctttccattttttttttttaattttaaaatccca

SEQ ID NO: 619898 - DNA, 128 bp, Homo sapiens
  misc_feature (1)..(1): n is a, c, g, or t
ntgagaggaatatatttgctcacctgatataatgggacatgtggctggcattgtcctttgctctattccttctaaatgtctttaatgatgacgatgatctgaggtgcagaagccttcttgcaatttat

SEQ ID NO: 619899 - DNA, 103 bp, Homo sapiens
acaacaaaagaagtaggtggatcaccaggtcaggaattcgagaacatcctggcctcctggccagcattgtgaaatcccatctatacaaaaaacacaaaggttt

SEQ ID NO: 619900 - DNA, 314 bp, Homo sapiens
ttagcaggatcttagaacggagctggactgacttaaataagcactacttgagcggggcgtggtcatgctgtaataccagccctttgtgaaggcgagttgggtggatcacctgaggacaggagttcgagaccagcctggccaacatggtgaaaccccatctctactaaaaatacaacaaaaattagctgggcaattggtgtcgggcacctgtagtaccacgctactctggaggcttgcagtgagccgagatggcaccatgtacactcagcctgggcatcgaagtatccagctaccggttctagggtacccaaaga

SEQ ID NO: 619901 - DNA, 121 bp, Homo sapiens
gatcatgccactgcactccagcctaaaagagcaaaactccaagtgaaggttgcggtgagccaagatcgtgccactcactttcagtaggagttgcaccactctactcacttggagggaggcc

SEQ ID NO: 619902 - DNA, 749 bp, Homo sapiens
  misc_feature (660)..(660): n is a, c, g, or t
ttttttgtatttttggtagagacgggggtctcaccatgttgcccaggttcctgttttccagttttctcttctccaagactaccattttcaactcttagctaattctttggtaattacatgtatatattaaataatatgcttggagctaattcattttttttttttttggagatgggagtttggctcttgttggcccaggctgggggtgcaggggtgcgatctcggctcactggcaacctccgcctcccaggttcaagcgattctcctgcctcagcctcctgagtagctgggattacagggtacgtgccaccaagccgtggctaattttggtatttttagtagagacggggtttcaccatgcgggccaggcgggtcttgaactctgtgacctcagggtgatctcccaaaggtgcggggattataagtgtgagccaccggtgccgtggcaggagctaattcttaatttcacgtttaggctttatctatggagcttctcctgggttaagggtaataacggtcgctttatgaatctggttaattctctcctggtaattctggccagtttggctcaaggcatattactcattcttctatcttccaatatacttcacacattttggttagatcgcattcgcaagttgtccgtgccgtttggccccngactttcagggcgggagccgacttttatggccagatccgtttttgacgctccggcggaaccgggcggtcggcaatggcgcccgtggggg

SEQ ID NO: 619903 - DNA, 494 bp, Homo sapiens
ccacgcgtccgagcaaatctcagacctgtatgagatgacttttgtaatttgagtctttttttctttgtcactgtagctaaaagtttgtcaattttattgatcatttcaaacaaatccaacttttggatttattaatttttctgttatttttctattcatttacgtatgttcttcattctttccttctgcttcctttggttttagtttgctcctctctacactttcttaaggtgaaaagttagattattgaattgagatctctttttttaatgtgggcattcatagcaccacttttgttgcctcctataaattttggtatattgtatttttgttttcattcatctgagtttcctagttgccctcgtgatttcttctttgaaccgttggttatttaggagtttgttaatttccatatactggtgaattttctgaatttatttctgtattgatttgtaatttcattccaagtgatcagaggacatagtttgtataat

SEQ ID NO: 619904 - DNA, 401 bp, Homo sapiens
cttgatcagccatttatttataccttttcgctctttccgcttaaaaatttgaagtcatcacgagtgaactgttgaccacgttcaatcttcgctttatcttcagcagcaaacttttcaggagagaatacgcgttctatttttctaatgttcttagtgtgtgacttaccataaaagtcgtcaaacttttgataaacaggcgaaccgttacgtttttgagatttagcttgttgattaatgaacgcttgttcgtgcatttttagtcgctcatcttcttgtcttaactgactagcttccatatacatatagtattcttgcatgtccagtctttcaatatcatcaattctaaagctattaaaatagcgcagtccgtcacccactagtctatggtacgtacctgcgct

SEQ ID NO: 619905 - DNA, 119 bp, Homo sapiens
tccgaccgcctcggcctcccaaggtgcctggcgattacagtgtgtgagccacatcctggctcattcatgatcttggccacaaaggaaggattttccctggtatatgtctgcgttgccca

SEQ ID NO: 619906 - DNA, 1390 bp, Homo sapiens
ctaatttttgtatttttattatagagggggttttgccatgttggtcaagctgggcgcgatctcctgaccttgtgatccacctgtctcggcctcccaaagtgctgggattacaggcgtgagccaccgcgcccagcctttttttttttctttttgagacagggtctcactctgtcacccaggctgaagtgcagtggcacgatctcggcttactgcaaccactgcctcccaggctcaagccatcctctcacctcagcctcctgagtagctgggagcacatgtgtgtgccagtacactcagctaatttttgtatttttggtagaacggggtttcgtgatgttgcccaggctggactcgaactcctgagctcaggtgatgcgcctgtctcagcctctcaaagtgctgggattacaggcatgagccaccatacaaggccaaattttttttttttgaatcaacatagtacctggagtcctatttcctgataaactttttagactagcgtattttgcagagatggttacttcatggccgaaaccctttaccagcagtttttcagcacaataattttaagaacctgcgcaaaatcccaaatgaaccttacttaattgatttttactcaagaaccccactaatcccttcattttcggaggacccttcggcacttagttctcccaaaagggaaccttaccatatagcggaattgagaccgagtctaagtctctgctactgtaccccattgacctggttccgagcctaaccttgggaatcacagtcacttgcttagcggaacccaccttgatctatgagtcgaaatccctcgctgcatgtatggctctttcactcaagtgaccctgtatctgctggacgtccctgcttttttctgcacgcctggtcacgacaacctcaccgctccgttatataacctccgtttactctccttcacgtcgaacgctccccttgtcccttcgccccacatttcgcttcctctttctccctacgtcctccgttcttcgcctctccatcgcattcttcctcctcccttcgtcaacactgtaactccgcttctactcatctatcacgcctgctccatacaacctatgcacactcttctcaacacatcctcgtgtctccacattcgtacataccgtatcgtctctctcacgcgctcacctcgcactcagtgctcctctcacgcggcatatcactagctgcgtctctctcctcttacttctcgatctctgccgcttcacccacactcgtcatcctcttcactcacttcgtctctgctcgaacctctcatctgactcatcgtctacgcttcagcgcgcattacgcactgctttcagcgatccccatctctctgtcatgcgtgtctagcgctctgtccgcg

SEQ ID NO: 619907 - DNA, 319 bp, Homo sapiens
cctccccctacttaccccctcttactttatcaaagaaaacacttcatttgaaacttaacggaagtacattctcccagagaggaaaatccttcaggacaacatttttttttgtttgcttgttttttttgagacggagtctcactctgccctccagcctgggcgacagagcgagacatgagaatctgtcttaaaaaaaaaagaaaattgaccatatatgtgaggatttatttctggtctctccattcagttgattggtctttatgtctatctttatgtccttactgcactccagccttggcaacagagtgagactctttca

SEQ ID NO: 619908 - DNA, 320 bp, Homo sapiens
  misc_feature (38)..(38): n is a, c, g, or t
  misc_feature (113)..(113): n is a, c, g, or t
  misc_feature (150)..(150): n is a, c, g, or t
  misc_feature (244)..(244): n is a, c, g, or t
agcggctcggttgacggcgagtttgagatccaggcggnagatgacgcccgggcccggtagctgggacctggaagacccctgcccaccttccccacctcggtttgcacctcggntgtggagccttttttcgggggggatggtgcgtgcccngaacaagatgaagatgaagtctggtggcttccagtccatgggcctgggcttcccggtgttcaatggcctcatgaagaatgggttcaaggtgccnactcccatcccgtggaagaccatcccggtgatcttgggtggcctgggcgtggtggccctggcccggtcggtcagtg

SEQ ID NO: 619909 - DNA, 1383 bp, Homo sapiens
  misc_feature (265)..(265): n is a, c, g, or t
  misc_feature (822)..(822): n is a, c, g, or t
tatcataatacatatagtgtgggtgtaaatagttgtgtaaaaatcgctcttgtccactacacaaacgttggggtggaggattatatttataacccccgcctaaaaaaaattggggtgataggcacctcttttaatatgacgactgtgtgacacctgtgtcccctctgattttcgtctatggggggaacaattttgtgcggtattttttgctgcccccccccctctcttcacgagagaacctgtggggagttataatgatgtggtnaaagagaaaagtggtatttataacagcggccccccaccttttaataaaggggggcttttttcttccaacagagggtgataacacctttttggttgtatgtgacaccggtggtgttgtccgcgagccaaaaaaaaacacacgcgaattaggccgcgggtgctcgagacagatagtttttgtggacaaagtttatttcccacattttctctgtgtggtgtacacccccccctggggggagcacccaaaacttctctttatttgcgcgcccacgaaaaacacccacatctttatagagaggtgtggcgctcacacacaaatagagatctcttttttatatagggggtataaaataaaaaatatacgacccgccctagaataattgtgtgtatataggagcacgccgctatatttctcaccccaattttttctgggggggcatcccccttttttttagtgtctcccctacatgagagggggtttttcttatatagaagagggtggtgttgtctctctctctgttatatatatcatctctccgagagactcccttttgaggnatataccacacacactgtatagacactttatatatatatatctattaaatagagagaatatatattgtgtcacacacactctctcttctctatatatagatatacgcgacctttttttcgtcacacccccccacacacccccacacccccccccccccccccgctctatttttctctctctctttttttctcctctgcggatattagagagcccacatatttgtggggatgtaagagaagagagagagtatatagagggatctcttagagggccccacacaaatagaaatattatactcttgtgtgaaactcttttgagagagaggatatcctcctcaccactatactactgtgtgcatacttgtgcgtctttatacacacaggtggttataagcacgcgaaaccaccgtgggggtatatatatatgtatggaaagaagtgaggctttttgtcccccagtgggtgaatatcatcttcttgtggtttgtgttatatgtgtttaataactggtgtaaaaacacaccacgcgaccattaaaaaaatattttttttttacccaca

SEQ ID NO: 619910 - DNA, 224 bp, Homo sapiens
  misc_feature (3)..(3): n is a, c, g, or t
  misc_feature (9)..(9): n is a, c, g, or t
  misc_feature (44)..(44): n is a, c, g, or t
  misc_feature (69)..(69): n is a, c, g, or t
  misc_feature (78)..(78): n is a, c, g, or t
  misc_feature (98)..(98): n is a, c, g, or t
  misc_feature (106)..(106): n is a, c, g, or t
  misc_feature (123)..(123): n is a, c, g, or t
  misc_feature (135)..(135): n is a, c, g, or t
  misc_feature (140)..(140): n is a, c, g, or t
  misc_feature (148)..(149): n is a, c, g, or t
  misc_feature (156)..(156): n is a, c, g, or t
ggngggtgnatgagggagtgaagtggattacatcctgggctgangatagaggatttttaagagagacgnctgcagacnaggttttcaagctgggcttngccaagtnccatccaccacggtcgnttgctgatccgncagcnccatatcnnggtccgnaagcaggtggtgaacatcccgtccttcattgtccgcctgggttcccagaagcacatcgacttctctct

SEQ ID NO: 619911 - DNA, 246 bp, Homo sapiens
ccacctcagcctcctgagtagctagaaatacaggtgcatgccaccagggcagctaatggtgtgtgtgtgtgtgtgtgtgtgtgtgtgtgtgtgtgtgtagatagacactcaatatgtcgcccagggtggctctcaaatgcgcgctctcaagccatcttacagagtggtctcccagagtgctgggattagaggtgtgagccaccattcccaccccttatagtgtgtgtacgtagggtatagaagtgt

SEQ ID NO: 619912 - DNA, 260 bp, Homo sapiens
  misc_feature (212)..(212): n is a, c, g, or t
  misc_feature (254)..(254): n is a, c, g, or t
agagtgtgtgggtatctaagtccggcgatgatggtgatctcggtcatgagctcgtctccatgtcagcattcttctggcgcagcctccgagtagctggattacaggccatgcaccatgcccatgtactttttgtatttttagtaaagacagggtttcaccatgttagtcaggctggtctcgaactcctgaccttgtgatccacccaacttggncttccagtgctgggattacaggcatgagccactgtgcccggncctgga

SEQ ID NO: 619913 - DNA, 630 bp, Homo sapiens
  misc_feature (245)..(245): n is a, c, g, or t
  misc_feature (248)..(248): n is a, c, g, or t
  misc_feature (269)..(269): n is a, c, g, or t
  misc_feature (277)..(277): n is a, c, g, or t
  misc_feature (295)..(295): n is a, c, g, or t
  misc_feature (298)..(298): n is a, c, g, or t
  misc_feature (303)..(303): n is a, c, g, or t
ggcgggaagctcgcggggctgcagcccggcggaggccccgggcctggtgttccgcacgttctaaaccgcctgtccccgaggaagtcgggcagggtcgggccggactcagcgccgctggcgggagcgccgtccgccccgaggaccctgcgggcccggaagccgagacagggccgcccacgtcagcgcctggcgcgggcccgaacgtaaatggcgctcctccgcgccgcagccgcagccgcacccgntcncttcccgctccgcagctgcgncctcccgngctcgcttctcgccccgnggnctggnccgtgcgcctccgaggctggccaggggcaccgaggcccggcggagcccaccatcgaccccacaaaccagaagccctggatgtgaccggtccgagagcccggcggaacaatggggaaccccgcagaggcagacagcggcgccttgccccccgaagaaccacggcattgggaagcacgggaaacttgatggcaggacctcccgtatcccgacgaggataccctgactgtaattgtccgcttggtgggaccgtgagggaccgcggtccctgggggatagcccctgaagaaagccgtacggtgctcccccttttcgacggcccggggaaag

SEQ ID NO: 619914 - DNA, 221 bp, Homo sapiens
ctgtacagagctaaggtcgcatactgtcttgctagtcaaattgtgctacatgcagacacaatccgatttccctaccacggctccacactatgggccccgccacaccggagcgcaaacatagtgactcacactatacagtgacattctctactagtcccgctccgcagttaacgtacgttgcagacgagatgtacgagtttctcgctgtaagacctgtatcc

SEQ ID NO: 619915 - DNA, 323 bp, Homo sapiens
  misc_feature (21)..(21): n is a, c, g, or t
gacgtctagaggatcccgaanacctaattacggggttgaatcagagctacagttggcttgtttacaccacagctcacagttctgcatctgcaactatacacagtcacaccaacgctggatccctgaccactgagtgaggccagggatcaaacccacatccctcatgcatactagtcagattcctttctgctgcgccacaacatgaactccaatagtagacactctgatgggtgtgaagtgatacctcattgtggttttgatttgcatttctctaatgattagtggtatgagcttccttttttatgcttgggtaattagggttt

SEQ ID NO: 619916 - DNA, 1278 bp, Homo sapiens
ggcgacggctggctgctcgcgtgcctggcagcggtgcggtccacccctccgcgctggcggtgctggacgcggaactcagcggagaaacgcgattgagagcagtgtgtggattactactatcactggagaaattacgagattgcagaagtaagggagtagactggcacagatgcaggaccgtatgcgttccctgtttaggtgcgcaaacgacgtgctaagggctccccaggagacatggcaacaagcaagcaatgcagaatcatcatccagtcaagttatgatggccagtacgccgtcaagcagcacactagtgagcaacaccatccaggggctggacggtgcttccctagggacaggctgcagattcgggcacacgggtaggcacacgcagccccttgcctcgtaggcctggccaaggtcctgccagtcgggcccgcgggggcctcccgttcctctcttggtcgctagtcgcccaacgcgcggccacgtcttcacccaacgcccgcttatgtccaacgcggcactgctctcgtcttgcctctggggcctccccacctccctgccccctggtggtcgaccctcttctaactcccgcccctctttgtcccctccactccccccgggccgcaccttgggcggcacggccgcaagccgcgtccccgcacgtctaccgcatttcccacgaccgacccctcccccccctccttgctccgccgggggccgaccgcgagctcacggccgcgcccaactggcctgctcaccgccgctccccacgctatgtgcagcgtcttccttttcccgcgttccacatccacagctttcctctccctctctttcgcgaacctctcgccatccccccctccctctcccgtcccccctcgcccgcctttgtgcccccgcctttcggctgcccccgcacccgtcgccccaccccccctcttttcccctgcgcgccccgcccccctctcgtcgccccggcgtcctctcttcgcgcccccggcgctctgcccgtctggcgactgcgcccccctcttgtcgggtgcgggcccaccacacccccgtgcgctgctttctccctccccctgtatgggggcgccccctcttcttcgtgcgcgccccgcccctgtcgtgcttgtgcggccggcgtcccccttggtcgtgggccctctctgcgtcgctttcggtctgcgcgcgtctttcaccccacgcctttctttccccccggggcgggctcgtatcactattccttcccacgtgtgggcttggccggcggctgga

SEQ ID NO: 619917 - DNA, 495 bp, Homo sapiens
atagctaatcaggaaagcgatgaagtgtcatgtggctatcccttccgttagagtgaacgatcaaagaactgctgatcttgatcttcatcgcttctatctagatgacaggatgatgacattgcgttaacatctcaggaagaaagtgtataggagccctcatttctcttacaccattgacagcctcattggcatttccactatttagatattcagtcacaacagtttgaggtagtttaaggagttcttcctttgacggtggtggctttttgctggtcttggcaggcttttgctggataagtggtggattagttttgagaccaagctgaggtgtctgtcccagaggtggtgtttgagtgcgtggtggctgtgcactaggaggaatcatagttatctggggctgaagctttggcacttgatttttattcattaggaacgactgagcaggcctcaggctaatctcatctgcattaagctgtcctttcttagaacaccgag

SEQ ID NO: 619918 - DNA, 669 bp, Homo sapiens
ctctagaggacccccgacactctgagttgttagaggctgggaggatggaggggtaggagtaagataactaagggatgcaaggtttttccttgaggtgatgaacactctgaaatcaactgtgatagttgcacgtatttataaatatactaaaaaccacttaattgcagacttgtgaaaggggtaaattacatgataagtgaactacatttaataaagctattaaaaaatacaatttaaaaagagtgaatgggctggtcatggtggcttatgcctgtaattccggcactttggaaggctgaggcgggtggatcatctgaggtcaggagttcgagaccagcctgaccaacatggagaaaccttgtctcttactaaaaatacaaaattagccagacatggtggcgcatgcctgtaatcccagctactcaggaggctgaggcaggagagtcacttgaaccccagaggtggaggttgtggtgagtcgagatcgtgccattgcactccagcctgggcaacaagagcgaaacttcatctcaaaaataatagtaattgtcaaaaggtggaaacaacccaaatgtccattaatagacgaatgggtagaccaaaggtggtctatccatttgcagagatattattcaggcatagcaaggaatgaagtactgatccatgcta

SEQ ID NO: 619919 - DNA, 470 bp, Homo sapiens
  misc_feature (186)..(186): n is a, c, g, or t
  misc_feature (215)..(215): n is a, c, g, or t
acaaagccctttcagcccccattgagaaaacatctccaaaaccaaagggcaggcccagaaccacaggtggtcacccgccccccttccggaggaaattccaaaaaccaggtcagccttacctggcggttaaagggtttttcccaacgactctcctgtgaggggaaaacaatgggaccggagaacaantcaaacccccccttccggggtgggtccgncgggcctttttttttataaaaaactccccggtgcaaaaacaggtgggacagggggaatttttttatgcccctgagcatagggtttgccaccccctcacccaaaaaagcctttcccttttcccgggttaattagtttgacggccggcaaaccccccctccccggggtttttcggttgcccgaggaagcttgggccgttccccgttttaatattttccagggcccccgcatggaaataaagcccccccccctgccct

SEQ ID NO: 619920 - DNA, 247 bp, Homo sapiens
agctacccgcagctctctcggttgggggcagctctctcggtggggcacacatcaaggtcaagaatggtgaaaccccaatttatgtagcgtatctctgggtccacggtcgggccattctgtcaggttctgctcggtgggtcatatactgagtggcaatacttcccaccaaggggtcggcaggattacagtctgtaagaagtgagcagcatcagccccacagcagcagcagcgtcgggtcaccgcagct

SEQ ID NO: 619921 - DNA, 421 bp, Homo sapiens
acatccttacaaaaaaagtcaaatgcatacttcaaacgttaaacagataagtattactgaaatttaagacaagtttgggttgggtaccatttgtacgacgcagttgattctacacattttcatctgggtgtgctcctaacaaaggcggcagtataaaataacgtcgtcgcgggtagaaccctcgggagtaggcagttttgccatgcaggagaagcaatattaaatattagtttcaaaaaaaatccacatttaaaaatatatagttcaagtcacagaatttttctcagtagagaccccaatgcaatgcataattagctgccttagatggcccgtttgaaaggatgatatcccttcagagtgtaactttactgattttggcacagaaacgaagtcttaagaacatgattcacacagcgggacg

SEQ ID NO: 619922 - DNA, 371 bp, Homo sapiens
ccctgggctctaaagttacagagcctggttttgagtcctggctccaccactgccaactgggtaaatttgagcaaatggtattctctttcttatctcagctcctgcgtttctaaaatgagggtctgcgttatgaatagttaggaggattaagtgagaggatgtataacccatgggttacttaagagtatagtgcctaccttccaaacaggagatgtttctagttataggtgcttgggtagctggattgctgtgtggtcggagaaaatgacccgtgtgggggccatccttctgaagtggttgggacttggttgttgggtgagtgtgagatcaatgttgtagagtgtgggatgtatgtttagaagagactgggt

SEQ ID NO: 619923 - DNA, 726 bp, Homo sapiens
  misc_feature (111)..(111): n is a, c, g, or t
agcggctctgctctgagctctgttggtcccagccaggagagctcgagtcatgaggtgtgcacccagtgggcagggtgggcagcagtggggccctcttggtagcgcaggagntgacttggcgaagagcgaggccgggccccagcatgctgggcatgatggacgtagttcgcggcatgatcttccagttcctgcgtttccaacccaggagtccttcctgactcggcatctgtggcatctgtggccctggcgccacgtgcccagatgtactcggccttcgacttcaactgcccctgcgctgtcgggcttctagtgcgagcgtacagcgcgggcatcctgctggcgccacccctggtgctctttctgcttggcctggtcatgtaactagacaacgtgtcctatgctgtctcgagagcagtgcgaacgcggcctactcggtgcccgcctgcgtgccgaacgtggaccccagcgtagtgcttgacgcctaccatttgttcttgcatcctaatggtccgcagctgctgcctctcgatgcgctgcctgtcagctctgggctggcctgtcacggctactctgatggcagaatgcttcctctgtggccttgctgctactgccgtgccctgtgagtcgcactgggccaacggcagcctgtgcaccctggccttcctggcccccggagctcgctccgcctgcttggccctgggtgccctgcccctgaggatctacgga

SEQ ID NO: 619924 - DNA, 663 bp, Homo sapiens
atcacgtaatgcctacattcaagtgatcgagttgttggtagaagagccatgctgtatcattgggtccctgtgatgcacatttgctacagtggtacggatgctgatgaatgggataacattcgattgacgatattgacatttgtattcggacttcgaccgctgtgccggtagattacttaagctatctgactgacttcaaactctgctcttagatgcatgatcatcgatgactgctagctagactggctgatctatccttattcatcgcacttggcctgatgggagaacgttcagcgcgtgtaaccacgttcttctgatcggatctagctatactgcttacaggacttggcgtacatagtgcaagcctatactgcttctacatgtttatgacgtgacaatgggtgtcagtcactgaccatattagcctcatggctccctcattgacgctagagagcactgtcatgtgcatacacctatgccccgagctcctgctatcgatcaagcacgacatcagtaccgggttctgctctaaaaaccaacactcgggagatgggcctcgtttggctggaaataatgtgccgctttaggggtggccctagctcaattgcctctacgcatggcgttttacaatctactggccgacgttttatagccccttgtgtg

SEQ ID NO: 619925 - DNA, 397 bp, Homo sapiens
gcacccgtggatttttttccccctcatcacattagttgtatacacgtgggaatgaaaggttagagggaatgaccatacagtgtgactggagaaaagtcgaacaaatttgattggccaagtgaaatgaatattgtcgatcatttttagacgaaatattcatacagaaatatgccatttgaattattagcaagggaataaagatcacagaagtcctatgataattgaatacctgcataaaatcatactgttagacatctgtctgcattgggaggacaatgggccacgtgttttttcaagagtacttatttacccacgcttaccatggaacgacaaactcaaaagataatccgaagttaatgaaacaaaaagcatcaactggtaccaaatgtaattaaaa

SEQ ID NO: 619926 - DNA, 222 bp, Homo sapiens
ccgatatctttctattccactccattcgattaaattcgattccattccattccattcccctccattccattccattccacaggggttgattcaattcctatctgttccattccagtcctttccattcaattccattccattccattccattccactccattcatttcctttccattccattccattccattccatcccatcccattctgttcgtcgacgcgg

SEQ ID NO: 619927 - DNA, 143 bp, Homo sapiens
atgtcggtaccgtaaagcacactgcaacagaactctaattcattgctggtagcatgcaaattgtaatcgctactttggaaaaactgtttgacagtttcttacaaaattaaacatactctacaggctgtggcagtgtgcttccg

SEQ ID NO: 619928 - DNA, 831 bp, Homo sapiens
atgaatcccctggcccaacccgtcatctactcaaccatctttgcaggctacactcatcagcagcgctaagctcgtcactgattttttacctgagtaggcctagcaaataagacatgcgtgagcttgttattccagttctaaccaaaaaaataaacccgtcgttcctacagaagcgtgccatcgaagtatttcctcgacgcaagcaaccgcatccatagagtccgttcgtaatagcgtatcctcttcaacgaatagtactcgtccggacaatgagaccagtagaccaatgctagccaatcaatactcatcattaataatcttatatggctatagcagataaaactatggaatagccccctttcacttctgagtcccagaggttacccaaggactacccctctgacgatccggcctgcttcttctgcacatgacaaaaactagcccccatctcaatcatataccaaatctctcccgtcagtagacgtaaggcgttctcctcactcctctcaagtcttatccatcatagcaggcacgttgaggtggattaaaccagatacccagctacgcaaaatcttagcatactcctcaattacccacgataggatgaataatagcagttctaacgtacaacctaacataaccattcttaatttaactatttatattgatcctaaactactacccgcattcctaactactcaacttaaactccagcaagcagaaacctactactatctcgcaccgtgaaacaagctaacatgactaacacgcttaattccatccaccctcctctccctaagaggctgccccgtaaccgggttttgcccaaag

SEQ ID NO: 619929 - DNA, 160 bp, Homo sapiens
taaaaatccccctttgaatgccccggagctcaggagaaaggtgaaaaattttattggttcatggaaattaaaaaatccatgcccagaaagaagaaaggtcatttgtgttgcatcaacccattttccaaaccaaaataaaaattgaaaaataaaacccata

SEQ ID NO: 619930 - DNA, 307 bp, Homo sapiens
  misc_feature (233)..(233): n is a, c, g, or t
tgtcttctctgggccacccggcctctcctctctttccgtaactctagtgtcgacaattctgtctctaacctctagcgcgctgtatcgtagggagatctggtgtcggcgccccaggtccctgagtcgtctgcccctgtagtatggaatgatgctggaaagcggctctgctcggtgttccctcccctgcacgcgcacacctccttccggtacccctccccctgcattgtgcgtgncgggcccagccgcaccggcccgggcactcagctaggccctatccgccctcccgctggcgagctcccgccgagcc

SEQ ID NO: 619931 - DNA, 625 bp, Homo sapiens
ggcgggcgacgttgttacattcgttgaaggaaccagctgggaatgtgggttgggagattgaatcatgcggtccagaaagtgtggcaataccagtccatgtgtatcacaacatattccaattctaatactctcacaggtagactgactgtgtatgccactatatggaaagcttggcatggatgggtctaatatccaagtcaaggtccaaaaaaaactccagttgtgaaagcaacataatgatttcaccgtgtctagggttcctaaaccctcatctgttaaagtcccatgcgtggagaagctaatgcacctcatcagtgttgatacttcccacgtttgtaccattacatttttgaacgctaaaaaaaaaaagcaacacagcaaaacacacacttgtgtccgccggccccggcctccgaacaaccctttccaacccccatgtctgagcaggcgcccccagcagcttagggcacccctgcgcaccacgggggcccaaggaaacccccggccacgcaagtgctcgtggcttccaccaaaaaaaccccgcgggcaacgcatctctgaaccactcacacggggtcgcggcacacggcccccacggcgcgcacccgaacatccccccgggggg

SEQ ID NO: 619932 - DNA, 307 bp, Homo sapiens
cgatctgactacgcggctctactccagcttatggcaaacattttactgagctgggctttaatcattgttattattacctgagacattcatattctagcactctgggaggctgaggtgtgggtggattgcctgagctcaggggttagagacaagcctgggcaacatggcaaaactccgtctctactaaaaataaaaaaattaggcagggcgcagtggctcacgcctgtaatcccagcattttgggaggctgaggtgggtggatcacgaggtcaggagatcgagaccagccgcgtagtcagatcggggt

SEQ ID NO: 619933 - DNA, 666 bp, Homo sapiens
  misc_feature (13)..(14): n is a, c, g, or t
  misc_feature (27)..(27): n is a, c, g, or t
  misc_feature (54)..(54): n is a, c, g, or t
  misc_feature (95)..(96): n is a, c, g, or t
  misc_feature (112)..(112): n is a, c, g, or t
  misc_feature (125)..(125): n is a, c, g, or t
  misc_feature (129)..(129): n is a, c, g, or t
  misc_feature (134)..(134): n is a, c, g, or t
  misc_feature (136)..(136): n is a, c, g, or t
  misc_feature (140)..(140): n is a, c, g, or t
  misc_feature (145)..(145): n is a, c, g, or t
  misc_feature (147)..(148): n is a, c, g, or t
  misc_feature (152)..(152): n is a, c, g, or t
  misc_feature (159)..(159): n is a, c, g, or t
  misc_feature (170)..(170): n is a, c, g, or t
  misc_feature (173)..(173): n is a, c, g, or t
  misc_feature (176)..(176): n is a, c, g, or t
  misc_feature (181)..(181): n is a, c, g, or t
  misc_feature (187)..(187): n is a, c, g, or t
  misc_feature (197)..(197): n is a, c, g, or t
  misc_feature (199)..(199): n is a, c, g, or t
  misc_feature (209)..(209): n is a, c, g, or t
  misc_feature (213)..(213): n is a, c, g, or t
gtcgtccttcccnnggagccgactggncaatcacaggcaggaagatgaaggttntgtgggctgcgttgctggtcacattcctggcaggatgccgnncaaggtggagcaagcngtggagacagagncggngcccnanctgngccanannccgngtggcanagcggccagcnctnggnactgncactgngtcgcttttngnattacctgcnctgngtgcagacactgtttgagcaagggcacgaggagctgctcacgtttcaagtgacccacgaactgaaggcgctgattggctagaccatcaaggagttgaaggcctacatgatgggactggaggaacaactgttcccgctggctggggagacactggcacggctggccaacgagctgtaggcagtgcaagctcggctgggcgcggacatggaggatgtttgtggacaacttgtttaacatctgcaacaggtggaagtcatggtaggtggcagaatcaagctcttggttggaacctgggtacaaccgcgcaagctggttagtcgctcttaggggaaacccctgcccttggaatgaactgacggttgtatgataggcactttctgggaacttgagggggaaggtctcctacgtcagttatggagaccatgatgtaggccctttttttggccttttggg

SEQ ID NO: 619934 - DNA, 296 bp, Homo sapiens
tgtgagcatgcccctgcactcctgcctaggcaacagagtgagaccctgtttcaaaaaaataaataaaaccatggggttccatgctattttggcaaatttgccctttatagcatcactcaaaatactgcctattggctttaaactccatttgaaaactgataactttcattctttccctagagtggaagctttgagactaggaattttgttgtttttaccccagtcctttgaatagtggctacatgtaagatagtcatgtaggatttattggaaataaatatttattggaaaaacga

SEQ ID NO: 619935 - DNA, 106 bp, Homo sapiens
gtaccgttgaaccatcgtgatgggatcgggattgcatatcccatgacgagattccagtagtgcggtcataagcttgcgtgataagtcctgcctttgacacacgaca

SEQ ID NO: 619936 - DNA, 373 bp, Homo sapiens
taagattgatgacaccacggtatcggtgatggacttcacctccggcctgaactggcaggagaaaaccctgaccctgaaaccgacgtcgctgaaaggcctgctgattgctctgccgaaagtggcggaagtggcgcaggaagaagtggtcgaaccgaaaattgaaaatccgcagccggatgaaaagccgctcggcgaaacgctgaaagatctcttttctcgcccggtattgccggaaatgaccgacgtgcatttgccgcttaacctgaacattgaagagtttaagggcgagcagctgcgcgttgacgggcgacacggacatcaccgtgagcaccatgctgctgaaagtgagcagcatttgacggcaatacttaaa

SEQ ID NO: 619937 - DNA, 268 bp, Homo sapiens
ctccagctagtgatcaccattcacataattaccagctagggaaacgcacctctttattatggaacctacaagcgactattgcatccttatcccatacgtccgacaataggtgcctggtgttaatcaccttcccccccacagtcgctcctgcaaatggaccatagagcacatactagttatgctttggcttatagcctctgtaggaaagtgatctgagcgcaaaaagctagtgtgcaacttccgcatgcagtattggcacccaggctga

SEQ ID NO: 619938 - DNA, 360 bp, Homo sapiens
tacctttatttattatatttatagatggcgtctcgttctgtcgcccagcttgaagtgtaatgcgcatgatctcagctcggtacaactatctgcttcttgggtctcagcgcgattctcctgccacggtattttatagtagagccggggtttcaccatgttgcccagcctgtgtcttgaactcctgccctcaggtatccacctaccttggcctcccaaagttctggaatcacaggcgtaagccaccacgcacatctgattaagtttttaaatacccctctcatatgtcaaacccgaggtaaaaggagagtgatacgcaagaccccacctttcacagtatcccctcgtgccgtactcctacag

SEQ ID NO: 619939 - DNA, 85 bp, Homo sapiens
cgaccccacagctgtctcttggaatatccctgacctccggcctaaccccatacgcgatacagattaaccacgcacccacatagac

SEQ ID NO: 619940 - DNA, 234 bp, Homo sapiens
gtcgacttgagaaattagcctgggcaatatggtgagatcctcatctctacaaaaaattttttaaaaattggctgggcttgatggagtgtgcctctggtcccagctgcttgggaggctgaggtaggagaattgcttgagcctaggaaatcaaggctgcagggaaccatgattgtgacactgcactcctgctttggtgactggtctcaaaaaaaaaaaagtcgacgcggccgcgaa

SEQ ID NO: 619941 - DNA, 267 bp, Homo sapiens
tggaattcgtgctctgcaatccacgcattgacaacagagtgagactccgtctaaaaaaaactaaaaaaaaacacaaaaaacaaatcgcctcctaaacataagggagaaatgtgtctaggtttaagacccttggcataattggggggcaaaggccaagcagggataacttgcctaccagcctctgtgaagatacctaataacaaaaagattttgccatgtccagttccgtagggtcatgccaatcatctcagcctccacacgtagctg

SEQ ID NO: 619942 - DNA, 483 bp, Homo sapiens
  misc_feature (403)..(403): n is a, c, g, or t
ctcagtcagggcagcaaaagatcaagggtggaatctcacagtcacaggccatccgtcgacacataacgaatccattctgacatgagcacacagagcacctggtcattttccaacacccaaatctgaccatggtgcttaacttttccatcagggatgcagtccccggtgcaattcttgccaggaggacatcgacaatcatatccgccatccaaatggaagcaaagggtatcatgggcacagcggtgcctccgggtcccacactcatcaatatcttcacacgattctccaggtggtgaaaccatcccatggtcagggtagccatctctgcactcacaggggtaccatccaggcaggttaatgcaattagcaggacggtcacatggaacaaaaccatcagagcatncatcagggtccgttacacagtggggtccagtgaagcctggggggcaggcacacacatgagcggcaatacaggctcctcca

SEQ ID NO: 619943 - DNA, 213 bp, Homo sapiens
tgcggtgcctgagggagatgaaaggggaaagttctatttattcttggtgattggatgcacagttgaaaaacttaacacacaataatagaagtggtcgttagtaaatcacaccctatgtctttcagatgcgttccgtaagctagacgacacttgtcagattttctacgctctgtgttttaacacctgcaacaagcaatgatgcatactgtccgg

SEQ ID NO: 619944 - DNA, 296 bp, Homo sapiens
tcatttgtgactgtaaacaattatttattagcaaacaattgatcccagaagggcaaattgtttgagtcagatatgctctgtcttttctcagctcattactgagaaaagacagagcatatctgtgtatttggaaaaataatgtaacgtaattgcagtgcatttagacaggcatctatttggacctgtttctatctctaaatgaatttttggaaacattaatgaggtttacatatttctctgacatttatatagttcttatgtccatttcagttgaccagccgctggtgattaaagtt

SEQ ID NO: 619945 - DNA, 131 bp, Homo sapiens
aggaggctgaggcagaagaatcacttgaacctgggagatagaggttgcagtggagccgaaattgtgcccaccgcactcccagccgggggtggacaagagccaaaactccatctcagggaaaaaaaaaaaat

SEQ ID NO: 619946 - DNA, 486 bp, Homo sapiens
  misc_feature (88)..(88): n is a, c, g, or t
gcactgggagtcacattctgactctgaagggtcctgagctcaactgctttggccccagcctcaaggggctggtgcagggtacaggtgnatggacaggctggtcagggctttgagaaggacctgctgcagttggggaaagatggtgctgtctcattgaggacgccaagggtgtccttaaacagaccctctgctgtaaggacttgagctaggggatgcggggccatattatcccattcaaggcaaggcttcctgatcccaaggtggggtcatggccactcaggactcctgcccttggccagtcccagtgttgcatcacagccgtgtggctgcccatggggcctaatttcagggaccctgtgagatgggcccagttgccctccacagaccctggacagctgcctctgcattcacgaattagcttctaccttgccagaccctactaggctccaagatgatggtgtgaacaacacaggcaaaaaaaaaagc

SEQ ID NO: 619947 - DNA, 89 bp, Homo sapiens
  misc_feature (14)..(14): n is a, c, g, or t
gcaagttatttgcngaatatacgtgtaagggtagtctatattggatgaagtaggtgcgtctggaaggaaataaaaaaaaaatgctgaaa

SEQ ID NO: 619948 - DNA, 416 bp, Homo sapiens
agattattacaattcaggtgaaatttgggtggagacacaaccaaaccatattagatggctatatcaaaaagacaagaaataacaagcattggtgagagtgtggagaagacggaacccttgtacacagttggtgggaacacagtttggtgcagccattatagaaaacgtcatggaggttcctaaagaaattaaaaagagaactaccatatgagccagcaatcccttttccagatatacacccaaaggaaatgaaatcaccacctcataaagatatctgctttcctgtttattataacacatctttattcataatagccaagatacggaactaactgaagtgaccattaacagatgaatggataaagaaattgtcatatatataaaacacacacataatggggtatcctgggtaccga

SEQ ID NO: 619949 - DNA, 233 bp, Homo sapiens
  misc_feature (43)..(43): n is a, c, g, or t
gatcaatttaaccctgacaggtatgtgtgctttcgggcgcaanttaggagaatgtttgtgtctttcctagttgaatacaaccttcagaccaaacccctatgccttggagattactacctggcacaaaatgggtcttcaaggaggaaaaggagttggaggtctcagccagattgctcgtctgccgacttagttgtatcgattccgatgtgactatgtaataggatggaaaaagt

SEQ ID NO: 619950 - DNA, 156 bp, Homo sapiens
  misc_feature (79)..(79): n is a, c, g, or t
  misc_feature (97)..(97): n is a, c, g, or t
acagatctagagagcaggcgagctccggacgtggtgtcatgtagcctctggtcatctctacggcactcagcgctgccgngcgatacacgtatcttgngggcggttccgttcgctgttgaggtgcgatctcctggcagagtctccatcacagacagt

SEQ ID NO: 619951 - DNA, 439 bp, Homo sapiens
gggaccagatcggccgagcccccaccaccgtgtcccctgcaaggtgacaggcccctgcggctctgtgctggtacgcctcaatccctgcagcccacggggcactggcaatcgtctccgcacctgtgcctaagaagctgctcatgaatggctggtatcgagtgagctgctacacctcagcccggggctgcactgccacacctgggcaaacttcgcccaggccaccccttgaagccaacatttctaagaccaacagctacctgagcccccgaccttctggaaggagactgtattcacccagtttccctatcaggagttcactgaccccctcgtcacagacccacacccgagtttccgtgcaacggaatcaggctcccactgtgggtacaacatagggtttttataccaggaaaattaagtgaattaagcgtgttactgttta

SEQ ID NO: 619952 - DNA, 101 bp, Homo sapiens
taaaagtgcactgctgtctccaaagcggagatgctgagatggtgataaatatccaaagccatccgagctcgattaattacaagtggctggggtcatgtctc

SEQ ID NO: 619953 - DNA, 790 bp, Homo sapiens
gcttgagatgaagacgcggtcgtaagggctgatgatattggtccgaatgctcctgctcctgactcaccgttgtacggtctctccgatgaagcaagtcggtcgggaaggccgtcgcgctacagtcatggactttttacaatgagtataccgtgggaataaacgatccgcgatggtacgaaccgcgcacgagtgggtgaagttgcaccggagaattcgagatcatccttaacaagtcgcgaaaacgttatgaatctctttgcggcataaacatggatgtgttggctgatcttcgatcaagaatggcggcaaaaaagataagacggccaatatctcaaagtggaaaggaccgagttcgaatgcctaccacagactttgagaagtcactgactaggaaaagactccgttgtggtgaaggttctatgtagcgtgggatcgtttccacgatgagaattcatcctaagctgactcatgcgacttgcaatcagtccttcgtgagagtgtgtagagcagatcacttccatcagtattggcgccaggagttgaggtggaggtcactcattgcagatgctataagttcaactagtttgattacgttgaggaccagttgtgtactaaagctcaaatagctcttaaacttggtgtgtctgggtcactgatgtcccgaatgtacattatctgggcgaaacccattgcgcgagggcagcatcagatgttcaacccttgcgccacgtggagtttgccaggacaaagccccgcgcgcggaaagggaggctcgggatctcatcgacag

SEQ ID NO: 619954 - DNA, 458 bp, Homo sapiens
tacttgcctgtacatctatggggagaaattgaagatgagaacttcatccatagcatacgggtctggcatcttgtcatggcaaatgctggacccaacacaaattgttcccagtttctcatctgcactgccaagactgagtggttggatggcaatgcatgtggttgttctggcaaatgtgaaatgaaggcatgaatatttgttggaggccatggagctgctttgggtccagtgaatggcaagaccagcaagaagatcaccattgcttgactgtggacaactcgaataagtttgaccttgtgtattatcttaaccaccagatcattccttctgtagctcaggagagacccctccatcccatttgctcgcagtatcctagactctttgtggctctcgcttgcagtaccctttgggttccatgtttcccttgtaccctcccatgcattagatggttaccaggg

SEQ ID NO: 619955 - DNA, 162 bp, Homo sapiens
caacccccttttttttttttaaggacctttttttggcgggggggcctttataaaaaagtattagttttttcttttttttaacggaaaacttgcctttggggaatgggcataactccctttttttttgctctttaaaaaaaaaaattcaagaagctttttcta

SEQ ID NO: 619956 - DNA, 796 bp, Homo sapiens
ggaggtgctgcgtcctggaggctggtatcgaactcatcatcgacgacgatatcaggtccagagaagctagaagcaggaacgcctgggctgctgtggatcccgataaccaaagtccggaagtctctggctcttgcacattagtggatgaggatgtgaagctgaatgatgtctcgactactggccaagtcgtctgatccattggccagaggggactgggctcccgtatcaacagtctttccaggcctcgacgcgctgatcagggtactcacgaggacatgcacagacaggcttgactgctaaccgaggtgcgttcttgacgatgaccaagctcgcgacgaccaggccgaaggcacgtgggcccatgaaggccccgtgaagcctagttacaccgacaccactgccccgtactgtccgagtgcactgttagaccacggtgcgctctgccgaggcgtgaccgaggggcattcgcaggcgtatttccgatgcgagcgaccgacataggcgccgtgcgagctccctgcggccgggcctggaatgctccatggccatcgacattcatcgtggagccctcatactttgtccttggagcggtgtttgacgcgagtgtccacggacgcccttattctcgatcgttatactagggcgtgctttgctggcgtggcccgagggcgcggtcgttgggacatcttgaagcagtctctacgaggtcgcatccgtcgccttgccaggtggtatgctctctctagtctggcaggggccgttcgaccctagaggtctcgaagtggggggtgcgcaa

SEQ ID NO: 619957 - DNA, 119 bp, Homo sapiens
  misc_feature (37)..(37): n is a, c, g, or t
  misc_feature (43)..(43): n is a, c, g, or t
  misc_feature (119)..(119): n is a, c, g, or t
tctacttttttgtcgctagcgcgctatgtgttggtanacgggnattcggcattatggcgggggtatgggaatataaaagtaaagatgaagcgatttaaatataatttgttgtcaaggtn

SEQ ID NO: 619958 - DNA, 339 bp, Homo sapiens
  misc_feature (19)..(19): n is a, c, g, or t
aaaggggggggggggggtncggggggggttttttttaaaccggggttttttttttgccccccggtttgggggggggcccccccccccctttttttccccccctaaaaaaccccggggccgttcccccccccgggtttttcccttggcccggggggggggtactttttttccccggggaccccttttcccccttggccctttttgggggccccttaaaaccatttttttccaaaaaacgggggggggccgggccgggttttcccgggtttttttccccccccggccccggggcctttttggggggttttttttccctttaaaaaatggggggggtcccca

SEQ ID NO: 619959 - DNA, 335 bp, Homo sapiens
tgtacgtctgtggtgttgtaaatttttattatactgggatatgctaataggttatttcgaatccgattcagatgagtagtcagtgtgagctgattattactagtatggttccggacattactgttatgataagggtagtgtagataatgggattaattagtatgggaagggtatgaaccaacattttcggggtatgggcccgatagcttagtttttgtttctcaggattgttttggcgattctgggtcttttgtggttccatataaatgtttggattgtttgttctagttctgtgaacaatgtcatgggtaatttgatagggattgcattgaatc

SEQ ID NO: 619960 - DNA, 299 bp, Homo sapiens
  misc_feature (225)..(225): n is a, c, g, or t
tcacgcttatacttccagagtgcaagaagagcttcacgtgacgtctcccacaagctatatagctagctctcggcaataaacatgacatataatacttgggtgcatttggcgtgtcaaaaatatgcaattttaacatgtcagaaagaatcatgtttcaaaaacagtctcctttggagaagagagttatgcaaacaatatccaaaacctttttggatctcacatttngaagaggtccaacttccgttggttgaaagaaaagtctatgatataatgaaagccttacaactgagggtaccgag

SEQ ID NO: 619961 - DNA, 213 bp, Homo sapiens
atccctttcccagtggtacagtgtcttgattactgtagctttaaaataaatcttaaaatttaataggtgtaattcctctcactttattctcctttttaataattgttttaacattctggttctttgctcccaatataatctggattcagcttgttctatctataaaattccgctgggatttaatgcaatgcatcgatctgagctattgtagga

SEQ ID NO: 619962 - DNA, 144 bp, Homo sapiens
gaagtcagctcgatttgagtaagcctctagttgaccgtgctcttagcctgagtgtggacgttgaaacatatcacttcaggcttggaaagtcagtcaaccttgacgtacagtttagtgacagtttaaaagagtcagactctataa

SEQ ID NO: 619963 - DNA, 1183 bp, Homo sapiens
ggaacccggcgctcgttccccagccccggccggccgcccatagaccagccctccgtcacctcgttcaccgcaccctcggactggcccaaggcccccgaccgacgctccagcgccgcgcagacaccgacgacgcgccgccatctccttagtcgccgcgcatgacgaccgcgatccacctcgcaggtgcgccagaactaccaccaggactcagaggccgccatcaaccgccagatcaacctggagctctacgcctcctacgtttacctgtccatgtcattactactttgaccgcgatgatgtggctttgaagcacactttgcccaaatcactttcattcaccgaatctccatgaggcagcagggaaccatgcatgagaaaactgcatgcaagctgcagaacccaacgcaggtggccagacatcttccttccaggatcatcgaagaaacccagactgtgcatgcactgggcagagcgggctggaatgcaatggcagtgtgcattacattaaggcaaaaaaatgtgcaatccagtccatcactggaactcgcacaaacatggaccactgacaaacaatgaccacccatatagtgatgacttccactgtgagcacacattacctgaattgacgacaggtgaaagacatcacagacctggagtgcacacgtgaccaaaatagcagcaagaatgcggagcaaccccgacactgggcctggcgcgaaatatctcatgtgacgaaagcacaccacagggaaagacagtggatacatgacaagctaagccgacggagcaaatagcacacatagacgcggagagtgcactacccccttcggccaccccaagggcaagctgcaatgacactgatggcacggataactcttgaccacctacaacacacacgcatggtaaccgagaacacaatccacccataacaagttccataaggactcagcgaaccaggtcaacaatcaaacaacacaggacaaatggcagacaacacaacacccaaaacacacacacaagagcacgcgccggcaacagccggagaccaccccactaaggagaccacacaagaaatgacgaacccccaagaatacatagagacacagagaggccccacaccacgacaggagaaaaccaagcaacgactgcagatacacaacaaagagcgcataacccggacaag

SEQ ID NO: 619964 - DNA, 1010 bp, Homo sapiens
  misc_feature (61)..(61): n is a, c, g, or t
  misc_feature (88)..(88): n is a, c, g, or t
  misc_feature (90)..(90): n is a, c, g, or t
  misc_feature (97)..(97): n is a, c, g, or t
  misc_feature (99)..(99): n is a, c, g, or t
  misc_feature (133)..(133): n is a, c, g, or t
  misc_feature (143)..(143): n is a, c, g, or t
  misc_feature (149)..(149): n is a, c, g, or t
  misc_feature (157)..(158): n is a, c, g, or t
  misc_feature (165)..(165): n is a, c, g, or t
  misc_feature (185)..(185): n is a, c, g, or t
  misc_feature (191)..(191): n is a, c, g, or t
  misc_feature (218)..(218): n is a, c, g, or t
  misc_feature (240)..(241): n is a, c, g, or t
  misc_feature (249)..(249): n is a, c, g, or t
  misc_feature (259)..(259): n is a, c, g, or t
  misc_feature (262)..(262): n is a, c, g, or t
  misc_feature (270)..(270): n is a, c, g, or t
  misc_feature (285)..(285): n is a, c, g, or t
  misc_feature (287)..(287): n is a, c, g, or t
  misc_feature (301)..(301): n is a, c, g, or t
  misc_feature (310)..(310): n is a, c, g, or t
  misc_feature (314)..(314): n is a, c, g, or t
  misc_feature (332)..(333): n is a, c, g, or t
  misc_feature (336)..(337): n is a, c, g, or t
  misc_feature (351)..(352): n is a, c, g, or t
  misc_feature (358)..(358): n is a, c, g, or t
  misc_feature (362)..(362): n is a, c, g, or t
  misc_feature (366)..(366): n is a, c, g, or t
  misc_feature (386)..(386): n is a, c, g, or t
  misc_feature (391)..(391): n is a, c, g, or t
  misc_feature (393)..(393): n is a, c, g, or t
  misc_feature (462)..(462): n is a, c, g, or t
  misc_feature (473)..(473): n is a, c, g, or t
  misc_feature (485)..(485): n is a, c, g, or t
  misc_feature (520)..(521): n is a, c, g, or t
  misc_feature (526)..(526): n is a, c, g, or t
  misc_feature (528)..(528): n is a, c, g, or t
  misc_feature (565)..(565): n is a, c, g, or t
  misc_feature (625)..(625): n is a, c, g, or t
  misc_feature (984)..(984): n is a, c, g, or t
taattatcaatgaggcagtcctccttgttgtccagttaaaatctacttcctcttgaaaaanaaaaatacactgaaggaagatgcaaananctaaaantngtatcatgattccacagcagtgattgtaagaaantaagccacangaaaangggaaaanntgaaaanaaacaagtatcaggaccaanttaganaagatatgagtagggccatcactagangtgaaaatggagaaacctaagnnaaccagtnttggcatganttntgcaagtngaaaatacatctgtngngggacgggttaganggccctagntctncctccaagtgcttgtttnncgnntttttggggtttgnnattttntagncttncctgtttagccgcctaaccnctccntntttcagcctagtcttgttacgtctagccgttcctttttttgctcatcacctttcctttttctttttgtnttttttgctgnaggtcagtttcntttatttttccctttcctctcctctcttggtttannttttntnaggtttctgagggggctatgggtcagttggcattacngtgggaggggcttattgaggcagggttggcaataggtcttgtcattctgctccctgatantgcccttcgacaactgtgtcaggcagagagcacacacaaagtgctcaggatggaacttgtaccccatggcactgatacaacggccagtgatgggctgcccacacccatggcagagcgttccccggcggtgatggtaatggagctcacagaatggacgtccatccagttcaaagaaggagccagtagaaaaactggtgaagcagtccccacaaacaaagcactctggggtgccagacagtgtccatgggctgaaaggtagttttccaacactggggcgattgcagccaccacacttggggtgagaacatggctaagaaatcctttcggcaatatggcttcttgtccttctcatgaaagcntctgcaccaacactctccgcagtgag

SEQ ID NO: 619965 - DNA, 1104 bp, Homo sapiens
  misc_feature (1104)..(1104): n is a, c, g, or t
gggaggctcgtcatccctctcgtccgcaagggccatgttgtccttccaacaggtcatacgtggtgtcactgcacgatacctggtggcgaagtctacacgtgtgtgagaagaggtttgtatcatcttctactagcctcgcccatagctgcgtatgcgtgatctcgtacccaagactcattatgatctaacttttggatcgctgacacggtgatgcttttagaaccattagaacacacgcctaatccatgatccaataggagatgttaggaatgatcgtcacgcaactagttcgacatcgatttctgagcgcgagataacgtgaggccaaaatgctagcaggacgtaccaagagatcactctagcacgtttccggcacctgatccgatgaggaacctgcaaccccgacaatcatgggaccctgtgggcatgtctgtcaggtgaaaagcttggtgcctttattgctgggccagcacatgggtatgtagcggccgatctaagaggcctgaggtgcgacaggacgagccatgcgtcagatattggacagcatacttgaagcataacagagctttcccaatcgaataggtggggcgtgcgtagagcctgaccgtaaggaaccctctacctcagtatgatgagttcatcgtgctatccagggatacactcagctccatgtgaggcgatagcgatggcacatggatatacattcaccaatgttcgtatcacactgtggagacagtagtaaccaagctgaacaatgagtcttagcgcaggaaaagggaccattgagtatatgccgtgatcaccagtcttcgggttgaaacgtatacaccgtccacagccgtcggatggcgacattgcactcctgcgcaaaaaaggggttcatgatgggcagtccatccaggcagtgagtcggactagccctagtccgaaatttgagttgacacttggattaggacccagatgcattgcgtacgtgccaatcttcctaattggacccctgggcgtttgaatgaatacactggggacaccttgaatggtgttcctccatcctgggggatccagccattcacattgcattcccccatgcgagaatattgcccccan

SEQ ID NO: 619966 - DNA, 206 bp, Homo sapiens
tcccaaaaagggggcccccccccccccccccttttccccaatttttggtttcccccgggggggtttttgggggggtttgggggaaaaaaccccccccccttttcccccccccaaagcccccccccttgggcccaaattttttttggggtttttttttggggggggggtttgtttttttttaaaaaaaatttttttggggcccccca

SEQ ID NO: 619967 - DNA, 455 bp, Homo sapiens
ccatcttgcttcctaatctatggtcgggagacagcatcaggttaagacgacttctatttttttattaactaggagaaccaaatctggaagccaaaatgtaggcttagatggtgtgtggtctcttgagtttgtcgctcatgtgtgcaacagggtatgaactatctagtcgtggtggccccgtacaatggagagactgttggacacggactggacaagtccaggactgccgaaaggccgcagcgcatactcaacaagcagacgtgcatgtgtcacaaggagcaagggccatgctaagaggaccgggagaccgatgacacacgtggaatacgcccggtgagagaagggaaactgcgggaaccagactatcacaaaaaagaggaaatgtaaggagggaggaaggggcactgaagaatacctcagggagaaccacgacccgacacgacatgtgacgccga

SEQ ID NO: 619968 - DNA, 515 bp, Homo sapiens
gttttaggatcacattttaagactgcaaaacgaaattttagtcataaatgttttaaaacatataactagattggaggtgaaaggtcaaccttaggtcttgcccaggttcatttatcaacacaaatatttattgtgagattcaaaatggaagggaaattgagatgtgagataaaattatttgaacattttaatgtaccttgctagttcagtttaaaacataaaacagatggtagcacagcacaactgccctattgcctccctatttatgaacacccatttctaggagtccctaaaaacagggacaatgtccttgagatactgtctaattaagatttattttcttgtggtttatggtttgttttttcagttctgattcctttctgggccctgaattctgaattctcccctcctcacagtgaagatgagattccccttccccttttgggctaccaagagggagactttctgtcattgacagtggtaccaagtaatcagcttcagtgtcaggatgaaag

SEQ ID NO: 619969 - DNA, 123 bp, Homo sapiens
gaggtggggagcagagaccttctcttatccaacatcacatcttggtcagatttgaactcttcaatctcttgcacctccaagcttgtcaagatagttaagcgtgcataagttgcccgccagtga

SEQ ID NO: 619970 - DNA, 476 bp, Homo sapiens
ataaccaataatcttccaccataattataccaaattcctcttaacacctgcatactaagtgtaatcaatacaatttcgtccgtataaacagactgcgaaaaatcgataaatagcaggtaagagaaagatatatctaagcaattactaggatcattcggacaaagtgagtactgtggatattcaaaatatcacagtaacaagaacatgcttgttcctacagtattgcgggccacaaacttacctgaccgcagaagtgtctgggtgactttcctacttaaaatcttggtcctatcatttcaaaacatctgcctcccggtcggctgcatatgctttcctattgatcccacaccaaatctaagaatcacttcatttaaactactgaccgttatcgaatacttcgaacccgaacaggcgacgtgcacccctcattcatgagaaaaccctcaggaaactcccagggtgatgctcggagcagc

SEQ ID NO: 619971 - DNA, 545 bp, Homo sapiens
tggaaatggagttggttgcccaggctggagtgatgggcaaagtctcggttcacgggaacctccacctccggggttcaagcagttttgcgggccgaagcctcccaagtaactgggactacgggaatggcccaccaggccagggttaattttgtggtattttatagctaaagagggggtttcaccagtttctcaaactccgtgacctcgagggcgatccacccacctaagtcgtcccaaaggtgcgtgggcatatatagggtgtgagccacgcgcaccgtggcctatgaggtggctctttaaattaggaacaaatctatgggaaaaggagagtggactgaagtgggcccacaggatgggtgagcggggcagagcctttcatagaagggctggccacctgggagacgccccagttatacgggggtagtctggcagagagtgcacaaaggctttctgggacagctgccggggttgggccaagacctggtctcccctcccgcgggccaaccccaagtccccttccggtctccactggcataacagagggg

SEQ ID NO: 619972 - DNA, 993 bp, Homo sapiens
  misc_feature (90)..(90): n is a, c, g, or t
  misc_feature (383)..(383): n is a, c, g, or t
ggtgggcgaacatctggtcagcatcaatgaaaaatggcacagccatgtgttgccaacaggccccgtgctctactcatggtgcgtccagtncggagactttggtgacgcccgccgtaggccaataggtctatggccgcggcctgatcagtaaggtcctggtactttctgcacgcatgtctgcacttcaattcgctggtacacaacgggaagttgcaaggcttaatgtgtcgtgcattatcccttgggcaggatgtgcaacgtgctccacagaccacacacgatcgtgactaatcccatgcatccgcgcagtgacactgcgagatgcatcggcaggcttggcaggatgtgctcctagctatcctcgtagccgttgccgtgcgggntattagtactctgtctacttccaccaacaattctgcatgaccgatgcactgtctgaccgtgcggagtgcaccgattctgaccgatgagagagtacaactgtgagacggggaaagtagtcacaaggaggagccatcagcgccgctacacgagctcggggcgcaccggtaccggtgggcgcacgtgatcgggaaggcactatatgtgcacctgaatagcctgacatagactcgccagtaacatcaaacaggcagatgagtgatggtcagggcgccaacgtcgaccaaggcacccgtctggacccgttgttgactagaggagccataggactttggtgtccccaatagagcggacgagaaacttcagacatctggccgttcccgggatatttggtagacacctcagaggaagaattgggcgcagatggcaaacaagcggatcaaatgccgttcaaatagttaacccggtttggggcaaggtcgacaggtccaacccgggcaatggccccccatatcccaggtttcaacccgttggggagacccagcatttggttggaaagtgaaggtgcgccccaccaaagggtttggcctggagcacgtggaaggggccccg

SEQ ID NO: 619973 - DNA, 400 bp, Homo sapiens
tccccgcacagtcaccaggattacgtgcgttcgattgctaagtgttttacagtgtctgtacatcaaagagcccatgagccgtgtcatgagactgtctattaccatattcacttctgaattgggcagaggaaatctgaatgtattatcctgtgtgtgtctaggtatagatattggaatgctgccaggggatatcgaagtattgcaacctttataggataactgatggcaatattaagacagacgcctgctttagcgaatcacttacaatactgtcatttccaaagatctgactggggctttcctgattttggtatctaaggcttaggcctattgattgatttacctttggaattgtgctcccaatgtctactgaagcttaaccgaagaactactaaatgga

SEQ ID NO: 619974 - DNA, 93 bp, Homo sapiens
ctaatcgagctcggtcctggtgaggctgcagtgcagtgagccaagatcgtggccatatgatcagcctggataacaagagtgagactccatctc

SEQ ID NO: 619975 - DNA, 194 bp, Homo sapiens
gagaactggatcacgattccgtttaaataaagcataagttttcttattgtggtgaaatgacacacttttggacagcaatcaaagtatttcattttttagaaggtagtattattaactatcattttaccactcccaaaagggtatgttaattattatacagttgggcaatgtggcttctgcctgtaatcccaaca

SEQ ID NO: 619976 - DNA, 952 bp, Homo sapiens
gctgatccgcgggtgtttgctcccccggaggggagggttgggtgccgaggccatggtccccaagatgaggtgacccgatgttgctgtcgcgcgtggtgtccctcccgcgggtgtcgttgggtccccggcgggggggtgtccttgcctcgttagctgtagcctgtctgttgttgcgaccgtgcggtggacgcctcgtgtcccgagtgtttagatatgatctcgttgcggatgcaagatcgctagagatatgcgtgtgattcccccgcggctatagttcgttgacgagacgaggatatttgctctgtgtctgaaagaacccctctccggtttgtcggaggacaagtattccccggcgatcatcttgttcccacagatttgggctactaaaatcaatactaggaatagccatcccctcttgatacttccccctctctcactcttagtatgatcgtctcggcatatattgtgttgtcgacaatagtagagcaatagtttgttacctccaatacaattcattatcctctaagagcccacaaatgcaattattctctcctctctcgcaggagctacagattctctgtttgtgtatgagtggtatagaaatcgcacacaggagcgaccgatcgcctctcgatttttatctctctctatgattgtgatcctcctgagcgacatctgcccccacaaatcttttaccacctttctttatattagacttttcattcgtcctcccctccgagtagtctccctcctcggtcactctcatatcgcccaatagttgtttcgatgacgacgtatctacccccctgtgctattggtgaaggagcccccccacgaagattttactccacgaccacaatattatggtaatcacttctgtttacaaccgcctgtgtcgagaggcacctaatactccccgaaaggccgcattaattctggacccccacaagac

SEQ ID NO: 619977 - DNA, 572 bp, Homo sapiens
tgtagtggctcacgcctgtaatccctgcactttgggaggccaaggcaggcggatcacaaggtcaggagatcaagaccatcctggccaacacggtgaaaccccgtctctactaaaaacacaaaaaattagccgggtgtggtgatgggtgcctgtagtcccagctactcgggaggctgaggcaggagaatggcgtgaacccgggaggcggagcttgcagtgagccgagatcacgccactgcactccagcctcggtgatgaagggagactccatctcaacaaaaaaaaaaaccaacaaagcaaaaagcggtggcatttgagaaaaccgggaaaccaaagaaccaaccaagccttctaaggaggggtgacttaaattttaagcgcaaaagcattaagggtaatcacttctagcttttaaaagatagttaagagtctgggccatattccctagtggtagcaacagtgactatctgtcacaaccaagggcaccgggtacaatatcagtgtgcttctctctgcctccataaaaactcatttggaaacagaccctctggggaccccagaaggtagtgtgc

SEQ ID NO: 619978 - DNA, 639 bp, Homo sapiens
ggaagagggggggaatcaccagtgttacaaaattagaacgattgttttgcccggcccaggctagtcttaaacttctgacctcaagtgatttgcttgccctgtaatcccagcactttgggaggccgaggcggttggatcacctgaggtcagaagttcgagatcagcctgaccgacatagtggaaccctgtctttactaaaaatacaaaaattagctgggcatggtggcggcacctgtaatgccagctcctccagaggctgaggcaggagaattgcttgaacccagtaggtggaggttgcagtgagccacagattgcgccattgcactccagcctgggcaatgagtgaaactctgtctcaaaataaaaaaataaaaataaaaactattttgttgactttttgtttttcatcttagtctttcggaaacacgactagtttgccaaaaggtacaggagttaatcttccagcaatataaccttcacaaacttacgcatttgcgtaccccaagaagttgaaccagcgaagaatctttggtcctttggcgaaacgaattccatttatttaaggaattgcccaaagcaaacgggaagaaccccaaactggctgaactttttcctggggttaaaaccccttaatttttg

SEQ ID NO: 619979 - DNA, 176 bp, Homo sapiens
  misc_feature (20)..(20): n is a, c, g, or t
cactctaagatcattacatngtactgcgattgttaacctcaggaggagagacaggtgtgtctggcgacagagagagacaggtgtggacgctcagcaggtcagcacttgtggcggcacatgacaggctcttgaggtaggggaccgttgcacgatgtgagcggcgtcgaagaggggct

SEQ ID NO: 619980 - DNA, 305 bp, Homo sapiens
  misc_feature (259)..(259): n is a, c, g, or t
ggacgacactataggatcccccgaggtgcccttataacttcaccgccacgttattgtgcagaaaggcagcggtatccgcatgatgatggatgaccttgagctgaacatacatgtcccggcacctgagctgcagtcttgcatcatcgccatcacgggcctcgctgcaaacttggaccgggccaaggctgaactgttggagcgtgtgatggatgctcaggccgagcaggaggaccgtgctttaaggagtcttaagctgagngtcactgtagaccccaaataccatcccaagattatcggcagaaagg

SEQ ID NO: 619981 - DNA, 423 bp, Homo sapiens
tccattctgcatagactgtccatctgcattagctcacccctcacttgtccatatggttcctatttacttagtcatcccatgtttatctcaatgcccccatgccttctcttgggtggacggcacagattaggaaactcccctggcaggcaatttcagcatccttctgggaagtgcccacccaaagaagagtcattgctctggacacctgatatccagcaagaagaaggccaagaaagtgcggaggccagtaaggagatcagggcagggaggggggattcctcccaggggtgacatcaagcctttctagccaaagtctgcagaggcagcccccatatgatctgcggaaccgtgcgggcagacaggacatgcggaagcagcctattctcagccactcagcgcagggcctccgctctgctctcccct

SEQ ID NO: 619982 - DNA, 209 bp, Homo sapiens
tgggtccatgtgctgtggcaacactgacccaggagggtcagaatggcttcctgtaggagatgcccagcagtcctgtgaatctgtgacagctcagtagttagtccacgtgacaggctgaagtgggaattccctttcatcccagccaaaaccataggtgtggtgccggagtgggatgtgctcggcgactctgtccagtctgttttgtaggt

SEQ ID NO: 619983 - DNA, 806 bp, Homo sapiens
gcctgtaacggggcggggtagtgtccagacacctgcggggggggcgacccgcggggcgcgagatgtggcccctggtacggcgctgttgctgggtcgggtgctgcgatcagtcaggtactattttagtaaaaccagagtctggtagaactccacgtttggtaatgacacttgtcgtcattccatgcgtttgttactaaatatggaggcacaaaaacactactgaagtaaatacggtaacggtggcaactttagcacgggacgagatatttacacctttggatgggagctcttaaacaaagtccacttgttccccacgtgacttttaggtagtgcaaaaattgaaggtctcgacaattacttaaagggagatgccttctttgacgatggataagagttgatgctgtctcacaccacgaggaaactacgcttgtgaagtaaccagaatttaaccagagaaggtgacagtgatcattcgagctaaaatatcgtgtgttctcatggtttttctccaaattgaaaatattcttatggttattttcccaattttgtgctatactcctgttctggggacagttggggtattaaaaccacttaaatatagatccgggtggtatggatgagaaaacaattgctttactttgtgctggactagtgatcactgtcattgtcattgttggagccattcttttcgtcccaggtgaatattcattaaagaatgtactggccttggtttaatttgtgacttctacggggatattaatattaacttcatactaattgttaggtacagggattggattaactct

SEQ ID NO: 619984 - DNA, 525 bp, Homo sapiens
  misc_feature (22)..(22): n is a, c, g, or t
  misc_feature (127)..(127): n is a, c, g, or t
  misc_feature (153)..(153): n is a, c, g, or t
  misc_feature (517)..(517): n is a, c, g, or t
  misc_feature (519)..(519): n is a, c, g, or t
aattgggcacgaggaaagaaanaggggttccaactaaaagacccagccccccaggttcaaatgtccctcccgaaagaaatgaagtctttcccctggtgaatggtccccctgcccctgtctttcccancatcccactctccccttgtccccccngggggcatatctcagtcaggcagcggcttcctgatgatggtcgttggggtggttgtcatgtgatgggtcccctccaggttactaaagggtgcatgtcccctgcttgaacactgaagggcaggtggtgggccatggccatggtccccagctgaggagcaggtgtccctgagaacccaaacttcccagagagtatgtgagaaccaaccaatgaaaacagtcccatcgctcttacccggtaagtaaacagtcagaaaattagcatgaaagcagtttagcattgggaggaagctcagatctctagagctgtcttgtcgccgcccaggattgacctgtgtgtaagtcccaataaactcacctactccancncaaaaa

SEQ ID NO: 619985 - DNA, 822 bp, Homo sapiens
  misc_feature (822)..(822): n is a, c, g, or t
agccccccctgctcactctgacccactaggaacaccacgttgttttcttcactgtgaaagagaagagcttgatattacttcaagttttttgaaagacacctgggattttcatcgcaaaaagatcatcacctaggcacatcgtcgtcaggttatccaaagttaagatgaaggaaagaatcttaagagctgtgagacagaagcaccacgtaacctataaaggaaaacctatcatattaacagcagatttctcagcagaaaccctacatgccagaagggattggagccctatcttcagcctccgtaaacaaaacaattatcagccaagaattttgtatccagcaaaactaaacctcatatatggcgcttagctatttatttctgtatctattggtgttgctcaaactgttcaagctttggccattgggagctctttcacattggctcttgtgtacttttggcatgccctcatccactttgtatgggagcacttcctctttctggcaccacaggatgctccaggctcatcttgtgatttcttctcctgactcgcgcctagacttagacatttctcctaggagccctcggcccctcttacctttcttatccctctcgcaaaccgcgctttcaaacccacaccctgctgaatggtcgcgtctttgctcccgacgccgacagtgctgcttcccattctcatcggaccgcactccgcattccctagtttcgcccccaccaccctgcttttcacctcccgccatttgtccccgccaccttttatcttgcctaaccatcaccccctgcattcaaccttgatctcgcactctn

SEQ ID NO: 619986 - DNA, 441 bp, Homo sapiens
gatgattgctctcagttggccattgtcaacttctgatggccggccactaagctcttcatcttcaaggctctcgtgtcctttgcaaaacttcctgaaccaccaaatgcattgccaaatgcattgttgatgttgcgagttgtcttcactgctttacaacccgttttgaactcaaataaaaaaattgcttgaatttgctttttgtctaacgtcatttccgtagtctaaaataaatacaaacagcaagttaatacgtcattagcaaaaaaagtgagaagtgtgcattaaaatgatgcataacataaccacattgatttaagaatgtattccaatatcaaacagcagatttcagcaaatactgcagttacttttgcaccaataatttgtccacgtgcaaagttgagtcaggcaagggggcccaaagctggtactcaacgtcctaaa

SEQ ID NO: 619987 - DNA, 282 bp, Homo sapiens
cagtgcactccacaacaggatggacaggatggagctgcgtacgtgtcaccacctcctggcactcttccgacaggactcggcagctcgagcacatttgtcaaaagcgtcgagtattctttctcagtcttgtgttgtcatcagcttggcaccattcccttcaccaggggaaattcacacacctcacagtaaacatcagactttgctgggacctcgtgcttcttaatgggctccacccagttccagggcagggatgacatcttggaggcactttggcggggacca

SEQ ID NO: 619988 - DNA, 464 bp, Homo sapiens
  misc_feature (20)..(20): n is a, c, g, or t
  misc_feature (57)..(57): n is a, c, g, or t
  misc_feature (91)..(91): n is a, c, g, or t
  misc_feature (105)..(105): n is a, c, g, or t
cagcgttcagaccaaattcnttgatatgagctcagctttcagcaagacaacaaagancccctggcccagaagaagtgctgggagaacatcnccattgccagatcntacttggggctagtggtgggtggtagcctgctcatcatcctgattgagcagctggccatctttctccctcagagtgacaccagtaatgccccacagacttaggatgcaggcaccacctcagggcctggggactgacagctggtcctgagggagaagccaaatggctgcactggctggttccggtctccagagaacttgggttttttctcccccccaccccacccaagtaagtgaaaaaaaccacccaaaacaccggcactcttttattttttgtcatgccacagaatggccctcgagggcaccctgccatactggccatgccgggccagccccacctgaagctcagtgaaagctgatta

SEQ ID NO: 619989 - DNA, 134 bp, Homo sapiens
tcagctcggtaccggtacatctgacccagtacaactccagtaggcctgtcaactccagtaggcctgctcttcagcctaatactgctctgtgggaaaacttggtcccatttcccccaggctcctcaacacacacc

SEQ ID NO: 619990 - DNA, 489 bp, Homo sapiens
atctctctctgttgcccaggctggagtgcagtggtatgatcttggctcactgcaacttccgcctcctgggttcaagggattctactgcctcagcctccctagaagctgggattacatgcgcccgccaatacgcccgcctaatttttgtatttttagtagatacggggttttgccatgttggctaggctggtctcgaactcctgacctcaggtgatctgcccacctcggcctcccaaattgctgggattacaggtgtgaaccactgtgcccagcccttggttaaatagttctattgatgtttccaaaagttcagattctttctggaaagggaggactgcactaggaataatcatagaatcaaaactttcatgcacaaaaagacacatgagcatcatctaataaatattccttcttgttacagatgagaaacaggctgggcatggtgactcatgcctgtttacccagcactttacaaggccaagatgggag

SEQ ID NO: 619991 - DNA, 300 bp, Homo sapiens
ccccaatggaatccatctttcagtatgcttgtcggctgtttatctttggagaaatgtgtgttcaattcctttgcccattttcaaattgggttatatgctttttttgagttgtaaaagttctttatatattgtggataatatacctttatcacataaatgatttgcaactattttctcctataagttgtcttttcactttctaggtaatatcctttgatgtgcaaaagttttttatttttatgagttccaatttatctatttttgtggttgttgctcatgcttttggtgtcacatgtaata

SEQ ID NO: 619992 - DNA, 581 bp, Homo sapiens
  misc_feature (581)..(581): n is a, c, g, or t
ggcagtgctcctgtttctgctggtcgtctcttgaggttcccctctatgggggagggaggcgctagaggattctagtggctgttgcctagtcccctatcgttcacatgttcctggtgaaggagtttggcttctgtccactcctgtctctgggacggctacctgagtcctagagatctcatcctgagcctgtctgcttgcggtgtgtatccacagtgcgagaacgagtttcatggcagccggaataggacaacatgtgcctagtataactaaaatgggctttatcaatgttgctcttgtatggaggtgttctttgactgctgaaagacatcatagatgacacaaacaaatggaaacacatcccatgctcatggatgggtagaatcaatattgtgaaaatgaccatactgccaaaagcaagctacaaattcaatgcaatccccatcaaaataccaccatcgttcctcacacagttagaaaaatcaattctaaaattcatttggaaccaaaaagagagcccatggagccaaagcaagactaagcaaaaagattaaatcggagggtatcacactacctgatttcan

SEQ ID NO: 619993 - DNA, 1083 bp, Homo sapiens
  misc_feature (1083)..(1083): n is a, c, g, or t
atcccagcactttgggaggccaagacaggtggactcacttgagcgtcaggagttcaggaccagcctggccaatgtggtgaaagcctgtctctactaaaaatacaaaaattagctggtgcgtggtgtgtgcacacctgtaatctcagctactcgagacgctgaggcaggagaatcgcttgaacccgggaggcagaggttgtagtgagctgagatcgtgccactgcaccccagcttgggcaacagagcaaaactctgtctttaaaaaaaaaaaaacaaaaaaaccaaacaaaaaaccaaaaaaaaccttatttgggctgggcggggcggtggagccttatgcccacaatcccagcatttggggaaggccaagatgggaggatcacttaagcccagaaagtcaggagaaccagcactgggactacagaagtgaaggccccaaacatctacaaacaaaaccttcaacacacattagcccagagggatgggtggcaccgccacgtggaggtcccagcgagcaccaggaggctgaacgccgggagagaaccatatgagacccgggagaggctcaaggctgcacgggacgccaatagtctacagccactggcaacaccatgcctgggcgccaacaatcccgtgatactccacaaaatctaacgccttaccaaagccgtaactctgtatagagaacagccacttcagcactacacaactatcacacaaagcaatgggccccgaggaccggtgctgtgctcaacgtccgggaaaatcccgaaagaaccttctcgagaacagctaggagagacaacggagggagataaccacagaagcgaccagaagaagttccagaggaacaaacgacttgagaccaaaacaagacgagcacagagcagccatgggtacaatcacaaaaacaagatattaacacagaaaacaaagaggcataaaagacctgtgaatagagaaaggacacgcaaatgcgaaagaccccaagggacataatcagcaaacgcataagggccccgaggaacaaatgggccggagaaccccagagaaggacaagcggatagcacgcgaaacagagan

SEQ ID NO: 619994 - DNA, 193 bp, Homo sapiens
tcacacagttcaggagatgtgatggggctgatgggctcatccggataaatccgggctgctgtaaagaagttaaggcttttgaaagctttccagcgcctgctcctggctcacacagatttgcgccttccctctttacttccttcctcctcgcctttccccttcttcttcctcccttttctccgttctcctctcc

SEQ ID NO: 619995 - DNA, 152 bp, Homo sapiens
ctcgtcatccataacctacctacatgtaggttacaagctgctagcccatctctgaaaacgtctcaatttccttatctgtagtggcacatctatcctacaaggaaatcatagtaacagagtaccatctgctatactactactacctcagagaa

SEQ ID NO: 619996 - DNA, 200 bp, Homo sapiens
  misc_feature (49)..(49): n is a, c, g, or t
  misc_feature (86)..(86): n is a, c, g, or t
  misc_feature (139)..(139): n is a, c, g, or t
  misc_feature (173)..(173): n is a, c, g, or t
  misc_feature (190)..(190): n is a, c, g, or t
ctgggtcccgggagctccttctgcatgctggccatgtcgtgccgcacgnctgaggacaggaggtagagggagccctcccgggaccnaggaccccccgtggtggactccgcggcacatgcttcccaaggtggtcccacgnagggtgttactgggcaccagtggacttcggcccnatgggcccgttcaaaanattttgaggg

SEQ ID NO: 619997 - DNA, 259 bp, Homo sapiens
gccaggattctcaaacagagcattcatactgttccccaatcagattaagaaatagatttagagccgggctcagtggattacacctgtaatcccagcacttcgggaggctgagatgggtggatcacgaggtcacgagatcgagaccctcctggccaacatggtgaaatcgccatttctaaaaatataaaacttaactgggtgtggtggcacgcagcctgtagtcccagtctacacagtgacggctgaggcagggagaaat

SEQ ID NO: 619998 - DNA, 172 bp, Homo sapiens
cgaggtttcccaagcttcatcagtgaacaactgaaaaatatagactataaactttcaaggccaaaagatcagatttaagggcataccttttgaatgaaggaaacaggcagtataaagttcctagagaggtattatcatatgcaaatactaatgcccagcttctttcagtaat

SEQ ID NO: 619999 - DNA, 524 bp, Homo sapiens
ctcacatagccctcgttggacagccatgtcatgcgaaccccctgagcttcaaccggccacagtcaatctcataaatcgccccggacttacatcctccttactattctggcctagccaactccaacttcgacgcactcaccgtcgcatcataatcctcttctcaaggacttccaactctgctccccactaataagctttttgaagaattctagccaacctcgcttacctcgccctacccccccctattacctactgggagaactctctgtgctagtaaccacgttctcctgagtccaaatatcactctcctacttatcaacgaactccacatactatgtcacagccctatactccctttacatatgttaaccaccacaccatggggcgtcaactcacccaaccaccttaccacattaaccctccttcaccaaccgagaaacaccctcatgttcatacacctatccccccttttcctcctatccctccaccccgaaatcattaccgggttttcctcttaaaaaaaa

SEQ ID NO: 620000 - DNA, 162 bp, Homo sapiens
gtctgcaactgtcaggcatgcaaactaaggtactggcgcggtggtattacaacgctgcgtgcaggtcgtagctgctccaggcaggctgaggccaggcagaattgcttgagcctgggaggtggcaggttcacgtgcagccaagatcacactcactgcactcca

SEQ ID NO: 620001 - DNA, 971 bp, Homo sapiens
ggtatacgtagacaacataccaaatctacctttagtacctgaaaaattatagtgaatgcatttgtcgaagtaaacgtataggctagcgacttagaatgcgtggacgcataagatatatgatccctgacagattcgctgataaatgcatatatccaacaatgactattcgtcagatgggtgatccgtatcataacttatgaatgttttcttatcatgtatgtatctgggcgaggtagagccatcagggtaagcattccctcagaaaacactagcagtgaggtagctaggaacagctaggtgagctgaaccctgttcttatgtgcgtcgtaaccatgatgggagaatcctgatcgtggtacgagggtgatagacttatcgacactggaaaaacgctggttgtccaaccgtagagttctgagatacaaatctctagatgtgaggtccctgcaggaacactctactgaattctcactcggtaaaggttttaccttgtcgaagtcccgaagatgcgaaactgactctctcggcaggaaggaaaaaaaacccttgttagaagagagtaaaaaatttaacacccatagtaggcctaaaaagcagccaccaattaagaaagcgtcaagctcaaacccatacctaaaaaatccaaaatataatgaattcctcacacccaatgacaatctatcaccctatagaaaaactaatgttagtatagtaccatgaaaacattttcctcggataagcctggtagattaaaacctgaactgcagttacaagcatatttaaatcaacaaagtatattaccttatgtacaaacggctgcctaggacgttaaagaaaggcgggaatttccgcgttcaaaatacttaggtcaatatagagccgcagaagtgtagcgggcaacgcggggaaatccaagggcaacggggtataaggcgagcagcacagcttacagccctacccaaatttactcg

SEQ ID NO: 620002 - DNA, 556 bp, Homo sapiens
cctgacgcaattgctcgcaccattctcaatcgccccagaccacccgccaatcaaaatagatgctcgaacccagcaggttctctggcgttgcatcgcgaataaacccggcaaaacgccgcgcccattcggttcgggacaggcacagctcagggttgccggccatgatattgcccttgcccagggtgaagccgcacagcgcccaggctctggttgatctgctgtgttaggggcagcaagcggccacgaaatctcggcggcctcggcggcgtccttggcttcgaacagaatgccgttgccctggccggaatacagcgtctgctcgcgggggccttcgttgcggaaaaacaaccaattgaacggcacgccggtgtcgcccttgtcagccaaggtcaactcgatgacgcggcacaccgtgttgtcctttgagcaagggtgatgatgttgggtaatctgcgtgaccaagcaccgtgggccagcatgcgtcccaccaggtggccgatttcgccacggatcgcaccaggtttcgaccctgggcgcattggaatggtgcccccaa

SEQ ID NO: 620003 - DNA, 115 bp, Homo sapiens
cgaggagctttacatcaaacccttcttcagcaccacaaacttattctcagcagctgtgcggggttcctttcatcttcgtacttattcttgaattcctccaccagggtttcgatga

SEQ ID NO: 620004 - DNA, 1031 bp, Homo sapiens
agccggggtgtagatgcctgggaccgcagcgcctgccgctcgctcggcgctgtagccgccgctgccgccgctgctcttgagctcggggacgcgggcgggctgctccgagatggctctggtgcctgctggctgctgctctcctccggcgcccggggctgctggccgctcctgggtcccggcccctgtccctggccatctctcgtggtccctgagcccctggtcccgggtacccgcgtcctggccggagagaacgcactcagcatgctacgagccgccccgggctcgcgcccaccgggccatgaagaggggccgtgaggcgcgcgcggagtccggagcgaccgacggagggacggcagggaggccgacggaggagggcgcgggatcgccggaaggatgcacgccgcaggctgctgaccgacgactgcaccccgacggagtcccacgagtgagcctgacgtccagacccgaggcgatggacgcccggcgcctgggccgctgcagactgcataccacgtgcagactatccccggaccaggggttagctgagtgatcacgactccggatgcatggtttggacacgaacagaccttatcgtcccccgacgcctagcaattcccctggaagtgcagaccctgtacagaccccttgtatgcgccgaggtcttgataggcccacaatggactagcagacccactgatgtccactctgccagcctgcgcgcgcgtgcaccaccctcaggtgtgcctgttcggaccatacgcctaacacagggaagcaggtccgctcacatgaacctcaccccccatgtgggacaaacccaagtcccagcatggacagaggtgtgcccaagacctattggaactggatccctggtcaacgcggcacggacagaccccatccctccacattgtgaggaccaccgttgtcaatacacggagcgcccggggaaccatcgccgcgacgcgtacacacgtgcctagtgctccccctgtctctctacccattgcaccgctcggcccatgactccacac

SEQ ID NO: 620005 - DNA, 375 bp, Homo sapiens
ccgggcaagtaactataacgcgtctctaaggtacgcgcaggcctgaggtggcgcctcactcatcatcccagtgggcatcaccttcttcaaggacgagaccaccgccctgtggatcgtgttcaacgtggtctcggaccaccttcttcctcgtggacctggtgttgaacttccgcacctgcattaatgaactcggcacccccgcgctacgaacactgcctccacccgcaacccagcccaaacgaagccacccccaacgcacgagacacccaccgaacacacccgcacgccacaccaaccccacactcacacacaccaccacacacccacacgcaaacacaacaccgcaccaacacacccaaacaaaccacaacacaa

SEQ ID NO: 620006 - DNA, 145 bp, Homo sapiens
cggtattcagaaaggatcatactttacatttaaaagtatatgacgtttctttctagaacatgcctcttcagtcttggttaccattttacgcgctttcgaagtagaatctagttttcatatacaaaatagagttaccttatctgaa

SEQ ID NO: 620007 - DNA, 407 bp, Homo sapiens
aaaagttggggattactggcctaaagagtatagaaaacagtgagattgaatacatcaagccaaaacagcaaaagtaacagtttttggacttcactcaagttaaaagggcctaagaagaatgtattaaaggatttcatagaagcagttggtctgtggttcagttgagtatttcgtagaacacagtttttatttggagctggatgtgcagccatcatgaaaagagtgccccaaggacctagaactggacttagacaccggccaagtagtggaaattcctttgaacttttggaagcccaactcaccaagataagtgtattcaactgggttccttacctaagctcagtatttataatttttttatttgtatgtcatttatccagtaaaattccttagtctttagtaaaaaa

SEQ ID NO: 620008 - DNA, 165 bp, Homo sapiens
ggctgtcatcagatttgatccagacactggctttggtcgcatggacttgcactcagttaggagacaggccatgctttcatgtgcatcagctcactgatttcatcctcagtttccgcactgtgccccaccatagtgtctgtccgacaagcctggcagaaggcagac

SEQ ID NO: 620009 - DNA, 1360 bp, Homo sapiens
accgtcgtttcctctcttctctctttctttcttcttctgtttgctgtctgtggttgttctgtctcacgggagagacactcggacgggcgcgagcgcgctggcgggggcggcgggtacggcgggcactgtcgtggtgtctgacatcttgagtcggctacttacacgacgttcgtctgctaactcggtggctggagggtggtggactctctacatcgtagggttgacgcctactagtttctgcatagtggtgtgtgtggtgtgctcgtccctcctcgtgatgtatattggtactcgttagtttgttggagacgaccaccttttttgctctgttgctcagacacgctactccagccggtgtgtgttgcccccacgcttttggtgcatcaccaggaggtgtttctggcggcgaagtgtgcgcgtttggtgtgcaacctagggggctcgtctgctcgccgccgctgtgttggccacccacgtgggtgtgtgctgtcgcacgctcgttctctagagaacgcccgttgggggtgggtgctcccggcctcctcgccgccaacagggtgggctgcactgtttttggggcacccggtggtttgccccccagctggggcgctggttgtcaagagggagggtttctgtgtaaaaggtcttctccggggggtggctccacccttggggggccggcttatcgccccagcgtgggtgtggccgcctccgtcggcgcccgccgctcggtgggggcacattggtctctctccgctctgccgccggtgggcgggtagaattggtcgtttgtaccgtgcgcgcgattgacccccgatcttgtgtgcgggcccccccccgctcatctctgtcggatatttggggtttcgtggggcgtctctagagagcgccgcggggttgtccctccctgccgcggcggctgtgggtggctctcacgacccgcgccgaggtatgcccgcccacccctgttgttctattataaggggccacgcgtcggcgtgtccccctgctggtgcgtcaccacggggctgtctatcaggctccccgccttgtgcgcccccacctgtgtggtaaccccctcgcccgttctccacgcggtgtgccaactcgcccctcccttttctcccccgcgcgtatgtgggcgcaccacaccgccctcttctatggccccacgcaggtctctctctcggcgggctctgcgtgcgctccaggcggtcactcccgtgtgtaccccgggcgggctccaagggctcccgccaggtgaggggtgggcctctcgtctctctctggcctcctccactccgtgtggcccgcccaggagccctgaactctccctcgccccgacaatgaacagaaacaa

SEQ ID NO: 620010 - DNA, 245 bp, Homo sapiens
actgctgtagccatgattgcggactcagtgaacgtggctgtagagcttgaaaaggttgtctcgcactctctgcctgtaggggatacagtggatgaaggcggttccatcattgcgcatgtggtaaatgagccggcgagagtggttgatggagtgcattcaactgttgcgtggagtgtactggtggcgcctcgaggtgaggagatactctctgtgtgagtggtcccagcactactttcagacataga

SEQ ID NO: 620011 - DNA, 118 bp, Homo sapiens
aagagggagccttggtaaaaaacaagccaaagcccccaaggacctcagcccaggcagagctgctctaggacctgggcctctcagagggcgtatctgccatccttgtctccttaggcca

SEQ ID NO: 620012 - DNA, 142 bp, Homo sapiens
cgctaacattactgtaagccacctactcatgcacctaattggaagcgccctcctaccaatatccaccattcaccttccctctacacttattatcttcacaattctaatactactgactaatcctgacatggtcgccaatccg

SEQ ID NO: 620013 - DNA, 957 bp, Homo sapiens
  misc_feature (24)..(24): n is a, c, g, or t
  misc_feature (238)..(238): n is a, c, g, or t
  misc_feature (287)..(287): n is a, c, g, or t
  misc_feature (291)..(291): n is a, c, g, or t
  misc_feature (306)..(306): n is a, c, g, or t
  misc_feature (313)..(314): n is a, c, g, or t
  misc_feature (319)..(319): n is a, c, g, or t
  misc_feature (324)..(324): n is a, c, g, or t
  misc_feature (328)..(328): n is a, c, g, or t
  misc_feature (330)..(330): n is a, c, g, or t
  misc_feature (346)..(346): n is a, c, g, or t
  misc_feature (350)..(351): n is a, c, g, or t
  misc_feature (353)..(353): n is a, c, g, or t
  misc_feature (376)..(376): n is a, c, g, or t
  misc_feature (391)..(391): n is a, c, g, or t
  misc_feature (394)..(394): n is a, c, g, or t
  misc_feature (396)..(396): n is a, c, g, or t
  misc_feature (415)..(415): n is a, c, g, or t
  misc_feature (418)..(418): n is a, c, g, or t
  misc_feature (421)..(421): n is a, c, g, or t
  misc_feature (423)..(423): n is a, c, g, or t
  misc_feature (451)..(451): n is a, c, g, or t
  misc_feature (454)..(454): n is a, c, g, or t
  misc_feature (458)..(458): n is a, c, g, or t
  misc_feature (462)..(462): n is a, c, g, or t
  misc_feature (481)..(481): n is a, c, g, or t
  misc_feature (498)..(498): n is a, c, g, or t
  misc_feature (531)..(531): n is a, c, g, or t
  misc_feature (549)..(549): n is a, c, g, or t
  misc_feature (556)..(556): n is a, c, g, or t
  misc_feature (576)..(576): n is a, c, g, or t
  misc_feature (591)..(591): n is a, c, g, or t
  misc_feature (595)..(595): n is a, c, g, or t
  misc_feature (604)..(604): n is a, c, g, or t
  misc_feature (624)..(624): n is a, c, g, or t
  misc_feature (628)..(628): n is a, c, g, or t
  misc_feature (835)..(835): n is a, c, g, or t
  misc_feature (839)..(839): n is a, c, g, or t
  misc_feature (850)..(850): n is a, c, g, or t
  misc_feature (947)..(947): n is a, c, g, or t
caggaacatcctctactcccagcncccacctgtcccttcccacatgctgagggtgaattagatactttgagatcaccctggggctgctgggagctatgggggatgctgagggcaggccccagtattccggctaaccactcccagcccctgggccggccccctagcccaggacatccaggtagacaggaggtgcctgggccagggcttgcagccgggcgtgcacatccttgatgctgtngcgttgctggggctcccgctgccagcagccccgcatgatggcgtagacntctngtgggcaggcacgtngtttttnnaactnacgtncctncnttatgcagttgatttntttnntnttggagagctggtaccagggctnctttctgtagttaanatntnccagagcaccacgccgaanctncanangttgttttttttttttaatttacggtanatnatgntctngggcggcatccagcgaatnggcagcatggtgcggcntcccacacggtaatagttggtgctgtagatatncctgctcatgctaaaatnaccaatnttgaccaccagttcctggcncactagatagttgcntgtngccaggtcncggtgcacaaaatgcagatncgcnatgtacaccatccccgcagcgacctggctagccacggccagcagctgccccagacccagggggcctggagccacatcctccccaccagccagcagcttggcatcaggtccatgggatcggaggaagcggttgaggtcccgtgccgcatatactcaaagaccatgagcagggggcggcctcggtgcagacgccgaagaagcgcacgangtantggtgctgcanatggtgagcagctcagcctcacgttggaagtctgccgagcactctcggacgcctccttcagtgccttgacagcaccagcatcttgtcctgctcaggnaggaggttgt

SEQ ID NO: 620014 - DNA, 280 bp, Homo sapiens
catcatcatcgtctggagcagtgatctgtgttgaagctggagaataggacagatgcatcacgggtggcttggcgttgtttcagaaaaagtgcaggaggatgagttccgctatcgaatgtaccagactcaggtctcagacgcagggctgtaaccgctgcatggtgacagcctggtcccctgtcaggggcagcctttggcggagaagcagcaaccagtcactccaaatcctattgagatagacttcccaaacctcaggtcctatatttcatgcttctgtgcg

SEQ ID NO: 620015 - DNA, 207 bp, Homo sapiens
tccagtacccgagcatgcttgaatgccttgtcgggtcgacgtgtattcacgctactgcggtgcatgcctccctgtactaagtatccgtcgacacgtgagcaccgtgctgagctccaaatatcgttaagctggagcctggtcgacgtgtattcaccactgcggtgcatgcctccctgtacaagttccgtcgacacgtgagcaccgtgc

SEQ ID NO: 620016 - DNA, 489 bp, Homo sapiens
  misc_feature (54)..(54): n is a, c, g, or t
  misc_feature (82)..(82): n is a, c, g, or t
  misc_feature (191)..(191): n is a, c, g, or t
  misc_feature (224)..(224): n is a, c, g, or t
  misc_feature (249)..(249): n is a, c, g, or t
  misc_feature (386)..(386): n is a, c, g, or t
  misc_feature (389)..(389): n is a, c, g, or t
tttttaagaaagagtgatgcttttgtgcccccttttcccattcggaaagcgganctgtttccggagaaagcccctggcccanaatggagctcctttcctccttccttcacccaccgtcatgcagaacttcccgccctcaagtccctccccagtcaccctaaggaccattgaccgtgtcccccccaaagcancgtggctttgcccacgatccccacgaaactacncccatgagcttccctgccccctgancgagggctgtgccggtgcaggtctggtgggcggggccagggaaaggcggggtcagggcggggttcgcggaagaggcgggtataagaatggggggaagatgcgggaaaggaaggggcgtggtggctagagggaagagnagnaacagaaggggctcagttcaccttgataaggtgcttccgtggtgggatgagaggaaggaaacccttacattatgctatgaagagtagtaataatagcagc

SEQ ID NO: 620017 - DNA, 279 bp, Homo sapiens
cccaaacaaagcccccgggtacaggtccaacttcggagggaaaaaaccttgtgtgggactgttattcccagggctccagcaagcccctccctgggtgacctcgggcaaggccctttttgggcctcggtggcctgtggataaggaggggagacccccccttgcctgcctgcctgcatcccggggccattgtgaggttgggggaaaacctggccgtggagctacaagcttgtgcggatgtcaggggccatttctgttgctaataaagtccaaagtggccca

SEQ ID NO: 620018 - DNA, 448 bp, Homo sapiens
  misc_feature (180)..(180): n is a, c, g, or t
  misc_feature (441)..(441): n is a, c, g, or t
  misc_feature (448)..(448): n is a, c, g, or t
ttttgctaaggttggcatagggatcgtttgccttcaagtccccttctttctcttccttctcttcccctgagccctgctcagccatcctttttgtctctgtccttcccttgctgaggaggctccttttctttagctgtgtcctcctcctcctcttccccttcactgtctgcagcagcaggntttactcttggctttcccttttgatttctcctcctttccctttttactcctgagcccaggaggttcctcagccacggctttattgatgcgattcttctctggcttggcgggcttgagaacacggttttcttcctcctcttcctcctcctcactgtcatcctgaatcagggcttcaaaaacatttccctcgtgccgaattcggagagggcccggccaactgccgccgcctcgggaggtaagcgaagagaggaagcgggagangagccan

SEQ ID NO: 620019 - DNA, 240 bp, Homo sapiens
aaccattctctaccatgcttcatagagaccccatctctcccaaaaaaaaaaaaaaaaaaaaaaaagaaaagaaaagaaaaaaaattagccaggtgtggtagtgcatgcatgtagttccagctactcaggagactgaggtaggaggatcagttgagccaaggaagttgaggctgcaatgagtcatgatcttgccattgcacttcagcctgggcaactgattaacatcctgtcatgagaaaa

SEQ ID NO: 620020 - DNA, 771 bp, Homo sapiens
  misc_feature (44)..(44): n is a, c, g, or t
  misc_feature (78)..(78): n is a, c, g, or t
  misc_feature (112)..(112): n is a, c, g, or t
  misc_feature (130)..(131): n is a, c, g, or t
  misc_feature (150)..(150): n is a, c, g, or t
  misc_feature (152)..(153): n is a, c, g, or t
  misc_feature (159)..(159): n is a, c, g, or t
  misc_feature (214)..(214): n is a, c, g, or t
  misc_feature (242)..(242): n is a, c, g, or t
  misc_feature (260)..(260): n is a, c, g, or t
  misc_feature (291)..(291): n is a, c, g, or t
  misc_feature (296)..(297): n is a, c, g, or t
  misc_feature (365)..(365): n is a, c, g, or t
  misc_feature (379)..(379): n is a, c, g, or t
  misc_feature (444)..(444): n is a, c, g, or t
  misc_feature (449)..(449): n is a, c, g, or t
  misc_feature (489)..(489): n is a, c, g, or t
  misc_feature (506)..(506): n is a, c, g, or t
  misc_feature (535)..(535): n is a, c, g, or t
  misc_feature (617)..(617): n is a, c, g, or t
  misc_feature (755)..(755): n is a, c, g, or t
agtatttattacattttattatagtattattttattatattcangttagtgtatgtgagttctcagtacaagcaggangcagcggctagatgcaactagcacactagaaacncccgtgcgtgtgctctannctttcaagcaaagccattncnntagctnggtcgcagcaatccccaccctcccacctacgggcaaaagagaacagctgaaaacnggcttccctctttaaagggcactcagtnatttttgtccgtcatggncaggaaaaagaaagaaaaacaaaacaaaacnggagnnggtcgttcttgccttgaaagcgggcagtggctattttcttctctctgccaaagcaggacacgttattntttacacagagggncacatcgctgtccctcacaaatacttcagacagttgtcttcaacatcctgtggttcttcgtccgnttccnttttttttttgaggtggggtctcgctctgtcccccccccnggggcgcagtggtgccntcttggcttactgcgacctccacctcccnggttgaagggattctcctgtctcagtccccccaaatacctgggattacaggcgcccgccaccacgcccggctaatttttgtntttttaatagagacatgctttcaccatgttggccaggctggtcttgaactcctgacttcagatgattgcctgacttggtctcccaaagtgctgggattacaggcgtgacaaccacgcccggccccgactccttctttntttttttttttttttt

SEQ ID NO: 620021 - DNA, 240 bp, Homo sapiens
gtcatacggtggtcggggtgaaaaggttgggtgaaagctaaataggttgttgttgatatggttaagaaatagtagagggatgatgctaataattaggctgtgggtgtgatttgtgttgattcaacattatgtgtttttttggaaagtcatgtcagtggtcagtaatatatattgtggcggacgatatagttttagcgattggcagtcaggtttcaggttcatgtacagtatgtctcaggc

SEQ ID NO: 620022 - DNA, 496 bp, Homo sapiens
atctctgaccacgatggcgcttacctttcagacttcattaaacttatgaccgaaaaaaaaaaaaaaaaaaaaaaaaaaaaaaaaaacaagaacatcaaaacaacaaaaaacaacacccaaacaagaaagaaaaaaaaaaaagaaaaagaaacaatgtggctcgccgccgccgcagccgcgccacagagaagagattcactaacacccccgagtgctgggggggggcggcgcccacagatagataataagacacgaactacagcacacaaaatgtatgctcagaaaaaaagacggctggagcaaacgaacaaacgggggggggttctctccccaaaaaaaaataaacggcccgcgggggggacaaacagactgtggttgataaacaaaccacgcgacgaagggcgtgtgcgtgagagtaaatagacgggccattactacagaggggacacacgccaaggttggataaaatgaaaataccccccgccgcgggggggga

SEQ ID NO: 620023 - DNA, 1263 bp, Homo sapiens
tcccgtctgcgcgagtccacgcagctccccaggccctttcaccatgcacatgcagcagcagtgcatggcatgcaatgctgtggatgcagctgcgcagggcaccatccatggtgcagggccatgtgccctcttacttcctgatgaggccctgaccctggcagtgggcacggctcgcttctctgtactgcttgctgcatggtattcgcttctacctccgagacctggcagaacctgggtacactgcacaggctggaccaggctggctaccgggctgtggccattgacctgccagcgtctaggcggcactccaaggaagacagcagcccctgcccctattaggggagctaggcccctggacagcttcctaggacggctagtggtggatagccttgcgagctagaggcccacccgcgtccgtgataccagtccactcacatgagttggcccttgtactccacatgccacttaccatcacgggaccccttggcatcaccaagactaccactgggcatttatgtagccaagtgagaccacccaactgctgcaactggcacacaacatcaaaatgctagcccacacatattgccaagttggtgaacagaactcccagcttctgactagtactcatgcgaagaccagggacccccatggggtcccgagccagccttatgcaggccaccatgacagccagcatgccccaaacccacccgggggaggccatggacacccccgacacgcggcccgagggcaacccccatgatcaacacctaggcacccaaaccacgacggacgtcgggcctaaccaggcgcatgcccggaactatccacctagaacacgggcggcacccaccatgaacgacacacagcacacctaccttcgcacctggacggactcgcggacaagcccattcccgtcaccacatgaaacgcacctctccatttggtacacgcggcacatatacaatactaataccccaaggagatcaattgccaccacggaaccatgccacccacggacgccacccggccaccacagcgcagggccccccagacccaaacagccggcccacaaacgccaccacgcacacccgaccctgctcggccgcacagcacagccgcggcgacacccccccacaaacaacgcgccacacacacacccacaccagacaggcccacaaccaagcacacacgcacacccaacagagcctaagcaccccctcgacgagccaacgaccccaaccaccacacacaaacaaccagccc

SEQ ID NO: 620024 - DNA, 84 bp, Homo sapiens
tggcagaggcagtacggcccaaaacgccacccgttgtaatcaaatctcagcttaaaactcaagaggatgaggaagaaatttcta

SEQ ID NO: 620025 - DNA, 152 bp, Homo sapiens
accatggtcatccccttatagagcggagcgcacctgataatacggcttaccgctctaagattaaaaatcgcccgtagcccacttcttcaccacaaggtcacacctcacacccctatataccccataactagttaattatcgagaaccataca

SEQ ID NO: 620026 - DNA, 226 bp, Homo sapiens
  misc_feature (32)..(32): n is a, c, g, or t
  misc_feature (61)..(61): n is a, c, g, or t
  misc_feature (111)..(111): n is a, c, g, or t
  misc_feature (186)..(187): n is a, c, g, or t
aattcgcggccgcgtcggactgacggctgcgnagaagacgacagaagggggagccacccgncgttcggccagggttctcgctcttgtcgtgtctgttcaaaccggcacgtnctgatccggaaatatggcctcaatatgtgacgccagtgtttccgtcatacgcgaagatatcggtttcattgttgnncttgctcttccttcagaggattatccggggcatctactc

SEQ ID NO: 620027 - DNA, 882 bp, Homo sapiens
aaaaaaaaaaaaaaaaaaaaaaaaaagccctgaggagttgaattggggggaaaacccccccgccccaattttgggggttttggggggggggattttttttttccccccttggggggggaaaaggctttttcttgggcggttttaaatgtccccccatttttggtgtgtgtcgccaatttctgttgacgattgtgcccattacaaacactattaagactgcctgacttttcacacccccgtgggggggggcggaaggcagcgggcgagaattttccctggtgtggcccccctggcaggggtctatttcattttccacacgggaatcatggggggcgcggcaattatggcgacctcgagggggcgtcaacgtggtttaaaaccacgtgtgagaatagggttggtgtaccccgtggctcattttgggagagaagaccacaatgtggtgggggggcgcagcaatttgttcagaaaattcccctttgtcagcaatttttacaacgttggtcatcgatttaacaccttgtaggcgtggtgttcccccacaagaaaaacaatcacaaaaaccaacaaataagacacaaaatactaacatacaataagatcaaaagaaaagatagaaagaaaaacaagaacatagtaaggaagatagcataaaaaaacaagcaagggcggggcggcggggcgacgagaagatttatctcactcgtggggggcggcgaccaccatagtgtccgccccccgttgttttttataaaaaaagcgagccatcaatatattgtgtatagtattatatgaatagcggtgcggctgctcgcgttaaaaaaactgctagcaatcaaagaaaactatcgggtctcctttaggaggaacccccttttgggg

SEQ ID NO: 620028 - DNA, 548 bp, Homo sapiens
  misc_feature (16)..(16): n is a, c, g, or t
  misc_feature (28)..(28): n is a, c, g, or t
  misc_feature (132)..(133): n is a, c, g, or t
  misc_feature (520)..(520): n is a, c, g, or t
cgtacccgggaccaancttttttaaaantttttttggggggcgccccccccccccccccccgggggggcgggacaaacacttcggcccattacggcgggcctttcctcagctagcggtccaaaagagggggnnttttttgtggggggggggggcccccccattttccccccgggggggggggaggggatttcccccccctattcccgaggaagctaaggctgcgtagggtgaggcctcactttccatcccccccccgggggggggggggggggggggccccccccgggggggggaaaaaaaaaaacccggttttaaaaaaaaagggcccgaaccccggcgtaccagagcgagcagccagccctaaacaactttcaggcccccccccgggggcaccccgcgggggggggcccccccaccaacacaccctccccaaaaaaaaactttttggggggggcgggggggggccccttacctagttactaccgaagctacagcctagcatactaactactgggggcnccccccttttcccaaatttttttttccc

SEQ ID NO: 620029 - DNA, 428 bp, Homo sapiens
gttgcgtgtacagatatgttaacgccactttcgtagtcgatgtagtgtcactgtcagttgccccaactcaggtgagtctcagcttgataggggagggggtgatctaaaacactctctacgccggacttctatagccttgggctactcgtgtgacccgcggtggctggcacgaaacttgaccaaccctggaggtatagtatagcttagttaaccctttcgttgatggcataacggtccctccctgctgtttcccgtgggggtgtggctaggctaagcgtgttgcgctgcattgctgcgtgcttgctgcttgtccctttagatcgtggtgatttcgagcgtgtgacctcactggaacggggatgcttgcttgtgtaatcttactcagagctaatagaaaggctaggaccaaacctatgacctgacatgag

SEQ ID NO: 620030 - DNA, 536 bp, Homo sapiens
gcgtgtggatcacctgaggtcaggagttcaagacccagcctggccaacatggtgaaaccctgtcttttctaaaaatacaaagaattagccaggcgtgatggcaaatgcgtgtaataccaccaacttgggaggcgaggcaggagaatcgcttgaacccgggaggcagaggttgcagtgagctcagattgcaccactgcactccagcctgggcaacaagagcgaaactttgtctcaaaaaaaaaaaagcacaaagtcagctgggcacggtggctcacctctgtaatcccagcactttgggaggcggaggcaggcggatcacttgaggtcaggagttcaagaccaccctgggcaatatggcaaaacaaaaccctgtccctactaaaaacacaaaaattattcaggcgtggtagtgggtgcctgtaatcccagctacttgggaggctggggcaggagaatagcttgaacccaggaggcagaggctgccatgagccgagatcatgccagtgtgggtgaccaagtaaaactgcgtctcaaaa

SEQ ID NO: 620031 - DNA, 157 bp, Homo sapiens
tggggtaattccctaattactttttaccctaaggtttcaggaagagtcttggggggatgactcataacttcaaggatgatgatgaagaagaagaggcacaaggaatctcggtcctgggagaagatgattggacggatcatggatctactatatgctt

SEQ ID NO: 620032 - DNA, 360 bp, Homo sapiens
cctggtcgtcactctgggcagggatgccgtcagccttgagggtcgccacccacctgtgtgttgccctctgtcctggcggggaaacatacaccccttgtctcaccaccaaccttgcttgtgtagtcagcagggctgccctgccccaaggactcactgcatgtacccggacccctaggcctggcctttgcagcatagttgggagcttctggattccatctgcacctttgcgccctttgtggtcgggccttcctttcctctcctctccacctcctccattgttgggcaacaactcagccacctgatggcagcctcagaggcttactctaacccatcccagaataaatggagacttcatgtgtt

SEQ ID NO: 620033 - DNA, 985 bp, Homo sapiens
gataccttttcgagcatcagagaatcggcatggaacaagaccagtgtattccatgaaggggtgtgatgatggttttattgccctcttgcccatgaagccacggaggaatcgtgctgcacgagaggaatcctgtcctcttgctgggtcggccattcgatgccttcgtgtggacaaggcttcattacatagctctgcccttaatgagcatatgagacgttcatagggaagatgattatactggagccacgagccccagatggctgagcgaagctcatccatgtcgcaggcttaagccgcgtcaacgtgagtttcagaacgaagtcgagaccggaagagagactcttgagaagtgtagctagtctggtggagaatctttcggtgcgaacccgagcagaacttgcgaagatcgacgttaactgtttcattgagggaatgagccctatgagtaccgggtcctcctatactcacaacgctcgatttcttactgagcccctcaaatggagctagtttccattctatgaatgccaacggagtgtggtagagtcctttattcatatgcagcaggtccgtcagataaactataacggagcgttcatctggaatgaagaagaagaatgatgaagcagggagcagctgcaagaggagcggccaggaagttgaaggcaagagtccatgtccacagagtgagtgctgaggatcagggctgaaacgtgagaggctgtgagccagaaggtgggaggctgcgagccagaagtggaggtggtgagccagaattgggaggtggggccaaaccgagaggttgagggccgaggaaatgctgttcaccccctggggaggctggcccgcctcggacagccggccccatcgggacagggggggccctggccgctcggaacccgagagaaattcactcgggggccactccccccacggatcaccaactgggggggacaacccaagggaaacacggggacacacacacggg

SEQ ID NO: 620034 - DNA, 368 bp, Homo sapiens
tcggcttccatacggaaggtcaggagaagccagtacaggatctttggagaggtctggggtacggtgacgggctccacttgagaggctctgataaacattccagtgctgggtgtgggatgtcaatgatgattttcctgaggaattacccaaacaaaaagacctcatgaaagagtgtaaacactttggtaaagaatctgtacccaataccatgatgttcaggcggtgatcggggctccctgactttctgagagctaaaaaattgtggtgtctcccaaccacttttccatccccagcccttctcatcctgggagcactctgccgctcaagagcgggttggtcacttatggtcagacttcccgtatggttgc

SEQ ID NO: 620035 - DNA, 312 bp, Homo sapiens
cagggtaattaatggtttaggtcagcccaatagtaataattgatttgctgtcatggaaaaaacaaaatcctgttttggaagatcacttggaaccaacacatgtggcagagtcacatgaacgtccgatatggcaaagactctgactgcgcgcgccatctcctttttgtccctttcccaacgcaatcgaaagtgtaacagtgcacgtgatactcagagtaaagactacagtccccgggcaactcgcttgggtcccctgccacactgtggaagctttgtgcactcgctcaacgcaataaatcttgttggtgccca

SEQ ID NO: 620036 - DNA, 426 bp, Homo sapiens
  misc_feature (73)..(73): n is a, c, g, or t
  misc_feature (298)..(298): n is a, c, g, or t
  misc_feature (301)..(301): n is a, c, g, or t
cacgagggcggcgcgccgcaggccgccgcattcagcctcaaagaatggcgcagagacttttgccgtcgctggngcgacggatattgctttcgcgctgatagtccctgacggtcgcgcccttgccgtccaccatgtcggtccgcgcccccgccatgatgatcttgaagatgaagcccggcggctggtcgctcatatgcgcgtacatcagtggcgtgcggcccagcgcatcgcggccgttgatgttgccgccggcatcgcacagggtcctgacgatgtcgagccggccgaccgatgctgnggncatcactggcgtggcgccggtctcgtcgccggcattggggtcggcgccgtaggcgatcaactgctgcacggcaccctgctgacccgacgcagcggccagatgcagcgccgtgaggccgagcgcgc

SEQ ID NO: 620037 - DNA, 222 bp, Homo sapiens
  misc_feature (66)..(66): n is a, c, g, or t
  misc_feature (185)..(185): n is a, c, g, or t
  misc_feature (198)..(198): n is a, c, g, or t
aaatgtctgacccattaactgcaatgccccagcagcaacttttccagcccttaaaaagacccttanattttgattttacatgcggggtacctggcccattgttgtcaaatgcccactctccaacagatgtggtcccccattttcttaaccacaaagtacccctcacttttcaatttgtcctgttnctaaatggtgttncattaaagccctgtgttaagtgtc

SEQ ID NO: 620038 - DNA, 430 bp, Homo sapiens
acagtaatgtagcagtagaggttcactaatgtaacaaagacataccaatgtaagatgcgggaaactggatgtggggtatatggggactctctgtactatcttctcaattttcctgtaaatctaaaactgttttagaaaataagaccaccaggccgggcacagtggttcatgcctgtaatcccagcactttgggaggctgaggcaggtggatcacctgaggttgggagtttgagaccagcctggccaacatggtgaaaccctgtctctactaaaaatacagaattagccaggtgtggtggcacacacctgtaaccccaggtactcgggaagctgaggcaggagaatcgcttgaacccaggaggtggaggtgcagtgagccaggatgcaccacatgcactccagcctgtgtgacagagtaagactctgtccc

SEQ ID NO: 620039 - DNA, 124 bp, Homo sapiens
actaaaatacaggtacagaagaacatgttacataacaccatggagatgcaatcaacaaattcaagcagggcaatgtgtctcacacctgtaaactcagcactttgggaggccaaagcaggaggat

SEQ ID NO: 620040 - DNA, 386 bp, Homo sapiens
cacaagtacaagttagatctgaagtgacacaaaagaacctagcttggatgaagtccaaagccacattctctgagggtgccctactccctgggaagaccctcccaaagtcctcgctatgaagcagatcactggggctgacccttggatgttttaagttttggagtcagggtcaccaaagcgtgagtttcacagttgaacacgattgttcagaagcagggtatagatgaaaggcaggagataaaatcgcacttctcaattgctctgaactctagcttaacttgacatgggacgtgaataaccttcctgtctagagagctgtctccttgaggtgtgacattgcctctctcactaccagaacaccctcgaaggggtacccggctcgaatt

SEQ ID NO: 620041 - DNA, 395 bp, Homo sapiens
ccaccttccagtgtagacacgcgcgacagccttggcccttgagcttcttgaacaacagcccaagcaacgactcgcggccggtattctggttccagtcgttggcgctctggtcgtagagcacctgtgtgtcgtgtgccacagcgccgggtaacgcggtcccggtcctcgcggcgcgtgaagagcgcgcgcacggccaggttacccttccgcaggcgccgcagcttaatgcccggaatggccacgttaatgcccgactcaatgtgcgacgactggtatagctcttgcgcccgacagtccatcaacaacaggcgctcgttgcagagctacatgtgctcgttgagacacgccagtgtcgtgctgatcgacatttcacacgcaaagcgcacgtgtctgag

SEQ ID NO: 620042 - DNA, 371 bp, Homo sapiens
  misc_feature (8)..(8): n is a, c, g, or t
  misc_feature (177)..(177): n is a, c, g, or t
  misc_feature (229)..(229): n is a, c, g, or t
gcttcatnaagcattgacccaggggcgcttacccttcttttcctctcctcaggccttcttgtgtatataacacatggtttgatgttgcccaggcacagtggtcatgccctataatctgagcactttgggagaccatggcggcgggtaaattgcttgagcccaggagttcaagaccancctgggcaacataataagacccccatgtctacagaagaagtacaagaattanccaggggtggtggtgagtgcctgtagttctagctactcaggaagctgaggtgggaagatcaattgagcctgggagttcaaggctacagtgagctgtgattgtggcactgcactccattctaggcaacagagtgagaccctgt

SEQ ID NO: 620043 - DNA, 528 bp, Homo sapiens
agttgtagaagttgatacaagtgtttgtagtgctgttttgcttgggttgtggtgcttttgtcatgaacgtatttcactcgtgtacagtaattgtaaactgtaagagtgttaatgaacgttgttatctttttttttaaagaagcgctctctgttcgtgcattcagcacttctatcggcagtcggattggtttatcatgattggcttgtatttgtttggtcaaactgctgcgtcactgtgattggttgtgatcattgttttcttcaaatggtgatttaagaagacccgtgcttagctttttttttcttctttaatatacagaattgctagaaagtgtttagagatgttgttctcctgcctacaaggaactctctacgctttgtatttggtgattttacaagctgaaaattctcaggttaaaagatgtgttgtggagtcggtggcttctagtgttcgtatatcttaacatgctattttatcaaaaaaaaaattaaaaatgtgtgcaatttttcagcactacagttccaata

SEQ ID NO: 620044 - DNA, 1825 bp, Homo sapiens
  misc_feature (115)..(115): n is a, c, g, or t
tcttctgtgccatgggtggcgtgggaaatgtgggaggtgtgaggtggagtggggtggtgaatgtggcgtgcccctgtactgtgggaggccctgtggggggcctcatacttgggcnctgtggacgtggtcctcctctccagcactgtgtctccacaggggcctctctctgtgagaggcctcctgtgtgaccgcggtggcctgtgagaggccttctcgcgaattctctctctctcctctcacagcgccagagaacacagcggacatctctcagaagcgtgtggagagtgtgcccacgctgtgggccctctctgtgatgttgtgggtgttgcccctctctctgtgtggcacccgcggtggtgtcgtctcagaagaggtcccccgcgagtgtgatgacaacccctctcacagactcatccggagagagtctctatgtggggggggacgtcgtaaagtatgaccacataatcctatgtgaagaaggggagacaaatgagagggggaggggcgcccaccaaaaaaaactcacagagaagacccccccacagaagaaacaaatctaccctttcacacactcggtgatgagaagagggcacagagtgtagattgcggtgggaccccctgctgagagagagtagggagtgtggggaatcaccagaggttcccctcgcggggagaaaacaccgagggtctcctccgcaaatatcttctccggagagaggccacactgtgtcccactggtgtgaacacagagtgggagtcctccacaacaaaccgctcttccgcagtatatgctgagtagcacaagcctgtgttgtataaaacaccacccagtgtagtgggaagctctttaacacacaaactcttagtgtttgaacaaaccctcatccaaagaggggccacactctgtttgttgggtgtagcacactttttgatttacacccccaatgtgcccccccacggagtattgggagacacctttcctattttgaggacacctttgtaaaaccattcttgggcacagaaagaaaaatcagctgggccaagcggagcaacacagacgggtgctggcaccccctctcgagaaagaagtgtcgttgatactctcatcacacaaaaaagcaacacccccgggagaacatactgtggcaagcgaagctggaacacacccacccaaatctgagcacacacacagaagaggagatcatcatacacacacatagataagacgtgacgggaagcacacagagggggcacacacaaaacaaaaatgagctggagacaaacgagtcaaaaacaacaccagcgctcatgatgtgggagtatgtacccaccagccatcccgtggtacagtgaagaataagtcgagggaacacacacaacggaggatagacaaggagtgatgcccaagacaggagcgcaccacaggtgacgcagtaacaaccaacatgagaacgaagacagaaaaaacaccctgctgtcgatcggatgaactttatccccgtctggactacaaggtcaaccatggtcgcttatcacgtgaaggttatcgtagggtcaccatcgactagatgaacgcagcattatcccatcatcacagacaactaagtccaatatcgtcagggctgaacctaatatgtactgacgccacgtcgatgtatgtataggaagaagaaaaagaaaggagcacagacttaatctagtacccagctgaaatgcgtgaacgtaagctacatgcacaagcagtaatggagtgcatcactaccaccacacatagtgtagtatatcaaagcttcaactatcagagagatacaatcgatgcgcagaa

SEQ ID NO: 620045 - DNA, 736 bp, Homo sapiens
  misc_feature (8)..(8): n is a, c, g, or t
  misc_feature (63)..(64): n is a, c, g, or t
  misc_feature (66)..(66): n is a, c, g, or t
  misc_feature (72)..(73): n is a, c, g, or t
  misc_feature (87)..(88): n is a, c, g, or t
  misc_feature (96)..(96): n is a, c, g, or t
  misc_feature (103)..(104): n is a, c, g, or t
  misc_feature (106)..(107): n is a, c, g, or t
  misc_feature (115)..(115): n is a, c, g, or t
  misc_feature (121)..(121): n is a, c, g, or t
  misc_feature (131)..(131): n is a, c, g, or t
  misc_feature (153)..(153): n is a, c, g, or t
  misc_feature (177)..(177): n is a, c, g, or t
  misc_feature (186)..(186): n is a, c, g, or t
  misc_feature (188)..(188): n is a, c, g, or t
  misc_feature (212)..(212): n is a, c, g, or t
  misc_feature (217)..(217): n is a, c, g, or t
  misc_feature (223)..(223): n is a, c, g, or t
  misc_feature (246)..(246): n is a, c, g, or t
  misc_feature (252)..(252): n is a, c, g, or t
  misc_feature (254)..(254): n is a, c, g, or t
  misc_feature (268)..(268): n is a, c, g, or t
  misc_feature (281)..(281): n is a, c, g, or t
  misc_feature (289)..(289): n is a, c, g, or t
  misc_feature (293)..(293): n is a, c, g, or t
  misc_feature (331)..(331): n is a, c, g, or t
  misc_feature (339)..(339): n is a, c, g, or t
  misc_feature (368)..(368): n is a, c, g, or t
  misc_feature (379)..(379): n is a, c, g, or t
  misc_feature (389)..(389): n is a, c, g, or t
  misc_feature (397)..(397): n is a, c, g, or t
  misc_feature (481)..(481): n is a, c, g, or t
  misc_feature (652)..(652): n is a, c, g, or t
  misc_feature (716)..(716): n is a, c, g, or t
caatgganacaaacagttctgagaccggtcttccaccacggattaagagggggggggcagggnngngggggnngggggggggggggnngggggcgnggggggnngnngggggggncgggcnagcgccagcngccggcggggccacggcgtggnggacacccaccgcaactggctggntcatatcangnacagcaaagcgacccaaagggggngaggnggagangcgctcaacacacaggggcgggngagggncnagatcaacaatggnagcatcaccaganggcaagantggngggccagcggccagcgttggaccagaacggcgagcaancttttccntcagcgcagcaaacgggcatgcgatgggngcgcgtggggnaatccaaganaggggcanagcgcggcgcggaggtggcctggatggttcaggataatcacctgagcagtgaagccagctgcttccattggtgggtcatttttnctgtcaccagcaacgttgccacgacgaacatccttgacagacacattcttgacattgaagcccacattgtccccaggaagagcttcactcaaagcttcatggtgcatttcgacagattttacttccgttgtaacgttgactggagcaaaggtgaccaccataccgggtttnagaacaccagtctccactcggccaacaggaacagtaccaataccaccaattttgtagacatccnggagaggcaggcgcaagggc

SEQ ID NO: 620046 - DNA, 261 bp, Homo sapiens
gtgaaccattgttgtatgaaccactagttacatacacctgatcataaacatcctgtgtgtaatagtttttcccaaaacacgtagcacccttcagcaggaccctataaaactttcctccagcccttgcctctttgcaggtagccccttctctgctgagctgcccactgcaacatattttcacaatttctctaataaatctgcccttctttacctacaactatcctggtaaatggctttaccacctgcaaaactgaccctagg

SEQ ID NO: 620047 - DNA, 251 bp, Homo sapiens
ttgaccagagagaaaagactagcgtcatctcacactgaaaaaaaatctcaattcccgtgccgagcgcagctggctcacacctgtgatcaccagacactataagggaggccaaggcaggtaggatcacctaagtacaggagttcgagaccagcctgaccaacatggagaaaccccatctctactaaaaatacgaaattagccgggtgtggtgggcgcctctaatcccagctactctgggggcgggcagaggg

SEQ ID NO: 620048 - DNA, 805 bp, Homo sapiens
caaggtctttcgagtctcaattcccaggattccagtatggaaatgtcaaagcttactgataaggtgcaggccgagtatagagatgcctatagagaatacatttgctcagatgtcccagttagaagggggccccgggttctacaaccattagtggcagatcttctccacatagcaagatagttacatggtgtcagaagttcatccagggggctcgtaatgtcattcgaaaacctagagcaacgaaaaggggaaggatagtgaaccaaagcccgatgatgggaggagagtccttgtctaatgaagaggggagatgtatcgatgtatgtcatcatcaggggtttccagcaacgagtgcttcccccctggatcctatcaggtgaagaagatgaaacaatcgagatcagtcaggcagtaggcttctcccaggcaagaaatcttccgaaagggtcaagccttcttccagacagaattgacagcttaagggacagtggggtgcgctatcaaaaactcccaagtgacgaggactgaatctggcacagaagcacgtcagatacacactgccactgtcaaagatgcacaagacagaaaagcggaagggaacactacgagcagagtgcccgaagtctccagaaacagggtaggagaccgataagaagctcaattagagccaaggagcataactcgggaggggcccctggcaaacagggtcctcgggtcacgaagggcgaccacgggaagctcccaaacaacttctgccaaggacgggcggagaacccaacgtgaaacggcaccctaaaccggaatg

SEQ ID NO: 620049 - DNA, 600 bp, Homo sapiens
  misc_feature (21)..(21): n is a, c, g, or t
  misc_feature (106)..(106): n is a, c, g, or t
  misc_feature (244)..(244): n is a, c, g, or t
accccccttccttccctcagnggttcaccaatttggccccatggggcattagatttctctcccagtcaagagcacatctgacactgagaatttctctggatattcntctgtctgccaaatcagatttcctcaactaaaatcctgcgtgatccacagttacattcaccattctctttagacactgtatctcaattacccagatggtattatggttccggcctctgcagaggagtgtctttgctgncatttggtctccatggcatcgaataccttgcacacttttgtagccactcccatttcatgaccctcaaacctcccaaatgttgaatggtaacttttagaaaactaccaagtaacgtggataacacattccccagcacatccatgaactctcatctgtttgcacccattgttcactctactccaatgctatgcctcactggcatcttcttttgatttggcacttggtgatgaaaaaggtgaaaggttaacccactgattgctcacttaccagtctcacttgctcacttttctgccaggtctcctaagtgatctttcgtgtaaaaagaagtttagaaaatgctttaggataaattgtat

SEQ ID NO: 620050 - DNA, 305 bp, Homo sapiens
gggggggggttttttttttttcccccttgggggggcccccccttttttttgggggaggggggcccccaactttttttgggggcccctttttttggggggggggcttttggggccttccccccgggggttaattttcccccgggttttatttggcccccccctgggggcccccctggctttttttttgtccccggggttttttttagccccaattttggggggggggggcccccccccgggggggcggggccccccccccccccccccccttttttttgtttcccaattttttttttttttttgga

SEQ ID NO: 620051 - DNA, 1132 bp, Homo sapiens
ttttcggacagttgatcagggggtcgtattaatggttaacatgagggggtgacaacttcggggtgttaattaagggctcccgtgtattctttttgcccgtccctggtttcgactgattcatggtctaacatcgatggtcgtaccgcacaaacatctagtcttatgcatgacaccttttacggctgtctatcgaatacaaggtctcccagacgaccgagggtcccaaatgcgtgctaagactgtggtgatcactgggattctagagttgaatccagcctttcaaaatcttctgtcgaatccatcagaggccattacttaacacggcaccaatgcttttaacggctaactctcgaggattatcaagcattggtatttcaccggtaaagtacacgtgatctcgagttttgtggcctcatccagattggggatcgcggtctacaaggctcacccaattgactcccctctacaggaggtgtccgttcaggtctactatagtgccttccgtcacaggagggaggtaacgagagtagatgagtttttcccgaattatatggagcatgttaagcaaagcctgggactgccagctatggcggttaactatcttcgcaactttttactaataggacctcttcagaactgagtctgctaggcttctgcacggaaattatgctcagctttacaccaaatagactcacccagagagcaccaccaatataccaagagtataaatactctttctacagtaaggtgttggattgcgtaacatcaacaaagtccattaacacattaagcacaccaggacttcaggattgaccaccagggtctaaaggtactgttgaacaaaattactcgcaatgataatgaatttggcttattgttttttttcgctttcagaaattggcttggttctctttagagttggagtaaacatgccatgtaataaatgagttccactgaatggtacaacagaattattgcatttctaagaagtatgtgtagtaaaagtcgaatatacacattgatagaatgttctgtcgttcaaaatcgttataccgtaatttgatattatataagaatttggcagcatggtaagtcatgtgtataacaatgttaatagccacgtaaattgtga

SEQ ID NO: 620052 - DNA, 190 bp, Homo sapiens
atatatgggaatactgaaatcttgctgctattgggtatctgaggccccacagacttacagaagaagtggacctccatagacatgtgtagcatcaaaacacaaagggccacacttcttgacggatgccagcttgggcactagctgtctactagacaccccaaccttggatgattatgtatttaattcatat

SEQ ID NO: 620053 - DNA, 252 bp, Homo sapiens
aggtattaaccccgttcccctacaccaatttggtaaattccatatttggtgccttaagacctcaatttcccaatccaataattctaattgcattaattaatttgtgcatcaagacttatcttggttattgaaattattcgaagtcccacgtttcaaagaaaaaatttccacgttgatttttgaaataaaaaggcactcttggggagtgaaatttcactttaggtgattggagggcaagatgaaaaagacctt

SEQ ID NO: 620054 - DNA, 875 bp, Homo sapiens
  misc_feature (28)..(28): n is a, c, g, or t
  misc_feature (242)..(242): n is a, c, g, or t
  misc_feature (348)..(348): n is a, c, g, or t
  misc_feature (397)..(397): n is a, c, g, or t
  misc_feature (435)..(435): n is a, c, g, or t
  misc_feature (492)..(492): n is a, c, g, or t
  misc_feature (623)..(623): n is a, c, g, or t
  misc_feature (675)..(675): n is a, c, g, or t
  misc_feature (690)..(690): n is a, c, g, or t
  misc_feature (694)..(694): n is a, c, g, or t
  misc_feature (700)..(700): n is a, c, g, or t
  misc_feature (705)..(705): n is a, c, g, or t
  misc_feature (717)..(717): n is a, c, g, or t
  misc_feature (721)..(721): n is a, c, g, or t
  misc_feature (725)..(725): n is a, c, g, or t
  misc_feature (729)..(729): n is a, c, g, or t
  misc_feature (737)..(737): n is a, c, g, or t
  misc_feature (751)..(751): n is a, c, g, or t
  misc_feature (793)..(793): n is a, c, g, or t
  misc_feature (798)..(798): n is a, c, g, or t
  misc_feature (863)..(863): n is a, c, g, or t
gggagagggaggggaagggtggggtganaatgcagaggtgcttgcagaatgtaaaagatgtggaccctcccagctggacgtggtggctcacaattgtaatcccagcactctgggaggctgagacaggtggatcgcctgagcccaggagtttgagaccagcctgggcaacactgtgagaccccatctctacaaaacatgcaaaagtgggctggccatggtggcatgaacctgtggtcccagcnactccggaggctgaggcaggactgctcgagccggggaggcaaaggctgcagttagccaagatcacgccactccactccagcctgggcaacaaagcgagacccagtntcaaagaaaaagaaaaaaaaaaaaaaaaagaaaaaagaaattgaccctnagcataaaacaagttttggtggatccagaccatcaaanacaagagaagaaatcctccagggtgtgggatggggtgagatttccttttaggttctnaggttccccactgacagcctcccacccccatcctcctccccacaacaaaacaccagtgcaggccaacttgttcagtggagccccgggacaaagcaaatggaagtcctgggtgcttctgacgcacacctatngcaagcaagggttcaaagacccaaaacccaaaatggcaggggagggagaaangggggtgggaggctnttanttgggnaaaanaagtggagaatnttantttnattnaggccctnctgttttgaacatnagttttttatggcgggagggagactgacccttttttggactncaggnggctggagtaagccctgcccccccctggctccttcccagcctgggcatccttaagttccaaggcntcattcagctct

SEQ ID NO: 620055 - DNA, 371 bp, Homo sapiens
gcaggactttccccgtacgccaaaaaagaagagagtgctaggagttcaggataacctctttctagagaaggctatgcaggcttgaaatgaggcatgccaatctctttttcgactacgcgtgacaggagacgtgaagatgctgctggccgtccagcgccatctcactgctgtccaggttgagaatggggacagtgtcttacacttagcaatcatccaccttacattctcaactggtgagggatctactagaagtcaccaatctggttggatttctgatgaccttatcaccatgagaaaatgatctgtaccagaggcccttggcacttgtggaggtgatcattaagcaggaacgatgtggtggaggattggct

SEQ ID NO: 620056 - DNA, 271 bp, Homo sapiens
ttgacttgggcatacactgttttattattactttttccctcacttcagaagaaaggctgcctttgagttgaccaaccatgttgaggtggtagatgggtgctaaactcactgtagtctgagtaattgacttccacaagtcatccccactgttgagcctttcaaaatgaagtctcagtatatttacaaattaatggacatcctctctggggattagtcatattctaattcaacaaagacattgtttgaagtttgtttttgtttgctaaatgaa

SEQ ID NO: 620057 - DNA, 484 bp, Homo sapiens
  misc_feature (415)..(415): n is a, c, g, or t
cttggcaaaatcctattcatccttcaaatcccggtcagagccacctcggtggtgtgaagtctcctgccctcactccccaaaagagctaaccagtcctccctcgggactaacctccctctggagcacattctaatacctgcccatgtgcagcgttcccttctccacagcaaatccttagaggaagcgttcacgatgaagggctggcccatagaagatgctacgcaaatatctgttgcattaaaccgacaaaagttcacagcacttctgagaaccctgggaggtgtttctttcaatcttaagttttttagtaatcaggtgctctgacaatcttcactcatcttaacgtttccatctcctcttatccaagttggggccacccctctctctttaacagatgtattagtctgttctcacnctgctaataaagacatacccaagactgggtaatttataaaggaaagagttttaatggactcacagttcc

SEQ ID NO: 620058 - DNA, 127 bp, Homo sapiens
gcccaagccccagccccccccccccctttattacccctagggtgggggaaaaggttttgcccagcaatagtcctgatttaatggatccttgaagcccaataaacaaatagtatttttgcatgtgtca

SEQ ID NO: 620059 - DNA, 411 bp, Homo sapiens
  misc_feature (49)..(49): n is a, c, g, or t
tgacccatgccagatagtttatgcctaaccaatgtgatttatagtgaanacctgttttcctgtgtctaagaccctgggctgcactgtattaatttgaccttgggtatttggggagctgagactgagtagctgaagtgagtcacataagcactaaatgcttacctgactgacccccagtaaaactctggacatccagacttggatgagcttccttgggtggcaacacttttacgtattgtcacacaccattgctggggggattaagcactgtctgtaaaactccactgtgaaatgacaactggaaacttgcacgtggtctctcctgattctgctctattcaccttttccctttgctgattttaatctccattcttttgttgtaataaaccataatggtgaataaaacaaaaa

SEQ ID NO: 620060 - DNA, 153 bp, Homo sapiens
tgtaccatattctgtgggttaaattctgcaatcccgagtaaggatgcgaattcactgtgacctggcagaaatgccaacctgcgccatccgcttcagatccgtccctctaccagcacgtgggcactcactcctcgctggcttgctagaatccac

SEQ ID NO: 620061 - DNA, 1792 bp, Homo sapiens
  misc_feature (83)..(83): n is a, c, g, or t
  misc_feature (145)..(145): n is a, c, g, or t
  misc_feature (335)..(335): n is a, c, g, or t
  misc_feature (527)..(527): n is a, c, g, or t
  misc_feature (1792)..(1792): n is a, c, g, or t
ggagagctcgtgcgtcatcgatttcccacctacgagcgagaccagtgcaataagcgaagaacgcatctcgataatccatcctntctaggtcgctaccactttcgagcaactgtaccacttacgggcgccacacgtccgaccgacntaaccatggcggcccagtcgtcgaagtctaactcagacactggccggtcggccagtacgtactacacatatgaaaatccgactctggacatataggattgtagcacgacaggtgacgagcctgcgctcgaaggattggcggcacacagagagttatccctatcaaaggtaactgccacttaggggctcgntacgagtcatacacacagtctgcagacagttctgacaccctgtgtgagacactgcttgaggtcactctcacctaactgtgtaaataactccttagcctctctgatgggtcatataatctttggcattaccgccacgcgacagtaaaccattgtgtgtgccacttacagtcaagtcagacatggtctgccccnagaagaatacacacttaagccagtatacattctctaaatctcaatcaacaatagacagtggacagtcaagaccgggagaggcaactgactctgtcaaagagacactgtgacaatgaatgaacctgtgtccagtgaaacttctgatctggcagtaggctgtgacgcctggataatgcggttgccccattttctggcagagtccatgcgataaagtacattacccaaaggaacattgggtgggactagggaaacctcgcggggaaagaaggcccagttggccctcgtatacctttggggacagtttgagcaagctagctttggcgaagtttgatcgatatattcgagaaacattaaaatatagtttgctgcgaatgttctaaaattccaaacattaatgggggagtaacccctaggcttagaaagacaccaaaggcgccctaacctaggcaccaaaggcaaagataagacaatccacttcgcaagatggcaactcgatttcgctgtgccacccttttgtcggcattctggtgccaagagaccaaactttaattttacacatcttttgcaacagtatagcaacttcttagggggttgtgaaaccaaaaaagcccccccttgcaacacaagacaaagaattaaaggccgacatttggaagcttagacccgttaagaaaactcccatggggtgttgtgcgggccccgctggcgacttgtgcggcaaaggtcagatttggccggtggggaatcgctgcggacggttttgggcttaacgaccaatttgtgttccttttgttggctggtcccccccggggcacattgggcccccatgtgttttcaggcccccgcgcttgtgacgttacttgtggcgacacagtcggtctcacacggtcggtgtcaaggcgcccccttgacgattgttgttcttgctcacgacaggagttccctcggggagcggggtggagcccctctcccccccggcggtatacactcctgatggcacaccttgtgcgatattagacgcctgctttctggggggcggatgtgccgtttttccccccggggtctgtgtctatacaacgaaggcgatcgcggcggagcaatttcggcaccgctatgaagctaccgcctgtgttgtagcctcgggagcagagcagaccctcgcctggtgtcactgaccaaagccccctggggttgtgcgtccgtgcgcgcaaccacattacgtgctcccagcacacgaatcgtacgtcctcacacgcagatagttn

SEQ ID NO: 620062 - DNA, 338 bp, Homo sapiens
  misc_feature (39)..(39): n is a, c, g, or t
  misc_feature (78)..(78): n is a, c, g, or t
tctagctcgcagtgtgttgatgtggtgatgctgctcggnagtctgcgcatgcgtggacatttcccggaaagccatggnagtcatgctgatctgtacttctacgaggtactgaagagatgaaaaagaagagcaggtgctgctgagaaggcagtgaccaaggaggaatttcagggtgaatggactgctcccgctcccgagttcactgctactcagcctgaggtagcagactggtctgaaggtgtacaggtgccctctgtgcctatacagcaattccctactgaagactggagcgctcagcctgccacggaagactggtctgcagctcccactgctcaggc

SEQ ID NO: 620063 - DNA, 362 bp, Homo sapiens
taaaaggaaaaaaaaaaaaaaaaccccgtaaaagccgggagccaaaaaaccaaaaagtgtgagttaaaaaccggggcccaattagtgaaagtactaaatgtttaaaaaccaaaaaaaaaggcaaaagcggttttttttttttttttttttttcgccctttgctgccaggcagggaaggcccccctgtccagtggaaaaataacccatgtgcccttcccaattattggaaagggttcacattccttcccccgccccttttttttaaatccaaaaaaaatcagggcagccgggcatttggggccccaactggtttccgcgttttgggggaaggggtcccccaggcccaggggttttttttttta

SEQ ID NO: 620064 - DNA, 626 bp, Homo sapiens
gctcggtgtcctctctctgttccttctctctctagtctctctcgtgttggttccgtctctggatcccgtgtcgctgtcactgctgtctgtcgctgctcttgtctgctgctggtagttcgtctgtcgtcagtctgtctgcatcttctctgtctctcttactcgtgcgctctggtctgctgtctcactcattctcatccctttctgcgctgcttcgtcttctcttcgctctcgtccttctacttgtgcgtcgcctccgctctgtcgcgcgtgtctctgtcgtgctgcgctcgtctgttgtctctctcgatcacgtgctcgctgttctccgcctctcttctcggtttcgccggcctgtgctcctgtggcgtctgctcgtgtgtctgcgctgtgcctgcgtcgtgtcgtgctcctgtggctcatgcgtctgattcctgctcggtctgtgttgttatcgttgttgtctctccttctttggttgcatctgtgctttcgtaattctttgtgaccctggtacacacacttggagagttatgtggcagatagtcgtggtgttgcagtcctgtgcacttgtggggtgggatgggaatagcaatgtgtgttcagagatacagcgggacttaaacttg

SEQ ID NO: 620065 - DNA, 884 bp, Homo sapiens
gcacgattactatcactaatgacaaagggccggattgatccaggaagacatcgaacgtatggtccaggatacgctgagaagtacaacgctgaagatgaaaatgcagagggacaaggtgtcatccaagaattccactttgagtcctattgccttccaacagtgagacagcacactgttgaccagatgagaccacttcaaggcacgattaaccgatgaggacaaacacgaagatccgtggaacgaagctgtaagttagaagattaatcgacctgcgcttgatctgcaatcaagaactgctcgctaaggcagatatttgaagcaatcagagcaaggacaacgagctggcgaaagttaagcgacatacccaatcatcgacccaatgcatagtaaccaagtagttgcacgagagagcaatgccctaccgaaggaaagtgcgctgcgtgcggtatttctcgtggggtgggatggtacgcatccggtcccccttccttagagttacggtatgcgtgtccccatccaggggcctccaacccaatatagagctgcatgcgttcgaattttacatgcccgaacggcacaatgtgtgtcaagaatagtacatgccatgtagtgatccaacggacggattttgccagatacaccgatcagtcgcaaagtgacccttaaacaagtgatccggtaaagggcacacactcatcttaggttgagcacagtctttacacaaacacggttaacacgcctcgcctacttacgtcacacgtttaacgttgcgagccatatcctccacactactttgacactacttgggacacacttattgccgcacgggggaaacgggacaacactaagcatatagcaccttttcctacgactcccctgagtat

SEQ ID NO: 620066 - DNA, 1136 bp, Homo sapiens
agcgggagagcgtgcggggcgggtgagagcgtgcggccgtgattcaccacaatcatggcagaaatcttttctataaggaaaagtggatgatagcccgttctgctctatctcagatcgtcagccgcgggtgcaagcctcgatggcctctctccactatttctactttggcatccacttcgaggtggcaggccccgtgtggtgctggtggatcgccggggtgcaggcagtgtggcggctcacgttctgctcacccggaagctccgtgccccagtcgtggctgccgtgcgcgtggggattcaccacaagcagagtactgctcctgttgaggaagcgctgcgaagggactgcttaccctggttgaacggaggcggggctcggctgggtacgtcgtacatgtaaaacccaatccggaggctcgaagccaggagaccggagtgtagacccgtttccctgtccagagtcacgcacatactctgtcatcgcaatcaacttgggtagcaaatggtgttggttatccttagtgtgcagagggagattatccaccattccgagaggaaggctcgagggggcgagaaggtgtacctggggaagccgaaaaacagcctcgtgacaacagattcacccaactcaacgatggtcaaagttgtcaatattgaagttgaacctatcagtaaagaccaatttgcgggttaaattcgtagagtcctcctcgaaagagctggtctctcgaaacgtgaactagaacagcgaatttctttcgcttagtctaaagaaaattaggaacctgtgtccccgaaatgatgaagaagttaacaaaaaccccgttcagagccagttcttgggaatcgccgcgcacatgtaagaggggcgtgcactagaacttccctctacggagggcggtgcgagtgccccggggatcaaccgcatttctgtctttcttgttgccccttttaaacgctgagggggcttacagaggaatccagaggaccctagggcggatggaatacaagttgtcatatgtagactttggtatccccctttgttgttgagaaattgtgtcaaatacgcgattcacacaagattcccacaatcaagtatataacaacacaacaagaacaggaggaacaagcgcccag

SEQ ID NO: 620067 - DNA, 250 bp, Homo sapiens
ctctcgcgtatgacagcaactcagctgtccgaggtgcttatggaaaggagaggattcaagagaggaagccagaaggcacatgatccacatcatgttctgtctgggtcaaaccacccggagcagtgctcacagaccgctcagcttgctagttgtacagagagaggataaggtccacctggaacacaagcaactgccaacacccacatctggaccgggagcggggatgggtatccatttgactctccacgca

SEQ ID NO: 620068 - DNA, 351 bp, Homo sapiens
ccccccccaaaaggggggggggccccccccccccccttttttttttccccccccccccctttttgggggggggggggggggggggggggggggccccccccccccccccccccctttgggggggggccccccccccggggtttttccctccccgggggggttttccccccccccttttttttttttccccccccttttacccccccgttttttttttttgaaaaaaaaaaagaaaaggccacaggacaaaaaccaacttcacagaaaaataacaaaaacaaataggtctaataagaagacacaataaaacaagtaagaacatagatcaagcttgtccagtcaaaatcaccc

SEQ ID NO: 620069 - DNA, 117 bp, Homo sapiens
  misc_feature (4)..(4): n is a, c, g, or t
  misc_feature (13)..(13): n is a, c, g, or t
ctgncgatacctnaaccaagccaaaggcagaaaagggaagggtgcatattgctaagagagcaatggaaaatatgtaagctactttcattaattaccctactttcattcctcccaccc

SEQ ID NO: 620070 - DNA, 474 bp, Homo sapiens
actacagccttccgtgttaatcatggcctcagcttcgaaaaccaacacaatagaaccgcggacctattccattggtcctagctgcggaatccaggcgactccgccctgctttgaacactctaattttttcaaagtaaacgcttcgagccccgcgagacactcagctaagagcatcgagggggcgccgagagtcaaggtgcggggacggccagtagctcgcctcgcggcgaacacgccgcccgttcccaagatccaactacgagctttttaactgcagcaactttaatatacgctattgaagctgaaattaccgcggctgctgacaccagacttgccctccaatggaacctcgttaaagcatttaaagtggactcattccaattacggggcctcgaaagagtccatgattgttatttttcggcactacctacccgggtcgggagtgagtaatttgcgcgcctgctgccttccttg

SEQ ID NO: 620071 - DNA, 265 bp, Homo sapiens
taggaacagagatggaccccaaaagccgagactttagttcagcaagcctctcagtgccttagtaagctggtccagatagcttcccggacaaagaggaactttattcttgatcagtgtaatgtgtacaattctggccaacggcggaagctatggctgttcaagaccttctctcggaaagtggctggtggtggtcccataatgacggaagattgcgacgaagagcgctgtagcttgagcgaaggcaagtagcaggcgcacgatgcat

SEQ ID NO: 620072 - DNA, 1555 bp, Homo sapiens
  misc_feature (294)..(294): n is a, c, g, or t
  misc_feature (301)..(302): n is a, c, g, or t
  misc_feature (304)..(304): n is a, c, g, or t
  misc_feature (327)..(327): n is a, c, g, or t
  misc_feature (333)..(333): n is a, c, g, or t
  misc_feature (352)..(352): n is a, c, g, or t
  misc_feature (358)..(358): n is a, c, g, or t
  misc_feature (379)..(379): n is a, c, g, or t
  misc_feature (381)..(381): n is a, c, g, or t
  misc_feature (515)..(515): n is a, c, g, or t
  misc_feature (521)..(521): n is a, c, g, or t
  misc_feature (587)..(587): n is a, c, g, or t
  misc_feature (648)..(650): n is a, c, g, or t
  misc_feature (674)..(674): n is a, c, g, or t
  misc_feature (681)..(681): n is a, c, g, or t
  misc_feature (1555)..(1555): n is a, c, g, or t
gcggatagccggtcccccgctgcagctaccggccagcgaggactgcgcctgcaggaacccctggtgccccatccctggctggcatggcatttgtcaaggaggaggagacggaggctgtcattggagcccctcctactgccactgatgggccctgaggaccaaagctgtgcttatggctcttgcggagggtcatggtgctgagggtccccgctctgtgactcaccctagtggcagcaccagctcagggtgtggaggtgtgtggctcctgagggtacctcagccccaggtggtggnccggganncntggatgacagtgccaccattgcngtgtcngccagaagccaggcgatcnggttangtgcaaccagtgtgagtttgntnccacctggactgtcacctgccggccctgcaggatgtaccaggggaggagtggagctgctcactctgccatgtgctccctgacctgaaggaggaggatggcagcctcagcctggatggtgcagacagactggcgnggtggncaagctctcaccagccaaccagcggaaatgtgagcgtgtactgctgggccctattctgtcacgaancctgccgccacctgcatcagctggctaccgactccaccttctcctggaacagcccggtggnnncctggatctgaccctgatccgtgnccggctncaggagaagttgtcacctccctacagctccccacaggagtttgcccaggatgtgggccgcatgttcaagcaattcaacaagttaactgaggacaaggcagacgtgcagtccatcatcggcctgcagcgcttcttcgagacgcgcatgaacgaggccttcggtgacaccaagttctctgctgtgctggtggagcccccgccgatgagcctgcctggtgctggcctgagttcccaggagctgtctggtggccctggtgatggcccctgaggctggagcccccatggccagcccagcctggctctgttctctgtcctgtcaccccatccccactcccctggtggcctgactcccactccctggtggccccatcccccagttcctcacgatatggtttttacttctgtggatttaataaaaacttcaccagttcaacaaaaaaaaaaaaaaaaaaaaaaaaaacacagggcggacgaacaagagcacgaaggacacagacagaacacaaacaattggttgcggccgcgcgcgttaagccgcccctccaaagaaggtgctctcccaacacccaccgaaccggggagggcgaggagcgccacaaactggagtagacgccgcacattagggcgtgcgaaccggagttcctcacagcaaacatccggggaaaacgaaacgcggggaggtcccaccaaaaattaaatcaacgcccggggggcgcaacgacgttgtcgaacaaaccccaaggggggatagcagagggacaacgagaggacataccacggagcgcaaaagaggcgacaaaaaaaaccagccgtgcgggaccacgagcgcaacacaacagcacacgtcggagagaacacaaccgcacggagacggn

SEQ ID NO: 620073 - DNA, 139 bp, Homo sapiens
ttagaggatcccgggtctgactgtgacttccttctggctcttccaaacaccatgagatatattctggatctggagtgacctttgtcacaaatcgagataaagttaaaatgtgtattatttaaagccagtgtggagagag

SEQ ID NO: 620074 - DNA, 1564 bp, Homo sapiens
  misc_feature (294)..(294): n is a, c, g, or t
  misc_feature (301)..(302): n is a, c, g, or t
  misc_feature (304)..(304): n is a, c, g, or t
  misc_feature (327)..(327): n is a, c, g, or t
  misc_feature (333)..(333): n is a, c, g, or t
  misc_feature (352)..(352): n is a, c, g, or t
  misc_feature (358)..(358): n is a, c, g, or t
  misc_feature (379)..(379): n is a, c, g, or t
  misc_feature (381)..(381): n is a, c, g, or t
  misc_feature (515)..(515): n is a, c, g, or t
  misc_feature (521)..(521): n is a, c, g, or t
  misc_feature (607)..(607): n is a, c, g, or t
  misc_feature (620)..(620): n is a, c, g, or t
  misc_feature (653)..(653): n is a, c, g, or t
  misc_feature (673)..(673): n is a, c, g, or t
  misc_feature (676)..(676): n is a, c, g, or t
  misc_feature (1564)..(1564): n is a, c, g, or t
gcggatagccggtcccccgctgcagctaccggccagcgaggactgcgcctgcaggaacccctggtgccccatccctggctggcatggcatttgtcaaggaggaggagacggaggctgtcattggagcccctcctactgccactgatgggccctgaggaccaaagctgtgcttatggctcttgcggagggtcatggtgctgagggtccccgctctgtgactcaccctagtggcagcaccagctcagggtgtggaggtgtgtggctcctgagggtacctcagccccaggtggtggnccggganncntggatgacagtgccaccattgcngtgtcngccagaagccaggcgatcnggttangtgcaaccagtgtgagtttgntnccacctggactgtcacctgccggccctgcaggatgtaccaggggaggagtggagctgctcactctgccatgtgctccctgacctgaaggaggaggatggcagcctcagcctggatggtgcagacagactggcgnggtggncaagctctcaccagccaaccagcggaaatgtgagcgtgtactgctgggccccatccctccccaccacaccccccccccccctcccncccccccccgccnccccccccccccccccccctccccccccccccnccccccctcccccccccccnccncccccccccccctccaggagaagttgtcacctccctacagctccccacaggagtttgcccaggatgtgggccgcatgttcaagcaattcaacaagttaactgaggacaaggcagacgtgcagtccatcatcggcctgcagcgcttcttcgagacgcgcatgaacgaggccttcggtgacaccaagttctctgctgtgctggtggagcccccgccgatgagcctgcctggtgctggcctgagttcccaggagctgtctggtggccctggtgatggcccctgaggctggagcccccatggccagcccagcctggctctgttctctgtcctgtcaccccatccccactcccctggtggcctgactcccactccctggtggccccatcccccagttcctcacgatatggtttttacttctgtggatttaataaaaacttcaccagttcaacaaaaaaaaaaaaaaaaaaaaaaaaaacacagggcggacgaacaagagcacgaaggacacagacagaacacaaacaattggttgcggccgcgcgcgttaagccgcccctccaaagaaggtgctctcccaacacccaccgaaccggggagggcgaggagcgccacaaactggagtagacgccgcacattagggcgtgcgaaccggagttcctcacagcaaacatccggggaaaacgaaacgcggggaggtcccaccaaaaattaaatcaacgcccggggggcgcaacgacgttgtcgaacaaaccccaaggggggatagcagagggacaacgagaggacataccacggagcgcaaaagaggcgacaaaaaaaaccagccgtgcgggaccacgagcgcaacacaacagcacacgtcggagagaacacaaccgcacggagacggn

SEQ ID NO: 620075 - DNA, 922 bp, Homo sapiens
  misc_feature (214)..(214): n is a, c, g, or t
  misc_feature (296)..(296): n is a, c, g, or t
  misc_feature (370)..(370): n is a, c, g, or t
  misc_feature (922)..(922): n is a, c, g, or t
ccagctttgaaaaagcccttggtgtgcccaaatttatactggggtgtggtcaatgtcgatggatgcaaggagcttctcagaggccttcttgctatcaatgaattgcccttcagggattgcacttgcatttaataccttgtatctctgtttgaagtctgcataaaggattctgcttggaaatcctttcctacagatgcggatgccttccagcacnccgttacacctcagctggtggaggacaagctcatgctccatggccccaggagtttttgtctcattggggatgatacccctcncaaagtgaggatgggtactcctgaggttggtcatcagcttgttcaaattctctctgaaaagggcagaccctgtntggaaaaaagagccctttttctgactcccactccctggtggccccatcccccagttcctcacgatatggtttttacttctgtggatttaataaaaacttcaccagttcaacaaaaaaaaaaaaaaaaaaaaaaaaaacacagggcggacgaacaagagcacgaaggacacagacagaacacaaacaattggttgcggccgcgcgcgttaagccgcccctccaaagaaggtgctctcccaacacccaccgaaccggggagggcgaggagcgccacaaactggagtagacgccgcacattagggcgtgcgaaccggagttcctcacagcaaacatccggggaaaacgaaacgcggggaggtcccaccaaaaattaaatcaacgcccggggggcgcaacgacgttgtcgaacaaaccccaaggggggatagcagagggacaacgagaggacataccacggagcgcaaaagaggcgacaaaaaaaaccagccgtgcgggaccacgagcgcaacacaacagcacacgtcggagagaacacaaccgcacggagacggn

SEQ ID NO: 620076 - DNA, 125 bp, Homo sapiens
ctgttgtagggaatccattgcggtgaatgatctggtagtgcatggcacgcgtatgccagggggcctataattataccaggccatttgaacctgccacgatcaccacccagtgctgtgcctccatc

SEQ ID NO: 620077 - DNA, 633 bp, Homo sapiens
acctttgtggtgggaggacgtgtactagctagctctcttccagggcggctgtgggtgtcagagacacttttttggttttttgttttccgaaatctctgcttgccaggcagcagcccaaggtttggccagcatcttgtaagtgtcaagtcaggcaacaggtttcacagtaaaagggtgggaaccctactaaccttgttcagtatggtgttgcactcagagcagtttgagacagatctgtcttctaggaaacagcagctagcaaaccaacagggtggcaggctaaaagggttgagcattgttgtgggagccatcgagtcctcccaccacgggaggacttagaccccgttggagactctactctgctggttggaacactacccctcgaggggtgggtaaaggggtgcttctttttagagggcagcctggagctccaccaaacaccccacaccagtgagcagcaagggcacagtcctctggtcctcccaccacaaacgtggatccgtgcacgttaacgattactaggactatgcgagaactcttaggcttgcacgttaaccggttcctaggaccatgcgggtccccttgttttcttttgtttgtttgggtgttttttttttttttttgctttttttt

SEQ ID NO: 620078 - DNA, 152 bp, Homo sapiens
acgctaaacataatgagcatgatgctacctggccctgtccccaagcccctggagacagtgaatggtcactgttattgtgcccttagccatcaccaccctctaatctcagcccctgcgggagggagggagggaatgttataggtgttaactgt

SEQ ID NO: 620079 - DNA, 613 bp, Homo sapiens
  misc_feature (613)..(613): n is a, c, g, or t
ccatcccccaggagtgggagtcaggccaccagggagtggggcaccaggagtggagtcaggccaccagggagtggggatggggtgactcccactccctggtggccccatcccccagttcctcacgatatggtttttacttctgtggatttaataaaaacttcaccagttcaacaaaaaaaaaaaaaaaaaaaaaaaaaacacagggcggacgaacaagagcacgaaggacacagacagaacacaaacaattggttgcggccgcgcgcgttaagccgcccctccaaagaaggtgctctcccaacacccaccgaaccggggagggcgaggagcgccacaaactggagtagacgccgcacattagggcgtgcgaaccggagttcctcacagcaaacatccggggaaaacgaaacgcggggaggtcccaccaaaaattaaatcaacgcccggggggcgcaacgacgttgtcgaacaaaccccaaggggggatagcagagggacaacgagaggacataccacggagcgcaaaagaggcgacaaaaaaaaccagccgtgcgggaccacgagcgcaacacaacagcacacgtcggagagaacacaaccgcacggagacggn

SEQ ID NO: 620080 - DNA, 166 bp, Homo sapiens
  misc_feature (7)..(7): n is a, c, g, or t
  misc_feature (22)..(22): n is a, c, g, or t
  misc_feature (57)..(59): n is a, c, g, or t
  misc_feature (77)..(78): n is a, c, g, or t
  misc_feature (90)..(90): n is a, c, g, or t
cggcgcncacgggaattccggnagtcagacagggtacgaccatcttccagcagaggnnnatctttgccggaaaacanntggaagatggtngtaccctgtctgactacaacatccagaaagagtccaccttcaacctggtcttccgtctaagaggtgggatgcagat

SEQ ID NO: 620081 - DNA, 647 bp, Homo sapiens
  misc_feature (173)..(173): n is a, c, g, or t
  misc_feature (206)..(206): n is a, c, g, or t
aaaaacgcatctctggctgcactttccgctaactggcaagctttaaacccgtaatgcctggactcgaagctgaatcacagtttgcattcattgcacaaagtattgtttataaggtgcttttaggagtatcctgcagtgatcttatagggctgagaaagtttgcccatgcaggnaggcagcacttgcttcattttcaagagacgcgnacgtcgggcagcaaccttccctgttagttcattgttgtgtttttagtcacaaaacaggtcctggtgcataataagtctaaataaatatctgttgaataaataaatgacaaagtataaagactaagctgtgttttctcctcatggtagggatatgcactctaggttctctcttcaaatgtgcagcagatttctctttagccattccactcgcaaactggcatctgtctgacaggcgatgtcttaagtcttttcttattgaacgctattttatttcttgatgtttattatggaaagagtagatgatgtttcatgtattattttctgattaataaatgaaaattagattttatgttatgttaaaataacgttaagagattttactgaataatctatgttttgagtagataaattaaccgcaaaataaaaccattttcatttacc

SEQ ID NO: 620082 - DNA, 427 bp, Homo sapiens
acctctaccacgctacagatcgggagatcgcgacgggttgtcctggaggtggaggggagatggtcagtaggacagaatgtacattgatgactcgctcattggtggaaatgctccgtgaaggcccgaggggaaggtacgaaagccagtaatcactggtgtcgatattgtcatgaaccatcacctgcaggaaaacaagttttcagaaaagaaggctaacaggatgtacatcaaagattacatgaaatcaatcaaagggaaacttgaagaacagagacccgaaagagtaaaaccttttatgacaggggcttgcagaacaaatcaagcgcatccttgctaattttcaaaaacgaagcagttctttatttggtgaaaacatgaatccagatggcatggttgctctatatgggtaccggtgggggtaggaggt

SEQ ID NO: 620083 - DNA, 411 bp, Homo sapiens
gttgacctttctgggaaggttcccgttaggttgttcttcaattttgcaagattatatttttttaggctttaggggccctgcgtgggcttatgggtcgggtttctctccctctttcccagtacgggagaccctcctgtccgacaaaacaatgcctcccgcccaggattcattcgggttcagggcccaagaaggcatcccgagtcttgattcccccctcttttgttattttattgggaacctggagcctacctggagcaacaactgtattctcttgcggtcttggcaattggttacaatccagaatggtttgttgggaacagaaataacccagagcccctggaaccaacctgggtcccaatgatcaatacaaggttctacctagttaattgtggatacagcagctgaggagga

SEQ ID NO: 620084 - DNA, 315 bp, Homo sapiens
tgctgcaggtgctctgaggatcccaagctcccacaagatgacaatatcagaaagtagtagtgctgttataaaataaacaaaacaaagtataggttagatacaagtcactgagggtacacgttagataaggagttggagagctgatcactgaataagctgagtactggggaggaacaacccaggatgagggaccaggaaagtggtaaaactctttaagtaagagcagaatttaaagccttatgtggggtgggttattattgaaatgggaaataatgggtaaggatcaggtttaaagtagggcaggttgacagttca

SEQ ID NO: 620085 - DNA, 392 bp, Homo sapiens
  misc_feature (13)..(13): n is a, c, g, or t
  misc_feature (18)..(18): n is a, c, g, or t
  misc_feature (24)..(24): n is a, c, g, or t
  misc_feature (115)..(116): n is a, c, g, or t
  misc_feature (127)..(127): n is a, c, g, or t
  misc_feature (164)..(164): n is a, c, g, or t
  misc_feature (273)..(273): n is a, c, g, or t
  misc_feature (304)..(304): n is a, c, g, or t
  misc_feature (344)..(344): n is a, c, g, or t
  misc_feature (374)..(374): n is a, c, g, or t
ggtagccccgcgnacganctcggncgagggtgcgggctcgcgctccctcggctcctggcgcgggctcggggagaggggtggaagatgtctatggatgtgacattcctggggacgnntgcagcatacncatctccaacccggggtgcctctgctgtggtccttcngtgtgaaggcgagtgctggctctttgactgtggggaaggaacaacagacacagcttatgaaaaagccaactttaaaagcagaattccctcaatttggggttttcagtcngtggaaaagaaacgcccaggtaaaactcaantgcacagaaactttaaagacctttggtgttccaccaggtncctgcctaatgggaaagctgaaaaaatggnatttcctggttgtttctg

SEQ ID NO: 620086 - DNA, 929 bp, Homo sapiens
gggggctagtgcacaagcgccaggtgttcaaggtgggccatcggcgggtgcccacgggcaccggctggatggcctacgacacagggtacactctagcgctgacatggtacgtctcctgacgaacacagcagcagggcgtatgacgggggggttccagtgggccgtgacaacagtggagcaagctggcacgcgaactgagctcgctacaccgcgttgacttgttgatccgtcgcgacggcttgccatgggacgaataacgatgcagtgtgtctccgacacgagacgttcctcggtctccgcaagctgatccgagcacgggaaaccgttagcagctccgagatctaccaccaagtgatgaagccacgggtattcgcctgtgccgcgatgatcgggcgaagcactatgaaggtcgacgcgttgccttggcactttctagcaaggaaatacctcctgagtgtgcccaccgggtagccgtcacatgacgtggacaagtgggtgcagcctccgcggggaaccaggcgggagggactgagtggcccgcgggccccagagaggcacttggtccgcgcccagcgctggacagcacccgaggagccgctgcttcaccggcccgacggcctttgtatcctattatttaaacgctcttggggtcaatgtgcgcatgcattcgttggttgtcgagtacagagagatggtggtctcgggccaggcctccgtctccccgcttctgggaggaggaggtcacacgctgatgggccactggagaaggccagaagaagactcagaggagcgggctggccttccgactggggctcctgtgacgtctcagtcgcctggtcccggcaggcaacgtacccaggaccgaagcatgcattgcctggtcccgccggcagtctacccgcatgggaggtagggatccgcaggagggg

SEQ ID NO: 620087 - DNA, 1101 bp, Homo sapiens
atcgtgtggttctactgtttggatgccacgagctgtgcggcgcaccttgtgacttgtggtctctcatcagggtgcggttcacgggaatgatatgtctcagaagttcatggtcctggtaccttggtacggcccagtggccagtagtcgttccatttggcttcccgttcctagccgccactcagacccattgcgcactcgggcgggtggtcgaagtcgtgttctagtgaacagatggcctgtaggacccatgccgtgatgtcgtgcgtaggcccgttgtgcactatagagttgcagtggcctgcaggggatgggcacctagggcaacgcactacggcagctggtctcgtcgcttggccgtggcattcgggtggtcaagcttcccactgggcatgtgctagggagctctatcaggcgtcgtcctcccgtgacacgattttggaggatgactaggtgatgggttggagcgaggtgccccctcaatatgcagttagggcaatagaggagcaagcggctgaagacccaacaggggccccatgcgtgcctcggcgtcctgtgcctggggacatgtgaagacgtcaaagcagagccccttgtgacccgcgtccctccccggcaggcccatctggagcaccatcgcgcgcagtgcagtgcagtcgctccactcatgctgttcccgaaaacatccgctgcatcaaacggctctagtatttctgtagttctcgttgtgtagattgtgatcctcggggagggggaaggctggcaaggaaatcacttagcgcagcacctggcacatagtgagtgctcagcaagtgtgagccattgcgttgctgtggcttcagtgcgccatccacagtgtactgccgtggtgcccactctgagcagggccccgtcataagggaaacatattaacagcacagcagctacacgcacagggagcgctcactgtgttccgggcactgctctgagcacttttcacccattgactcctctaatcttctcatggcccttgtgctggacactcttcttatccccattgcaacagaggaggaaactgaggcacagagaggctaagtgacttgcagacggtcacacagcattgaa

SEQ ID NO: 620088 - DNA, 486 bp, Homo sapiens
aaggaaacagtgagtggctggcgtgactgcacacagtcaaccgatacccaagaccatcttcatgcttcctcggcgacatggcttcaccagagaggctgcatctaacatgtgtcgaaaccataccgagaaggaaaggtgctcccatgactcacactagcaccgtaaaaggtgagcgttctggtgtctgtttcctccctgttctgctctttcttccgcacgccccccccagggactccatacccatacccgctgacatcagggcgccggtcaagtctaagctgtgggtcgaccctgacatcaacttatgacatatctcactgttttcaactacatgtaaggacttatcctcagcaagaaagtgttccctagaaaggtccttatgtggatttattttaacaagtacaaacattttgcatgtaaatgggggttcaatagttcctgaggacccgttactgatttatagcaggagtgtccatcttttggttt

SEQ ID NO: 620089 - DNA, 125 bp, Homo sapiens
gcagtcaacgaggacggggcctcatataacaaaaataggatgttgtggaaagaactcaagaatttcaccgagaatgcagacgaatgataagagtcaaggcaactcgtctggagaaagtaccgcaa

SEQ ID NO: 620090 - DNA, 105 bp, Homo sapiens
actgagatcacagactaatcctgcttttactgagttacatttttttgttctgaggtgatattaaggccactgatatagaacaatgaacaattaatcataatattg

SEQ ID NO: 620091 - DNA, 187 bp, Homo sapiens
agtggatgattatcgagaccactgtggcacactaagttaggatccggaagatgatagctgctgtaataaggctcaagatgagctgatcactgtagcgaaagcactgagaaggagctatcagtgataatgctgagacattgccgatgatctatctccgcgtgactatttccatgcctagcttggtcgg

SEQ ID NO: 620092 - DNA, 155 bp, Homo sapiens
ctagaggatccttatgctactccacaaacaggtgtgtgtggtgtctgttgctgtgtgtgtttgagttctggtatgtgcatgagtggtgtgtgtgtgtgctgtgtgtgtggtgtgttgctgtatgtgtatgagtgctggtgtgtgcacgagtggtg

SEQ ID NO: 620093 - DNA, 426 bp, Homo sapiens
gagtcaataattaagcaatggaaacaaacagcctaaataaggttgttgaggactcaggagaaggtggctgattaatctcaggctcatagtttgaaatgggagcgcagggtatgggctgtggccccatcatttgctccttgggcgtgtggctgtgtaaagaggtgtggggacccacaagaaggccaaggagcagcactggggtggagagagcagtggggaggcggggacccaagggttaaaaaaaaaaaaaattcctcaatttggaaacatttgcaaaactccagaagaaaaacttttaaaagttctccactcccttccaaacgtacaaacatgcacacacacaattaggaatttcccaaagttttcatctgtctaaaaagaaagtgccagtgcagtcgacgcggccgcgaatttagtagtagtagg

SEQ ID NO: 620094 - DNA, 387 bp, Homo sapiens
gagtcaataattaagcaatggaaacaaacagcctaaataaggttgttgaggactcaggagaaggtggctgattaatctcaggctcatagtttgaaatgggagcgcaggggctgtgtaaagaggtgtggggacccacaagaaggccaaggagcagcactggggtggagagagcagtggggaggcggggacccaagggttaaaaaaaaaaaaaattcctcaatttggaaacatttgcaaaactccagaagaaaaacttttaaaagttctccactcccttccaaacgtacaaacatgcacacacacaattaggaatttcccaaagttttcatctgtctaaaaagaaagtgccagtgcagtcgacgcggccgcgaatttagtagtagtagg

SEQ ID NO: 620095 - DNA, 427 bp, Homo sapiens
tctagaggatcccgacgcattcacagtccactatggcagagctagcatcatgactgaggccagctctccacagcgtcattgagaacctggagatgctcaagtaccagcgaaggcagcagcagcagagctggaccagaagagtgctggaccagggagatgggctcagcacctcagtcgcaggcgttgtcaacggggagagtcttgaagatatcaggaagaatctcttgaagaaacaagttgagactcggacagcagatggcgggagaagaatcacgcctctctgcatagcacagctggacactggggacttctccacggcattctttaacagcatccccctctcgggctccctggcgggcaccatgctctcttctcatagcagtccacaggtactggcactggactccagtacccctaactccttcgg

SEQ ID NO: 620096 - DNA, 340 bp, Homo sapiens
aaggttttctcccaggctgtggatctttgttccagctctaggaaactgtagaaaaccaatgctatgtggcttttcccccccatggtttttaggggggccaatcaaattgtccccctttttcccaaaaccctgttttccaggtgggacagttagctgtcactcagctgcccccatgatgtggcagcaaagagggaaccctacaagtggtttgccctcattccctttgccccatttgaagttttcagcagcccccccttagacttcatgagctaataggaaactttttatggggtaaatgctgtaagactttgtacatacttcagttgttatgaaattttta

SEQ ID NO: 620097 - DNA, 522 bp, Homo sapiens
ccccaatgcacatgttagacaccccccagtgatgctgaaccagactccactgggatattagggggcccgtccgagagatgggttatcagtccctgtgtgaggatgcggttctggactggctggcctggggccatcccagctggagctttctggcagggttcctgggtcttgagtcccgcagcctgcagtgtgtggcctgaatctggcttcttagacacaggccagtcctatcctgcctgggggtgggaataagcctctcacaggttctggtggacagatctgtgccgcaggtcactccagtggtctcgaggcttccagataaggctggttgcctcaagctcttctctgcctcataaatggatccagagaaggctggttgccttatgctcttccctgcctcgggtgcctgagaaacggattaatagccctttatcgtccctggaccgctcctgcggggtgatggcacttggagcgctctggagccctgcccttgatgatgcttagtctcttgagacttgtctg

SEQ ID NO: 620098 - DNA, 816 bp, Homo sapiens
tcgagaacacaccgaatagcgctaggtacgaggccgggtggtgatgtacactacaaacactcagtccacatgttgagccccagtgctggaagggcaggaaggccttacttctgtgttaatgcgtagaggctacagggcgtgagcgctggactaaaggcataccttgtcttttgagtctatacacctcagtagaagaaggatctaatggtggaagatcactgtagtttagttctgttgacctgtgcacctaccccctctggaagagtgtctgctggctattgtctaattccagcaggtcatcaggagtgtcctgcttgatagatagtactagaacagataaacaacagactttcatcgtatctatcctgattgtaatcgtgtgccatggatctgatctgtaccatgaacctacataagggctggatggcaccctcagggctgagggaccccaagtgtatgtgtggctgtgggtgtgggctgggagtcgtgtctcgcgtgagtaaggaacaccgattcttgcaatgattgctaaatgctcaagttcaaggtgacgacattaatgagtaaactcgaggatctgagtcacagaggtccggatttctagcagtgcttgctttggggggtgtgctgacaacttatgctcaggtgccttacatccttttcgtaatcagcagtgttgcgtatgagcctgtcctcactgccctctgcagaagtccctttgcagctgagaacctactgaagtgggtggtaaaaaaggggcctgagtggaggatcatgagtatcacgatttgccggattcccttctgggcttcaaca

SEQ ID NO: 620099 - DNA, 103 bp, Homo sapiens
  misc_feature (19)..(19): n is a, c, g, or t
  misc_feature (86)..(86): n is a, c, g, or t
  misc_feature (93)..(93): n is a, c, g, or t
gatcctcaggactgaccanttaagctggcaggttgtcccagctttttaatcccagtcataataaggtgaccagttttaacccgtgnaaacttngaggggactt

SEQ ID NO: 620100 - DNA, 777 bp, Homo sapiens
  misc_feature (100)..(101): n is a, c, g, or t
  misc_feature (236)..(236): n is a, c, g, or t
  misc_feature (238)..(238): n is a, c, g, or t
  misc_feature (312)..(312): n is a, c, g, or t
  misc_feature (332)..(332): n is a, c, g, or t
  misc_feature (336)..(336): n is a, c, g, or t
  misc_feature (429)..(429): n is a, c, g, or t
  misc_feature (522)..(522): n is a, c, g, or t
  misc_feature (577)..(577): n is a, c, g, or t
  misc_feature (744)..(744): n is a, c, g, or t
  misc_feature (770)..(770): n is a, c, g, or t
tttccgtttgtcacgagcgcgcatgtgtggtaccagggattcggcattaaggcgggcgtggggctatacctatagtcgagggctctgtctcaaatactannttataacctgtcccaacgctcggcataatttaagaactagttacttcttctcttttcacttaacgcaaccctcctaaagtactattttacagatctatttttttatttccggggggggggggaaacacccaactntntaaaaaaaaataaaaaaattttatttaagagccatttcttcccttattatttctttcacattaaccttttaatncatcaattaattttttttanattnctaattccctataaaaaaacttttaataggataattgtattcaatataaaattagagctataattaaaacttaccgctgacccaatataaacncaattttattttttatgtattattacaaattttttttaaccgcaactaaaaaaaagcgttaacttaaaatgctctaattacattaggaataangaagccgtctaaattagaaaaacattggcttatatgtatcctgatacattttagnagtcctcgtctcattctttgggtataaccaatattattttgaagatagaactatctaagaatttataaatagggccaaaaatataaggccggagtgaaaaaaagaataatttaagaattttctttaatctactaaaatttttctcacagatgattcttttcttatangagaatgaaaaaattattgtaactcnctactcc

SEQ ID NO: 620101 - DNA, 296 bp, Homo sapiens
aaaaaaaaaatttttccccttttaattttttttccccccccccccccccaaatttttgaaacccggggtttttttggggggaaaaccggggaatttttccccccctttgggtttttgtggtggtgggggtggtttttttaaaaaaggcgggtttcccctaaaataaattttaaaaacccccttttttgttaaccagggttgtttttggccgggggccccgcccccctgggttggtccccctgggtttgcctttttttttttttgcccaaagtaaaaataaccttttttggggggta

SEQ ID NO: 620102 - DNA, 114 bp, Homo sapiens
tagctggtacctagatgtgctcgcactcctggaggccacctcaatggagttcgagcacatcaaatgcccccactccaagtacgggtgcacgttcatcgggaaccatggacactt

SEQ ID NO: 620103 - DNA, 134 bp, Homo sapiens
agcaagcttggtgacctccgcgcctccgtttctcgctgatcaaataagtagaacaagacctcacagggttcttggaagtattacgtgggaaaacacttataaagtggcaaataataaaaactcattatattctt

SEQ ID NO: 620104 - DNA, 583 bp, Homo sapiens
tcgatctagaggtcccggaggctccattcaggggccacactcttcctaatccccaccaaatactcagccggtttcttccagggcttttctttaaaaggatattcacgggatcactagaaggccaggctctagatgctagagccacagagatatacctttcctaaggggtaagaaatattttatattggagagggagaacagataattatcccctccccggcctccaacatggaaaagcatgcttctggtaagaggcagttaaatttggaaattcggttacattaaacccttaatactcatgagctacccatagacttcagtatgggtttccggggataaaccattatttacttcaggaaacggtatcattagaagggcagccattattccattctgggcataaaagtaaaaggaaagcatgaacagggcacacgataatcaatttaatcggatttataccagggggcaggcaattatggtttggtgaaataaaatatagggcggtggatggattgggtggtgtaatgatagtctgtattttggtaacagttcactttaggtgggacggccttcaatgtggaat

SEQ ID NO: 620105 - DNA, 1479 bp, Homo sapiens
  misc_feature (278)..(278): n is a, c, g, or t
  misc_feature (395)..(395): n is a, c, g, or t
  misc_feature (456)..(456): n is a, c, g, or t
cgcgtaagtcttcacgtggtttgtgctgcctcgcagttaggtcctgtccgactggtaggaaacatggtaactatagactggcaggcccaacagagatgtgagccaactcagtagccatttcaggggcccgagcgatggatggcagctcggatcgccaaggctggatgctagggactcacgcataagtagacctagtaatccgacattcagcgcgctggcacaaaggcatcctagtacgcatgcaattgtctgatcgtgtgcacaccatgctgcgtagntacagggatgcaggaaaactcgcgcgcgcgcatttcgaggctcgtggcgaggtagtgcaccggcactgcgcaagtgcacgtgcaagggcacgatgtcgtaacaggcgccccgctggngctgcggtgcactgaggagacgactacactgagctcaaatgagacaccaggtcttgttggngaggaggttgccacgcaatcgaggacgtcggactgttgggggacaaggaaagagacggtagtgacgctcgagttggcctgcgtcgtggccacgggaggagggcacctaccgcgaaacaatcagactcctgggccctgcgaattagggaagaggacccatcgtggctagccgttgaacccgggggggacaacaactttgtgacaaacttcgcgctgtggtacagacacagggtttcggggactgcccgacacggctcaaaggagggggaccaactcgcttcgatctccgacaaggaaaattggaaaacgaatggcaaaaaagcgcaatggtggttgatttgggaggaagcgggtaccggggtctgcatggttgggggctcaattgatagggcccggtggctggggttgggcgttctgccacagtgcggttatcaccaatggcgggccaggaccccaccggtggggcaaccaggaaaccaccccccaaaaaacgaaagaggtgggcgccatgggaattatgggtaaggcggtctggccacccaagagagggcatactctggcaccggggaaaacttcgcccgatttttggagagcaggttgcaccacccaacggttttccctgagctccgaaatttgccgggggattttgcgatgcggccgcaaagacgaacccgcggatcactggcgcgtttgggacctcgaagggaaaggcctgactggctttggaaattccgcgggggggttcagcaaggtttaaggccctagggggaccccctgcgtggcccgcacaagcccaaaaggaactctgtgaagtttgtttggcgcctatagagcgttctgggcgcgtcgtggtgttatggtgtaaagccgcctgtaaaacacagggtagacaacacgcacacagtaaaatatcggcgaggggggcagcatttgtagcgtccacgactgccactatataggcccaacatgtttgtgtgcgcacaccacgggttgttttcccacactacttggcccctctttaacg

SEQ ID NO: 620106 - DNA, 1371 bp, Homo sapiens
ggttaggattcattactgcaaacctacataatctaacatatttgtttactttagtgtgacaactgatgaacaaaaaatggtcgccatccggattggctttaaataacttaagaagggagaaacggtggtcttctttacatctcttttcggcaaatggtcccacttccctttaaccaaactgtcatatgaactgagatcataatttttaacaggtgggccattccttccactggtattcgacaaaccataggaatggttatttggaggtaattattacaattctttctatttttcacaggagcccattacattataacgggtggaaacaattatggcaccattacaaaatggtaaaaagagatactggttcacacacttaccaacccaaacacaggcccactaagaagtggacaaaaacacagagcacacagagacaatgcggagaccccatacataccacacgggggtcagtatcacgtacacttaactatagctaataagcgactaagccccctatacccacttcaggcacacacataaacacagcacaaattgcgaacgccccacccaatctgcgtacaagccccccaaacgtggcacaaagtgcaaatacactcacgtgcgggacccaagtactacaccacgtgtcccaacacacaacctgaaaaaagaaaaacaactgccggcgacaccacaccaaaccacctaggacgcctacaccaaggagaaccaccacacgcccacgagcggcaacataccacgggtcaaacaaacaacagtaacacaccatcacacatggacaccaaaaattacaaactcacacaaaaacaaacagacacagaaaacccgcagagaaaaaaaagaaaacgacagcagaccacacaccaaccacaacgacagaagaacacgagaacaagcagcaaccacaccaaagagagaaccgagaagaccacacaaaaaacacaaccaaacacaaagagacccaaaaacagagacacaaaacagagagaacacgacgcagcacaacaacacaaggactacgagaaccacaccacaataaaagatacccacgcagagacaccacaagaacggatcataaacaaaaacaaccaagaagtctcagcgacccccaacggcgcaaaaacaaaacgaccacgacgaccaagaacaaataaccacagaagcgggaaacacaggccgaaaaacgaccaaagaaagcagcaaacgacgacacgaccacgcacaaccgaccacatcacacaaacaacacagccaaagcgtaacacacaaccacagcacaatacaagaaagaccgcaaacagaacgaaccccacaaacagaactaaacacaaaaaacaacgacaacagaga

SEQ ID NO: 620107 - DNA, 978 bp, Homo sapiens
  misc_feature (690)..(690): n is a, c, g, or t
ggccgcgtggtgtccgcggtcgcgccgggtccgcttgagtgtggcccgtccgacagtccctcaccccggctgcgctgtggtgactcggcctcaggaattccgctgcggccaatggttgccgttgtgacgaggcagcagtcgcggtaggcgggtggggcaagggttgcccctggggggaaggccggaggcgcgtttcggcaccttccagcattggcgacccgcggtgccgcccttgtggggcttgccttcccccgtgcttgttgtacgcggggacggccgggtccattcccttggggggggcggggcggggtggttcccctttaaaaacttttaaccaggcagtttcccatttttgggctttgcacaggacgtgtgccctcggggcaaaagggcccattgtggccattccacgttggggacccaggaagaaaagcatattcctttagcgccaaagtgtttgaggcggtgcatcttgatggcccaccaatggtggtattttctttctccccaagtacactgtgatttgaggccaggtggttatgggaccattattaggtttcctccactacatttgactggccggttgacgctgtgacaaaagggcgctttagcaggagacttgctgtctgggcgcaaaaaggggaaggacgcgcaacgtgaccttacagagacacggagggtctgaccggngggccagctcatcggggcggcgtaatgggttgtctatgggccgggagtgatgtccttcttttgaaaaattggggcgtggcacccttgcccaaggaagcaggaaggccggagaggtggggcgattgttccgcgagggaattgcccagaagatagcggagcgggccgagtggcggagctgggggacattgcccgccttcctgaacatggtgtccgcctgggactccctcgcgggaaactcgtgtcggcacacgtttagagtgtggcacagctttgctaatagtctcgggt

SEQ ID NO: 620108 - DNA, 117 bp, Homo sapiens
ttataggtgcccgagtagcatcctagtgagccctccccagaagccacacctggccctgaaggtgccactccagtacccaccagccttgtcctaataaaatataagttgtatcattac

SEQ ID NO: 620109 - DNA, 284 bp, Homo sapiens
ggagcgcctacctggcgaagggtgacatcgtggtggaagcatgggctgacctccgcagatgcccctgagcctgaaggagagcctgcctctgtacgtggtcgcggatgtcgacacattgttgaccgtgctggtcggcatcttcttcccttctgtaacaggcatcatggctggctcaaaccgctctggggaccttcgtgacgcccagaagtctatccctgtggggaccatactggccatcattacaacttccctcgtgtacttcagcagtgtggttctcttaggtg

SEQ ID NO: 620110 - DNA, 425 bp, Homo sapiens
cgctgggattacaggcgagagccactgcacttggcctaaatattaataatctaatctctggtcacaacctctcagttgcacagccttattctacagataccttaaatagaccatcaaactattaatctttcaaactccaattttcctcagtctatcaaagaaagtaatagttgacttctttgatgatacgcctacacccatggagtatcatcattcagctgctttcttgctgctaccttcaatgtttaagctcctttttctttgtgccagaagcactcaaccatggatccaaccaaatgccctctctgctccacacttctatggagcctcagacttggcaattcctttgtcagtgtttgttatcaaccagaacatccttaaaggtccttacttgttaaatatcctcccaccctcagacaagaacc

SEQ ID NO: 620111 - DNA, 219 bp, Homo sapiens
ttaggatctctgtagaagctgtcgaccgaagtcgttcttggcgtggtgcaccagcttgtagtcggccgcaccgagtttcgggtgcccggcatatttgcccaggcgcgcgcggtcgatcagcgattgcgggtgttcgatacggaaacccaccgagaacggcttggcttccatgtacacgccacggccgtggaacatgcggaagggatcctctagagtcga

SEQ ID NO: 620112 - DNA, 316 bp, Homo sapiens
  misc_feature (276)..(276): n is a, c, g, or t
  misc_feature (278)..(279): n is a, c, g, or t
tgctgtaatcttgcactatgtcttgatatcgagtagaaggggtctcactccactatcccaccacgttttgctcctctctttcaaaattgttaaaagatttttgtgtacttcattgtttcatattaactttagggtcaatttgcttttgagtttccccaaaatcctgtagatgtattgtgttttaactacacttaatttaacttaccctagggggaactgacatctagaaagtattaagtctcccaagtgtagacggaaccagctttccattgatcngnntcttcaataaagtttgaaacttttaaccttaaaaaaa

SEQ ID NO: 620113 - DNA, 1353 bp, Homo sapiens
  misc_feature (319)..(319): n is a, c, g, or t
  misc_feature (531)..(531): n is a, c, g, or t
  misc_feature (561)..(561): n is a, c, g, or t
  misc_feature (1131)..(1131): n is a, c, g, or t
gcccaggtcagtcagacccacctacctgcgaccacgttcctgcccctcttaacgttctccagggaatcggctgcattcggcaaaacgctcattcttggaacgcgcgtgttgaccgtcaccacgtggtgtgttgaggcgtcaacgtaagaattcctacatgcatcttcgcgccgcctagcgacttaattacgcttcttcacgtctctcgtctacgaggaggaataagtctctcctcgtaatccatgcaattagtagcgactccactatccagctatttgcgtttacgtcttgagtcctatcgcgaaagccctggagaagntccggtaccgtgtcacccatttcgcgtagatgccctcactggctctctcatgccactaatttggggcccatgtactttttcacggttgagcctggtgcctgagtgtgccgtgtctgatggggccatacgccttgctgagcctacgtttgcgcgtgcctttcttctcgtgtgctgtgctgtgcacggcatcttgtgtttaaaccgcgacacancagcagcaccgtttcttctaccactgcggnattcaatgagcgctataggcgacaactgtgagaggcatattgcacgtgtagtatgcgtgtgcggcactggcgacaactgcgcttagcaggttaccttaaacccccaatgctgcacatcagatggctaatcgtacttagtagtatttatccaaatttaaccggtaaattagggggaccgcctaataatcttataaattaccgaaggaggcggacttgaatacttagatacttattttatctatttctcttccattggaaaatccttgttacccccttttacaacttctcttattatccgtgtcccttgggtcaaagccgcaatatgaaggggatgtaaccaacccacatcaaaattacagttctccgccaagcggcgaggcaccaccgccttgagcataggaaggtgtaacttcgattcaccaaaggaaacttatgccaccacaaggtgatggcatggaagcgcccccatattggaatttttgcttatacccccagggaaaagaaaataggcgacgccacccaccgtgggagcgacctttattccaccctttcggttgtcgtatagggtcnaccttttcggccacattccggttggagggggtaaccgaggaattacacccagaggttaaaaccgtaacccgtggtaaatcatccacctagggtttgacttctaaaacacacatcagacaacgaggaccccaaacttttaccaccccaatggaggagaaaaccccccacaatgtgcggaaatgtcgcgaccgcaacattgcgcgcgcccacatacacaccaaa

SEQ ID NO: 620114 - DNA, 308 bp, Homo sapiens
  misc_feature (108)..(108): n is a, c, g, or t
atgctgaggtcgatctaaggatcccaatcgcacgacagtagcagtaggtacgaaccttggtttgcctttattttacattccctcgaagctccagctcgaaatcagaanaatactccaggacagtcttggtctcacgaagacaagtggatcttcagggcttccgcgattagactccattcttgaggctgtgtggactgtatacccaaagagacagtaacggggcatcttcatgtcccaccactccagcacacacaggttctgtgtggatgccaatgcgcaagcgcagctgctccttggtcggggggata

SEQ ID NO: 620115 - DNA, 313 bp, Homo sapiens
gatgcgtgtgatcagttctagaggtatccccgcggagtgcagagagaaagcacaccgtcggactaatgtaggaaacatccaaagtacggagtgtttctggagactttgatcaccgttaacatttctctagcaaagttgtaagcaaaatgagagtgttgttccaaggacatccatcacgactattcgaatggcctgtgccataaaatgtgcttctcttcttcgggatgttgttagctgtctgagtctttgtagagctgttcctgtttcgctgtgagcttctctgctcgcttaaattgttcgttctctctccact

SEQ ID NO: 620116 - DNA, 792 bp, Homo sapiens
tgaaaaatggttcattataaagagggttgggaaccggtctccaacggcgcaaacaagatttggcttgtaaatggaagaatcctttgataggcaaccgtgtgctatcccttagcattagagtgaattgggaaattgaatgcgaggaacagtattcaacctagccatgtcaagtgggaccggagtcttacaagaccgccaaatttattcttattcggtggtgggtagccggaaatgcctctgacgctttaattctgcgatgactcccagctctaggtttttcgcatcccataagggcggcagttcagttcctggcacaatgacaataagacatttaaaggcttctgtgctgaacagtatggatctggtcgctgcattacgagtgctcccgctggccctctcaatgcaggctatcccagggtggcattttctcgcaagcatgtactcctaatggtaatgatagtggcatgatttggtccacttgcgaatcccggtggtcttccatgaccaaacccgctatggaggtcatcccgttctccagactgacaattggagaaggtccgcaacgccacctgggggcatccaaacaggctggaaacgtttaaaacaccgtttcacaagctataaacttttttaaagcgctttatttgtacaaatagacataatgttcttcctattgaacaaagtgctagcaaagcttctcttcattttaagagcacaagactccatgtggcatgccccatatcagtattacggagacgatagtctatctacacgcatttcaataagcttttt

SEQ ID NO: 620117 - DNA, 628 bp, Homo sapiens
  misc_feature (468)..(468): n is a, c, g, or t
  misc_feature (628)..(628): n is a, c, g, or t
gagagagagagagagagagagagagagagagagagagagagagagagagagagagagagagagacatcgagatagagcgagtggtgacctacttccgtaactgtaagtcctaactacgtctgctaatgatctcaacatagcaaactcacctctacttgctggcatagcccatggttcacccagcacttagcccagctgtgctttatctaattctcggcttagtgttaatgatagatcacgatccatctccacaatggctgctagacacttgtggagcatgcgcctagcgttcccgggactgctatgtacgccctgactagatgggcgacaccatcttgtgactgtctgtgaactgtctgaatgctcagctctattcagattatgcccacagtaatgactcctgccgtgccatgtcaagggaacagatgtttatgttgtacttacctcaccacatcctcgggactgttnggagatcgtatccacgaccatgcaacctgtttttagtatactgctttttgatgactcccacgactttttacctcttgcagttcccccatgactgtaaccgggctttcatgtaagctttcccaggcccaccacttaacacctcacctttcgtttcatgttn

SEQ ID NO: 620118 - DNA, 151 bp, Homo sapiens
ttgcgggcctcctgtgtactaggccccctgtcatgcccgggtcctactttccctccctgtcctttaacccggccacaggcggcgggagctgaggagaacccataccatcccgctggaggacgaactgctaacggtagacggatcagaggag

SEQ ID NO: 620119 - DNA, 126 bp, Homo sapiens
cgtatgctcaaatggtatctatcctcatagccttgtcggaggtacgtatatttactccaatatatgaaatcgaagtaattgtctcctgaccagagtcagtttaacagtgagtagtgtcagactgaa

SEQ ID NO: 620120 - DNA, 698 bp, Homo sapiens
ggatcaacgattacatcctgaaagatgcacctaaactagatgaacaccaagtaacattgccctaaccatagagttgctcatttaaagcagacatccagtaacaatcaatacacagagcaaggacacagtgagcgaaattgaagagaaaaaggcgatcagaagctggacaaatatggatttcagaaggatggtcatgatcgaacctgactaacaaattaatagtgtacaagctgaattctctgccatctgaatatgagagtgggtcagcatgccctgctcagactgtgcactacagaccaatcaacttgagcagttcagagaacaaaatagtcaatgttagcctggcagatcttcagaggtggaaatcgccccaatacagggcccttatacacagaggccgatcgaatcatacagagaacaaattcaatgcagcagttggaacagtggattaaaatccagaaggggaggggtcatgaagaagaaaccaggggagtaatatacttaccaaaacatgaccaacgaaagtatgccaagtcacagagcccagaatcatggcccgctacccctgaaaggttcatagaacacatcccaagaaacagcaaggacaaggccgtgaacagtatctgcaggagtaaccccattccactcactgacaagacaattaggacccggaggcggaggagaaaacggaaggtcca

SEQ ID NO: 620121 - DNA, 310 bp, Homo sapiens
ttcccccagttacggagatacttctgtctatcctgaacaacatatatagaaagaaaaaaaaaaatggctgggtgtgtaagtattttctctttcccttctaaaaacggttaaattcatttttgccaggttggtaaaaatagattttcctccccaagtggacctaaatgataacttttctatggaaattattattattttaggagagggggtctcggtattccacccaggctagtgtgcagtgatagaattatggctcagtgcagcctcttcctccggggtacaagcggtcctccccgggatacaggggtcc

SEQ ID NO: 620122 - DNA, 124 bp, Homo sapiens
ctgcacatacacaatgctgctcatctgtcccaaaaccttcatgccttacgaagaatttccgcatctcttatagcgtcgaagttggcagctggtcggatagttccttgagtgacctgagaagctg

SEQ ID NO: 620123 - DNA, 1197 bp, Homo sapiens
gcacacaccgatgcacacacactctctctttctctctctctctctctctcacacacacacacacacacacacacacacacacacacacacactagtgagtgccttgtatgacgcggggctgtgtgtatataggaccctcgtggatctttgctactctttcaggaggttcctatatctctgtcctctccctcttctcgtggctcgtgcgtgtcgtaggatgtcgtggcagcgcgggggtagttgttcagaagggtctctaggcgccgtgtgtctagtagtgtccaggagcacgtggctcgtgccctatcctggtctctctggccagccagatgtccccgtggacggcgacgccagtgctgttttacctactctctatcacgcagaaccacgtctactactttactactcaacatacatgaccctatgtacgaagacgcgtcctccgcaggggaccaacgacttcatgagtgtggtcactccatcttactccctcgttcctgcgagggcgaaacgacgggcagggcggaacaatcttcctccgcgggtggctcctcttgatcaaatgacctatcttcttcatcccagttcccgaagatatcacgatggtggctgcagagtactacttcatttactacttggcgagactagatagagcacgacatctttactagagggagcggatggtagaagtcctacccgcatatagagggcccacaggaggaaacgttggggcctcctacccgaaggtccatacctacatcgttggcttctcacttcgggtgggggcccccaaattaccagatggggccaagctgtcttcctgggcggcccatcaacacaggcgatgtacatcgtgggggaggcacgacagacacacgcggcactacggacggacacgcctcacgccctgaatgtagcacccatattcacacctgggtagttcggcctccatccaggttgtgaggaggtcgaatcatgaccactcacgtgggcgcgacaccacgcacggacgcacgcacgcacgaaggcacgttctgactctttggagtccaccgagacgcactactcatttgaacacgcagggtgagtgggtcaccagaggaacatagtcaataaagaacaaggcacagcaactgtacatacaggcaggagcggcgcacagcctgtggaatgtggctgcctccaagagatgacccg

SEQ ID NO: 620124 - DNA, 107 bp, Homo sapiens
ctcacgcccatgtaaaatccggcagaataatccttcaatgccttactggatcataggaacaaccagagataggttagcaggcttctcaattttctttttgatttttt

SEQ ID NO: 620125 - DNA, 624 bp, Homo sapiens
ggcccattgctttggagcacagatgactctgggggcagaggtgggctctgtttaggagggcagtgagaccacccagccaaattgcttctcaaccctagacaaagccttggccaagagggaggtgctgttagttgggcagcccttctgggtttcagagaccggtgttggctctagactggtctcatctccattgccttaatgccaggtggcccaggagtacccatgcacagcagctgtggggtgtgggcatcttcaggtggtgttctggtaaaatcgttagaatagctgtactgaaggaaaccagtgggagcgaaaactgacagttttcacggactggtgggatgtgatttacgacagtgcacactgctcgttagcggcctgctcacctacgggacgtgcgcctctcactggcagcggctggtacacagcaccgtcagtcctagccaaaactgtcttacgaaaccactcacgtctcctggtcccagcaggatggcttctcagcggcactgccacaagctctacaggtcaccttcctgaacgcatgacactgcgcacacgctgccaattctcaagactcatctgcctacgggagcggtcaccacgacggcaggatcgtaccgacac

SEQ ID NO: 620126 - DNA, 176 bp, Homo sapiens
tatacgaatcgaggtgtaaccaggacatctgctatgttgtccaggtcagtctgaatctggaataaagggatcctcgcagattggctcccaaagtgctgggattatagataggtgtgaaccatcatacccagctttattttattttgttgtagagataggggtcccgttcacttgcc

SEQ ID NO: 620127 - DNA, 675 bp, Homo sapiens
agcggagcggtgcagccacccatgctgcgcgcgctcgcgaagaccaccagcgcccagagccccagtctgaggcttggctgccgggggtctgcgggcgaggggagctctctacgtgcgaggggctagcgggagccggcagcaagagggtcagaggagccaaggaaccccaaactgtccggcgccaggcgctagccaagctgctgcgcgccccggcgcccagctggctcggggacagccgctgggtgtcggagaccggagctagcggattgcagcggaatgagcacaagatgtcacactggtatccgttggtgctccagtggtccattaaggtgagaataacgatctctgggctggctggaactatgcctaagactgaagatagcagccatggaccatggcggtatgagcccacgtcaatggtaagctcacaagatgggctatcgcattccatttgagctcaatggcgtctgtggtgtcaaccgaacagcgtcaaaccagacagagtccgtagctatgacctgacgaagcaagtgcagtcctcacattcatctattttgtaggtctgcatcattgggtagtgtggcaacagacttgtcatttatgtcagtcctccgctatgccaagatgaagaccatcaccaagatttacatcctcaacctggccatcgccagatga

SEQ ID NO: 620128 - DNA, 332 bp, Homo sapiens
cacggtggcatcatgctgactatcccagcactttgggaggccgaggtgggtggattacctgaggttaggagttcaagaccagcctggccaacatggtgaaaccccgtctctactagaaatacaaaaaaaaaattagctgggcatggtggcacacccctgtaatcccagctactggggaggctgaggcaggagaattgcttcagcctgggaggtagaggttgcagtgagtcgagatcatgccactgcactccagcctggccaacagagcgagactctgtctcaaaaaaaaaaacttactcaatatgctgttacattaattcaaattgtgcctg

SEQ ID NO: 620129 - DNA, 255 bp, Homo sapiens
ctgcctcccgtgggccctgtccgggttgcacaaccaaaaatgcctttggccctacggatggcccctggctttggtttaaagggcctggggttggtggccatcaaaaaggaaccagtcaggcctgtgagggccgtagaccttgtatataccctgccccaccagtgaccgggcaaagcccaaccccctccccgggggtcccagcacccccttttttaatcatgaatgaacaataaagcccccgctttttgtcaggca

SEQ ID NO: 620130 - DNA, 127 bp, Homo sapiens
ctcattgtgtggctcatggggtggctatttgggcggcacattggggggcacgagggggtctgatgagccaccccatgcgccacccaaggagccacacaaagagccacacaatgggccacacaatgag

SEQ ID NO: 620131 - DNA, 119 bp, Homo sapiens
cattggtccgagagaaattagtgaatgatgcctccaccttcaaagccagtgctcaatccagaaatttttccctctccccaacccttcatgtactgctgctaatttctctcggaccaatg

SEQ ID NO: 620132 - DNA, 459 bp, Homo sapiens
gatctgagcatatggcagccaagctgggttatagcctgctttaagccctgatcaagtcaaattcttagtgtccattttttcatctctaaaatataagtgggtaaaataagaatgtctctaggtccttttctatattaaaattctaaaattcttactatgcataatcaagaagaactagggggataaaaagagatgtaaaatattccagttcagcatacagcacaatagataatccttgctaatctgtacatacagcttaattggaaaattaagaactcagcaatttctataaatggtctagatttacagttatatttatttaggccaagaatgatggtattagggagctaagtattccctcagtgaaaaagttcatagcaaagaggacaaaacagaccactagaaacattgtgtactgtatcttattttagacttggccttgccatatgcaagggtacc

SEQ ID NO: 620133 - DNA, 342 bp, Homo sapiens
tccacagttgggttcatctggaagccagatgggacagcaccgttactgcaggtgtgagcaagggatgctggggctttggggaaaggtgccgtctggtcccccactgccttgaaaaggaagttagtgagggtgcctttcattcgtaacctgagactgccactgcctacctggtaggtcaatccagtcgccattggctgccacgacaaaaagtcactgcatcgttcgggacttgggccttgctgcttcacatggaaggtggcgacacaggtgtccatgaggatatgaggcgcccttgggctgcggcgtcgtactgcctgtccacgatgtctgtgtccgcggccg

SEQ ID NO: 620134 - DNA, 319 bp, Homo sapiens
acaccgccatagccggtatttttttatttttttgcatttttagtacagacgagctctcatcatgtttcccaggctggcaactcctgggctcaagtgatccacctgcctacgcctcccaaagtgctgggattacaggcgtgagccactgcgcccagccattcagtgaacatctttaagcatatcgccttgggttttactggagtgttggagttacttcattgggctacattaccaaatgtggaaatttgtgggcaaatggtataattaactatattgctcttgccgtgtaactattaatattaaaagacaaagggaaaca

SEQ ID NO: 620135 - DNA, 504 bp, Homo sapiens
tgagaaatggaaactcactctgtcacccaaacgggagtgcaagggcaccatctgtggctcactacaatctccagctcccaaattcaagtgattctcctgcctcagcctcctgagtagctaggactataggtgtattataggacaattttaaaaaaatttcatggtaaagacgggattccgctgtgttgcccaggctgcaagtctgggcctcaagtgatcattccacctttaactcttgccctcaagcaatcctcccacctcagactcccaaaaggcggggattatgggtgtgagccaactttcccagcctactagcaggggtctggtaacttattcactgggcatgatttatgtaatttaaaaaaatggttggttttccaaatagaaaagtaaaataccgaatatgctttcccaataacataatccccttctcacttgagaatttccctctaaaaagatatgctagattaattccaggcttaatgtgcctctggtgtgtcccct

SEQ ID NO: 620136 - DNA, 231 bp, Homo sapiens
ccacctcagcctcccgagtagctgggactacaggcatgcgccaccatacccagctaatttttgtatttttagtagagatggggtttcaccatgttggccagcatgatctcgatctcgacctcatgatccgcctgctttgacctcccaaagtgctgggattaccggtgtgaaccaccgccgctggtcgaccctgcctttctttagcccaaactatggtgtggtgtcctagga

SEQ ID NO: 620137 - DNA, 375 bp, Homo sapiens
tgagacagagtctcgctctgtcacccaggctggagtgcagtggtgcaatctcagctcactggaacctcctcttcctgagttcagcaattctcctgcctcagcctcccaagtagctgggactgcaggcagacaccaccatgttcggctaatttttggatggttactagagatgggggttcaccatgttggccaggctggtctcaaactcctgacctcaaatgatccacctgccttggcctcccaaagtgctgggattacaggtgtgagccaccatgcccggcctgcatttctttcaaagggtgatttctaaaaggaagataataaatggatctatgattccattttcagtaaggtagaattctaaatactttccat

SEQ ID NO: 620138 - DNA, 361 bp, Homo sapiens
gtctctagaggatccacatacattgtctgatgacaaggatttcactctcatccctgtacaatatagtgtcagaagtattactggccaggtgcagtagctcatgcctgtaatcccagcattttgggaggccaaggcagacagatcacctgaggtcaggagtttgagaccagcctgactaacatggtgaaaccccatctctactaaaaatacaaaattaaccaggtgtggtggtgcatgcctgtaatcccagctactggggaggctgaggcaggagaattgcttgaacccaggaggtggaggttatcgtgagctgagattgtgccattgcaatccagcctgagcaacaagagcgagactccgt

SEQ ID NO: 620139 - DNA, 657 bp, Homo sapiens
agcggaataattatctattctttggagcaatgggtgaagtatgtcttcatgagcaaatttacctttctctccaagttctcccacattcggaaaccatgtttctgttggcaataacatgtgcatttgtatccaaaacactgtctggatcttatatgaattccatgctcacacaaatagagagagaattcaacatcccaacatctctagttggattcattaatggaagctttgagattggaaatcttttgtcgattatatccgtgagtcatttaggcaaccacactgcatcagacctcatcacatgatctggcattggcatgtgtggttcatggcgcttcaggctgttctcttacacatccactacctcatctcctcatgcaaccactcatgaatatgaatctacagtctcagtttcaggcaacttgtcctcaaacagtttctcgtgtactggcaacatggaacccagattccaagaccaacgcaggatccatcagagtgtacaaacggaagttcacatcatctcacatgtggcgtgtacgtcctagtaggcacatatccgtccgtgcaatgggtgacacactccccatcctgccttcgcgctctcccctatatagaaacatccgcccacattcgcacactcatccttaactcatatcg

SEQ ID NO: 620140 - DNA, 632 bp, Homo sapiens
ctcttcaaaaaatttgcatgtctgctgtgaattttcatctagttccccaatcgatgctctcagggtcatctcggggatcacagggatccttaaatctccattctgtttgtggttgccccctcaacctcccctacaccttcctattctttttcattcttcttgcagttctgggagtaaagctcccagcatatttagataactagggcagggcgaagcaccctctttctttctagcactggcattatgctcacactgctcccttgccctgacactttcttgctaaacttctgtgcccttctgctgctagctacacttcagcacttacacgtaggcacgcaacagaactgtgctgcagctgctctctcctccactttgcctctacctggccctcatcccaacagcccagcaaggcggacgcagcagaaacagcaacttctctctcctatagcaacgacgctgccggccggccgatgcgcgtagcggactttatccaactctaagccctaaccccacttagtgacctcagtgctctccttccacttccttcttactgccctgctcctctcgccttgccacaggctacgcggaactagttccataccgcaggcaccacatgccacaaccacccacct

SEQ ID NO: 620141 - DNA, 393 bp, Homo sapiens
tccttcaacacgagcatatgtttacttgctctaattttggcaaatatattgaatgaaagacattgtaataccttagggaccatctggattgactgcctggattggttggcccaaagacacttattatccagagaatcagagtcagatgctggagcaatgatgaagtttacaaatggctttgagatgcccttaaacctgaggtctgtcaatgcaagtgcataaaaataaattgttacattttcactttaaaatacaggaattggaaagacaatgtcaagagaatgggatgacaagccacagaccaagagaaaatattgcaaaagacacttctaataaaggacctctgtccaaacatacaaataactcttaaaactccacaataagaaaatgaac

SEQ ID NO: 620142 - DNA, 107 bp, Homo sapiens
gtataggtagaggcgacaaacctaccgagcctggtgatagctggtgtccagatagatcttagtcaactttaaatttcccacagaacctctaatcccctgtaaattac

SEQ ID NO: 620143 - DNA, 686 bp, Homo sapiens
atggcagaagggaatgctcagagaaggaaaagactgaatctacctgccctaagggacttaacttgtttggtagttagccatctaatgcttgtttatgatatttcttgctttcaattacaaagcagttactaatatgcctagcacaagtaccactcttggtcagcttgggtagtatatatgcagtacacagataccttgaacaaggaagagctaataaatctcttctttgctgcagtcatctcactttttggtgtctaattgaacacaaaagatttttttttggaagcagtctattgctctggttacccaggctggatgtgcaagtgggtgtgatctcggatcacttgataacctctgtctcccaggtcccagcaattctcctgcctgcagcctccctagtagctggggatgacaggcgcctgccatcatgcctgactaatttgtgtattctgcacgtagagacggcgtcccaccatgtggccaggctggtctcaaaggtcctggacctcaggtgatcccgctacctcagtctcccaaagtgctgggattacaggcgtgatccacacaacctggccttgcaaacttctactttaagggtctgcagacgataagcccaatacactcccacaatcggaacatctgcaacatgaatccaagacaggcaatagtaccttcaatacttagaa

SEQ ID NO: 620144 - DNA, 422 bp, Homo sapiens
  misc_feature (65)..(65): n is a, c, g, or t
  misc_feature (79)..(79): n is a, c, g, or t
cgccccctaagcaggtgcactctgtcccctttgagaagagaccaagggatacaagtgctgggtcntggcgggttgcccntcctccctgcctgtgggggtctcattactgcctcctgcccccaccacaaacacccccttagagaggctttcggaggcaggtactgagccctggggccagggtgccaggagcccaatggcaggtcttgggtgactgctggccctggggcaatggtgagaaagccaggcaggcagctgcaggaaggagctgaggagaaaggcgcagagcctcaaaagctgctggcggccgggcacagtggctcacacctggaatcccagcactttgggaggccgaggcgggcggatcacgaggtcaggagatcgagaccatcctggctaacacggtgaaacccccgtctctacta

SEQ ID NO: 620145 - DNA, 126 bp, Homo sapiens
catcgtagtaatctgaggaggctccagtatataacgagtatatggagtgtcagcagcgggtgctcactgtagtcgacgggaacgttgtacagtgcagtgcatgcacctgcagtggtcgaatacact

SEQ ID NO: 620146 - DNA, 149 bp, Homo sapiens
gcatgcgcgtggggaccactgcagaagagctcaaaggcctggtagaatcgtgacacaagctactgtgactggattgcctctggatgtcgaaacacaaaaacaaaacagacagtccactgtatccacatgaactcaatgaggactgaaca

SEQ ID NO: 620147 - DNA, 247 bp, Homo sapiens
tgcgaccgcagcgctgaaacatggcgcggaagttcaggggctcgtacggagagaagggcatcaagctgcgggcgatgcggcacttgggaaagacgaagtgaggcctccggtggggcaggctgaagggcacgtagtgctaggtatcctggggctaccggctgaagaacctgccctgaaagagctcgtctatgatgctggacgcgcggctgtagtggtcctgcatgacatccagcgttgggacgatgcc

SEQ ID NO: 620148 - DNA, 113 bp, Homo sapiens
ggattgcttgtctgtttccgggttggggggaacacgttggttgggtgggaacgggagccaggttgggatggagggagtttacaggaccgcagacagggccaacgtcgaagccg

SEQ ID NO: 620149 - DNA, 253 bp, Homo sapiens
ccgcgcatagcggcattatgacggggtcagcgtaaggagtcagtcccctggacagtggacttcattgaaatgaacagaggtgagagtatctgaggaaaggggctgaaggtaagaggtcataggtcaagaaggggaggcagaagtgaggccagcccacctgggaggtagtggaggatacggagggcgagggcgaggccgggggggatagggggcaacaggggagattgagggcgttcacttaatgccgctagcg

SEQ ID NO: 620150 - DNA, 162 bp, Homo sapiens
agaggatcccactcgaggctgtatatactggctaccgacagcggtttcttcatcgacaacctcgcggtgctggctctggtctacgctgccgaccagcttgctgtatcactgtttacctgctagtctcgtttttcctgcaccatccctgcgatctacgaggag

SEQ ID NO: 620151 - DNA, 679 bp, Homo sapiens
ggcaccagaatgtgcctcagagctgtgacatttcaacatgatggttcggggttgggttgggtttgtgtcctttttattggcagttttttctgtggcaacagaaaagtggctgtggaagtctaaggtggtatgtaacaaattctttttaaaaattttaaacgcagtattcaagtattcttacctgtgtacaccttcactttaactgtttaccttctaatttctggtatcttggctgtctggtttatggcattttaaaaaaatctgaactattcatgtatggtaactgacatgatgttgatttctgaactgagacagataatggtatggctgtccaacaggggttggcaggggcatttgtagggtcgtataattctagagttcgaaaggggtaatataaaaatgtgctcgtgtgttagccatacgtttttctcaatgcctccattaccagtgtgcaattgtgtatctagagactccaaagctgtgttttaaaaacaaaagaaaaaaccttttctctaataatctcagaaatataaatacttgtcattttcactacttaaggaattcattatacctttttagaacacactggtggaacatttataccgtattaacatgtagctataactatttttaattcccaaggtgttgcagcttcccctttaaatattcctaatattcg

SEQ ID NO: 620152 - DNA, 479 bp, Homo sapiens
tgatgaggtatattttttaaaactcattacagtcatattaaaaagataaaccaattataaagtaggtaaaggatctgaacagacattctccaaagaagatacataatgactaataagtatatgaaaagatgttgaaaatcatcaaccatcagggaaatgtaaatcaaaaccacaatgagataaacacttcacattacagatgaatataataaaaaagacagacaataacaactgttgatgaggatgtggataaactggaattctcatacactgctggttggaatgtaaaataatgtacccacttcagaacagtctgacagttcctgaaaaggttaaacagcattaccatctgacgcagcaattctgctcctaggtatatatccgagaaatatgaagataaatgtctaccaaaaaattgtacaagaatgttcataacagaattattgataatactcaaaaagtagaagcaactcaatctg

SEQ ID NO: 620153 - DNA, 369 bp, Homo sapiens
acgtgactgtaatcccagctactcgggaggccggggcaggagaatcgcttgaacccgggaggcggaggttgcagtgagccgacattgcaccaatgcactccagcctgggggacagaggctgccccactgcagccttgacttaccgggttcgggtggttctccacctcggccttgccactagctgggactgcaggcacgtggaaccaccctggctaatttttgtagtttttgtagacgggattttgccatgttgcccaggctggtctcgaactcctgggctcaggtgatccgcccgcctcagtctcccaaagtgctaggattacaggtgtgagtcactgcactcggctaatagtaatgaactttgaacag

SEQ ID NO: 620154 - DNA, 173 bp, Homo sapiens
agtgctactccacaaacagtctgagagagggtatccctgtcttgtgccagttttcaaagggaatgcttccagtttttgcccattcagtatgatattggctgggggtttgtcataagtagctcttattattttgagatatgttccatcaatacctgtttgtggaggtagcacgt

SEQ ID NO: 620155 - DNA, 461 bp, Homo sapiens
tccgtaccaaaatgttaagagtgagtgtctcggccgggcgcagtggctcatgcctgtaatcccggcactttgggaggctgatgcgggcggatcacggggtcaagagtttgagatcagccggccaacatagtgaaaccccgtctctactaaaaatacaaaaattagccgggcatggtgatgcatgcctgtagtcccagccacttgggaggcttagggaggagaatcacttgaacccgggaggcagaggttgtggtgagctgagatcgtgccactgcccttcagcctgggcaacagagcaggactctgtctcaaaaaaaaaaaggagggggtgtctctgggcattgaaacatggattcccaaaaattccccaaaaattgattttttttcctttaatttccgaattttgggaggtttcccccatggactattgtggtggccctggaaatttttgtctccccttc

SEQ ID NO: 620156 - DNA, 229 bp, Homo sapiens
tggcacacctatgggaattgggggtgggggggtattccctctaatttctatgaggggggtgtggcactttctcttcttgtagccacagatcttggagctggtgcacatcatcaatgctgccttccccccacattcatttcctacctctcctaaccttgtaagtcatgttaggttcttatctgctagagtagggagcaaacttaacttactggtggccttattggatatg

SEQ ID NO: 620157 - DNA, 306 bp, Homo sapiens
ggcacgagcgccagtactgggattacaggcatgcaccaccacacctggctagtttttgtattttttgtagagacggggtttcaccatgttagccaggatggtcttgatctcctgacctcgtgatccgcccacctcagcctcccaaggtgctgggattacaggtgtgagccaccatgaccggtcctacagcttctttttttaaacctcatgaaccagctctgctcacaagcttctggaaataaccccatggccaggcttttgctgtactttgagaatggctagagatggggtctgagtgtctctgag

SEQ ID NO: 620158 - DNA, 556 bp, Homo sapiens
  misc_feature (20)..(20): n is a, c, g, or t
  misc_feature (221)..(221): n is a, c, g, or t
gagctggagcgggaggagtncgggatcttggtcggttgcacaacggccgcttgcgtgcgcgtcccgaagggcttcaccttcagttggtttgacggctaccgcctggacataacccgcatggcctgcgttgacatcaacgagtgtgatgaggccaaggctgcctccccgctgtgggttaacgcgcgttgcctcaacacggatgggtccttccgctggatttnccggccgggatttgcacccccgccccagccgcccccctgtgggcccgcaggggcccgggcctgagccttggcacccgttggccggccatccggggccgcccctcggggccccttcggggaatcctacagcccgcttttgggtatgtgcccggggccgcccgcctggccctggaaaaggggcctccggacgcttggggggtggggggccctgcactggtgccgcctcccccaggccctcccccttatgttggggtcccgggccgggcccaggggccccttttcaagccctttcccttttaaaaaattttccattaaaaaccccctattttttatca

SEQ ID NO: 620159 - DNA, 921 bp, Homo sapiens
  misc_feature (36)..(36): n is a, c, g, or t
ggtcaagatggcgctggtggcttctgtgcgagtccnggcgcgcgttctgctccgcgcgggggcccggctcccgggcgcggccctcgggcggacggagcggggcggcggcggcggagacggcgcgcggcgcttcgggagccagcgggtgctggtggagccggacgcgggcgcaggggtcgctgtgatgaaattcaagaaccccccagtgaactagcctgagccgtggagtttctgtagcgggagctggtcagtcagcctggagaagctggagaatgacaggagcttccgtggtgtcattctgagcctcggaccgctcgggtgtcttctcgggcggccgtggacctgacggagcatgtgtgggatggagccccggccactacgctgggtactggagagggcgttcaggagctgtggctgcggttgtagccagtccaacctgggtgctggtctcccgccatcaacggagcctgccccggtggaaggctgtctggtggccctgacctgtgactaccgcatactggtggacaatcccaggtactgtagttgggactcaattgagacccagttgggcatcatcgccctttctggttgaaagacacccctggagaacaccatcggagaacgggcggcggagcgttgcctgcaagtggggctgctctatcccgcggggggagggccctgcatgttgcgcatagtggaccacgtggtccccggaagaagcagcgtgcagagcactgagtgtcaaccgatagccaagggagggcatccagaacatgtccaaaggtgaccaggccttgagtggaagggcctgcagccgctggtcacacacgcggaagggagtggcaaatgggggatccccaagacccccaaagcctcagagttaagaggcagaaaaagtcaaggggcacgttaccaagcctg

SEQ ID NO: 620160 - DNA, 109 bp, Homo sapiens
agtgtccgactgtctgctagaccagccacttagctgtcccacatgtcctaagctggacacatcttcttcaccaaactggcttccacctccagaccttcccagctttatc

SEQ ID NO: 620161 - DNA, 85 bp, Homo sapiens
cgttcccaagtctctaactttttctgaagagaaacgtcaagagaagattcagactctttcatggtctcccttctgtcgtcttctc

SEQ ID NO: 620162 - DNA, 457 bp, Homo sapiens
  misc_feature (15)..(15): n is a, c, g, or t
  misc_feature (94)..(95): n is a, c, g, or t
  misc_feature (100)..(100): n is a, c, g, or t
  misc_feature (102)..(102): n is a, c, g, or t
  misc_feature (122)..(122): n is a, c, g, or t
  misc_feature (127)..(127): n is a, c, g, or t
  misc_feature (131)..(131): n is a, c, g, or t
  misc_feature (134)..(134): n is a, c, g, or t
  misc_feature (139)..(139): n is a, c, g, or t
  misc_feature (143)..(143): n is a, c, g, or t
  misc_feature (154)..(155): n is a, c, g, or t
  misc_feature (160)..(160): n is a, c, g, or t
  misc_feature (163)..(163): n is a, c, g, or t
  misc_feature (167)..(167): n is a, c, g, or t
  misc_feature (169)..(169): n is a, c, g, or t
  misc_feature (172)..(172): n is a, c, g, or t
  misc_feature (177)..(179): n is a, c, g, or t
  misc_feature (184)..(184): n is a, c, g, or t
  misc_feature (188)..(189): n is a, c, g, or t
  misc_feature (195)..(195): n is a, c, g, or t
  misc_feature (202)..(202): n is a, c, g, or t
  misc_feature (204)..(204): n is a, c, g, or t
  misc_feature (206)..(206): n is a, c, g, or t
  misc_feature (208)..(208): n is a, c, g, or t
  misc_feature (211)..(211): n is a, c, g, or t
  misc_feature (215)..(215): n is a, c, g, or t
  misc_feature (249)..(249): n is a, c, g, or t
  misc_feature (260)..(260): n is a, c, g, or t
  misc_feature (274)..(274): n is a, c, g, or t
  misc_feature (276)..(276): n is a, c, g, or t
  misc_feature (278)..(280): n is a, c, g, or t
  misc_feature (283)..(284): n is a, c, g, or t
  misc_feature (287)..(288): n is a, c, g, or t
  misc_feature (297)..(297): n is a, c, g, or t
  misc_feature (306)..(306): n is a, c, g, or t
  misc_feature (312)..(312): n is a, c, g, or t
  misc_feature (314)..(315): n is a, c, g, or t
  misc_feature (317)..(318): n is a, c, g, or t
  misc_feature (321)..(321): n is a, c, g, or t
  misc_feature (325)..(325): n is a, c, g, or t
  misc_feature (327)..(327): n is a, c, g, or t
  misc_feature (330)..(330): n is a, c, g, or t
  misc_feature (332)..(334): n is a, c, g, or t
  misc_feature (341)..(345): n is a, c, g, or t
  misc_feature (350)..(352): n is a, c, g, or t
  misc_feature (358)..(358): n is a, c, g, or t
  misc_feature (363)..(366): n is a, c, g, or t
  misc_feature (371)..(372): n is a, c, g, or t
  misc_feature (378)..(378): n is a, c, g, or t
  misc_feature (381)..(381): n is a, c, g, or t
  misc_feature (383)..(383): n is a, c, g, or t
  misc_feature (386)..(386): n is a, c, g, or t
  misc_feature (398)..(398): n is a, c, g, or t
  misc_feature (416)..(416): n is a, c, g, or t
  misc_feature (431)..(431): n is a, c, g, or t
  misc_feature (455)..(455): n is a, c, g, or t
tatactttgcaaganggggaaaaataaaattaaaaaaattcttttcttttcttttttaatataaaacaatataatcacaataccagaatatggnnctctncngctttatttcctatgggttnctgcnggtntcnctttncgcncgactgtgccnnttccnccntttntnccntggannnctctncccnncccttnttcttcncntncntcnatcngcgattgcgtcactttgctcgctgtcctttgctnccttgcctctncccccttttttccntncnnntcnntcnntcttttttncttggctgnttctcngnntnnttnttcntncgntnnntgtcggnnnnngccgnnntgcccnggccnnnnttttnnttcttntcntnttntggcttttttcncttttcttttgccctctnccctttttttgcttntctgcttccttggattttggcttntt

SEQ ID NO: 620163 - DNA, 347 bp, Homo sapiens
tgctttattttttatttagttcctcattcattcttccccacacaaaacttccccagcgtggcctcaacccattctaccttctcactggtacggggctgaacggtgcccccccaaaaatttacatgttgaagccctaatcctcaagacctcataatgtggctgtttggggaaagggggtctttaaaggagtgactagattaacattaggtctggtgtagtcagcctgactgtgcctaatccatcaggactggctgtccctgtaagaagaggagactaggccactcttccccccaaggcaagatggcttcagtacacagggagaagggggcatctacaaaccaaggagg

SEQ ID NO: 620164 - DNA, 152 bp, Homo sapiens
gatggcagagaggcgaacgggtgagtacatatctcggaacataaccagtcagtgggggatcactaatacgaaaggatagctaataccgcatacgatctgtggatgacagcaggagatcttcagagaaccttgtgctattgaaatggccgata

SEQ ID NO: 620165 - DNA, 152 bp, Homo sapiens
attcttttctccctggtggctggtggctagtagctggaggcggcggtcctctcccccgggtagcaggcagatgactttggcacggggtggtgtggcgggtgctggggttactccgtctgtgcgtcgtaactggctccccccgcttaaactcg

SEQ ID NO: 620166 - DNA, 1075 bp, Homo sapiens
gctgttccccctctaacctatgtctaaggaattcgacataatttgggctggttgcggtaactcatgcctgttaatcccaacacgttcgggagtgctgaaggacaagtgtgactcatctgaggtcgatggagatctgatgaccatcctggcataacagcgggtgaaatccttcgtgctccagcataaaaatagccaatcagaaaatagctgggcactggtgtcatgcgcctgtaatcccctgtagtcccagtctatctcgggaggctaacggcacggagaactccgttgtgaacctcgggaggcagacgcgttgcagtgatggcccgagatccatgtcactgcattccaagcctggagcagacagaggatgactctgtctcagagatagaaataaggagaatagatgaattttcagctttttgcacaaagttcatgctttgttgttactgtcagccctgtgaagctgtttggacaccaacatagggacattgacgagacacttcgtctaaattgttgaaccgacgatccatcagcttcacgttctggaatgtggatccactgtccaggtggttcagatgcttactttggttgaggctcttatgtccagggagacacaggtgcgtccatcactgtggcttcgcccagtcgtgtggagtcccagtggggtgcaatgatggcctccattactctaccctcgaactggctgggcttgagccaatcgggtccacctgtaaggctcctgagataccttagcgacgtgggcaggctgggggcaccagtcagtggccgtaggcgtaaatgggttaccactccccttatctgatagagtcgtcccggagcatatttcctcgaactctattgtcacccactaatttcctggtccttggactcccatggcaggtcataagcgaatattatcccttacattttcagcaagcgtcgagcggacctttttccgaacccaggcatttggggccacggcctattatgccccgcaacatttgggaagcttaaggttgggcaagatccctttaaggtcaaggaattccccccccgccgcggtagcctagtgaac

SEQ ID NO: 620167 - DNA, 335 bp, Homo sapiens
gttcgagcctgggagaaagtgagagcttctcaaaaaaaagtattaggggcctgggtgcatgtggctcacacctgtaatcccagcactttgagaggccgatggcgggcaaatcacctaaggtcaggagttccagaccagcctgttcaacacagtgaaaccccatctcttctaaaaatacaaaaattagccaggtgaggtggcgcatgtctgtaatcccagctgctcaggagtctgaggcaggagaatcacctgaacccaggaagcacacagattacagtgagctgaggtcgcaccactgtactccagcctgggcaacaagagggaaactctgtttc

SEQ ID NO: 620168 - DNA, 408 bp, Homo sapiens
  misc_feature (11)..(11): n is a, c, g, or t
  misc_feature (40)..(40): n is a, c, g, or t
aggcactcggntttcaaccacttatccaaggaatcctcancagcagcccctctttaagaggtaagcactaaggccctaaacatgaggttagagacactattaaaaagcatgttctaggcagggtgcggtggctcaggccagcaatcccagcactttgggagacctaggtgggcagatcacttgagatcaggagttcaagaccagcctggccaatatgtcgaaaccctgtctctactaaaaatacaaaaaaattagctgggtgtggcagcatgcacctatagtcccagctactagggaggctgaggcaggagaatcacttgaacccgggaggcagaggttacagtgagccaagatcgccactgcattctagcctgggcaacaagagtgaaactccatctcaaaaaaaaa

SEQ ID NO: 620169 - DNA, 274 bp, Homo sapiens
aagtcgccttggtcggccgccgagttgtcatcgttacgtggtttgcttccttcccgtccggtcgcagcactgatagccgacgcattcgcaaccgcgatctgtgcccaggccgttggtccgattgaggatttcctggaccggatcgaccttcgaagagtcgatcgcgatcgcgccgagcttggtggccaatgcgagccgatcggcatggctgtcgaccacgaagatctcggatgcgcccttgatcgccgccgaatgtcgccgccatcagcccaac

SEQ ID NO: 620170 - DNA, 575 bp, Homo sapiens
ggctaatcttgaactctcaggctcaagcaatcctgcagactgtgccccccaaagtgttgggattacaagcgtgagccacaaaaacagaaagtaccagaaagcacagaacctcaggttgtcacatttctagtggtgctaagatggatcagtaggtttatggggtgtcaacctgatcctgccattatagggttgcctatcaaccattcaccttatgggtttagcattcattggtgatgattacacggattattatttcagtgatgctcaaactttagcattcatcagaatcacctggaggactagcaacttagaatgttggaccccacccccaggaatttggatttctaacaaggttttaattagtgctaatgttgttagtgtaaggaccacactctgagaaccacaatatgatatcattagaggttgctaatgatttgataggttgcatttcttctgagataagttttttcagtgaagatagtgtatatgtgttatataccagatttctggtgagatatccttttggtttttaggatttgattcagactgttgcagtcatgattgtgtttgtgtct

SEQ ID NO: 620171 - DNA, 202 bp, Homo sapiens
cccccccgaaggggccgggggctggtgtggggggggccccccccccgcgggggggttttttaaccccccttttttggggggggttgcaaaggtttccccggccccggggccccccctgggggttttttggggggttgccccccccgggggtttcccgtttttttttttttggggaaaattttttttttttttttttttttta

SEQ ID NO: 620172 - DNA, 955 bp, Homo sapiens
  misc_feature (1)..(1): n is a, c, g, or t
  misc_feature (324)..(324): n is a, c, g, or t
ngagaggaacgagagacagacagaacacgaagcttcccgaagtgcgcctatctaccgagcaaatcgcccgccgtggaatctggcgggtgttcgaccacactggcgccgttgaattacgccgccgtcgttaacaatgctgaccgccgcgcatcacacggggtgcgcgccccccgccagagccgttgtggaacacaaggggtgaaacccgccaaaaatggggggagaacccacccccactgggtgtggaacccgtccagaaaaaaagggaacaaaccccacacagcaactaaggggggagaacacgcccccccccacagcaggggncgttcaacaccacataacagcccgggcggggaggattaagcaaaacaatttgtttgcagcgcggggaccaagttatcaagagttgtaaaaattccgctccagcctgttccgtaaattgtcccacggcccgtccagatcccctccgtgggattactaaacaggggaacgcccataaatttggggatatgtgttaacgagggatcttacacacccagtatgctgtgggcgcgcagtctacgtttctcccgaaaattccactgcgcgcactgggaacaaacaacagaggaccctctgcacagttctaaaaaaatattcttgaacgccccacacatcttactccccgttattagttacggctaaccattagaataattgctccttatttcactgaaacacaaagtacatcccgatatccaacaccagggtcccgcaggtctatgatataacaagacccctcttggtatatttcctctaaaaacacataaaaaatgtataaaaaaaatgcactggacacactcaagccattattataatacattgccccactaaccacaatatgccgcacattaaagttttggaggaaatacccccggccctcatgagccccaaaaaccccaacgcccacaaaaca

SEQ ID NO: 620173 - DNA, 184 bp, Homo sapiens
  misc_feature (23)..(23): n is a, c, g, or t
  misc_feature (146)..(146): n is a, c, g, or t
  misc_feature (160)..(160): n is a, c, g, or t
tgtggcgcgcgcaagaggcgtgnggcggcaatgtagggcattggatccgaagtgcgagcgccatggtggctcctcctgtttttcagaagtggcggctcagcattggtttcgtttttggaagctttattggaagctggtataagganggccgcagacgatncgaacaagacggcctcccggggtc

SEQ ID NO: 620174 - DNA, 279 bp, Homo sapiens
  misc_feature (147)..(147): n is a, c, g, or t
agagtctttctccttaaaaatatggtggcaggagtgctaacaggtatcatttcttgatcaggaacaagaaactccttcaggaaactcaatttcctgggttcctggttaaccttatcatgtaaattctttttatttggtacacctgtntactaattataattgattgctacttatgccaagggagcatttcccaggcatgcctcatctatttactaacaacaaagtatgcttactttatttacatagtgccacgggtttctcttttttcttctctttttt

SEQ ID NO: 620175 - DNA, 736 bp, Homo sapiens
  misc_feature (337)..(337): n is a, c, g, or t
  misc_feature (345)..(345): n is a, c, g, or t
  misc_feature (373)..(373): n is a, c, g, or t
  misc_feature (376)..(377): n is a, c, g, or t
  misc_feature (408)..(408): n is a, c, g, or t
  misc_feature (418)..(418): n is a, c, g, or t
  misc_feature (438)..(438): n is a, c, g, or t
  misc_feature (464)..(464): n is a, c, g, or t
gatccagtgtcctggtatcaggcctgcggggcctgggcgtggagatcgctaagaacatcatccttggtggggtcaaggctgttaccctacatgaccatggcactgcccagtgggctgatctttcctcccagttctacctgcgggaggaggacatcggtaaaaaccgggccgaggtatcacagccccgcctcgctgagctcaacagctatgtgcctgtcactgcctacagctggacccctcgttgaggacttccttagtggtttccaggtggtggtgctcaccagaatccccctggaggaccagctgcgagatgggtgacgttcatgtcacacaccgntggcatcnagctggtggtggcagacacgcggggccngtnngggcagctcttctgtgacttcggagagaaantgatcctcanagattccaatggggagcagncactcagtgctatggtttctatggtnaccaaggacaaccccggtgtggttacctgcctggatgaggcccgacacgggtttgagagcggggactttgtctccttttcagaagtacagggcatggttgaactcaacggaaatcagcccatggagatcaaagtcctgggtccttatacctttagcatctgtgacacctccaacttctccgactacatccgtggaggcatcgtcagtcaggtcaaagtacctaagaagattagctttaaatccttggtggcctcagtggcagaacctgactt

SEQ ID NO: 620176 - DNA, 325 bp, Homo sapiens
aaaggacgctatcagtcgaaccggtatcgaatcggtactagaactcatggcgggtgtgaacgtgagagattggataccgttccagccattgtttatgtgacgcgcttcacccttgagccggcgtttgatcgtggctggagtacaggccgcggtacccgaggacaatgcattgtaccgaccatgttctttttgcgagccctgtgatcgctgtgtagcgtgacgagggttcacggcccctgtttaaaataggtgcattaatggcaccaacgagaaatttaatgaccgatgttgtgagttatccaaaaggcgacacgcgggttaactt

SEQ ID NO: 620177 - DNA, 207 bp, Homo sapiens
  misc_feature (170)..(170): n is a, c, g, or t
gtagcaataggctataacatataccgaggtataggctacactagctaggttcgtgtaagtacactctatattagcacaacgataaaattaactagtgatgcatttttcagaatgcatccccatcgttaagtgacacatgactgtccctcagtatcactggaggactgggnccaggacctgacctggtggtaccaaaatccatgagcg

SEQ ID NO: 620178 - DNA, 125 bp, Homo sapiens
gcgcggtgcgcggtggggtctcatcccccgcctggtctttctcctgcaatacggtctttgcttgtatgaacccatttttaggcccagtctccagcagtggccccttttgtttacggcttgcttgt

SEQ ID NO: 620179 - DNA, 169 bp, Homo sapiens
  misc_feature (109)..(109): n is a, c, g, or t
tgatagctaggtggagtaaaaaaaaaaaaggttttaaatggagtcaaatttataacaaaaacttagggtgtaatcaaaggcaaatacatacctcaggcatgccagcggnaggcaaaataatggttaatagaaggttattaaaaaataaaagtttttctggaatgatata

SEQ ID NO: 620180 - DNA, 247 bp, Homo sapiens
tcgctaaccaggcaccgcagtgctatttacagacctgcagggctccctcaaacgaaactatttctggcataatatgtctgacttcttttgaggtcgcacgactaggctaatgccatttacgatctgtaaaagctgtttgaagagtccaaggccccatgttaacacgatttctggatcctgtaacagtatgttacgtgctccacaggctgagcttctggaggctcaccgcctcagcaggttgtaaaca

SEQ ID NO: 620181 - DNA, 336 bp, Homo sapiens
atcagaacataggctctgcagaacaagcccaagaaggcggccacgactacatgtgacatcgataaagttgatgagttcatgcaggcccttgctgaccagaaagagcttggggaggagatttcaacagccaattcgaaaacctgtagggttcggagacacgtctgacgaggatgagctcatggcggaatacgaagcactcgaacaggaggaaccaaacaagaatatgctggaagtcagtggccccgacaacagtcactctccccaatgttccctctatagccctaccatcacaacctgacaagaagaggaagacgacgacatgaacgctttggagaa

SEQ ID NO: 620182 - DNA, 388 bp, Homo sapiens
  misc_feature (141)..(141): n is a, c, g, or t
catgatgttcagtggccagcgtctccagtgcttctgacaagattttgtttttttcttgctctcgttccaatttaaaattcctcacctgggccagatccgaggactcccggtgggcgctccaccctgcgctcctcgcaagcntccacggaatgcgctcggcctgctcctccgcctcccccctagtcgagccgaggcgagccgatccgggaggcgcgactcagggcggcccgcaaggtctccctaagtcacctttcggcagtcctcccctggctccggccgggcagcagcgccagccttccccagcgaggtcgggcatgagcgttgtcccgcctacggcccagagacattcccgctgccgtcccgcccgggtcccagaggtctggctgcc

SEQ ID NO: 620183 - DNA, 134 bp, Homo sapiens
aaactaggctcctatgccccctgatctgattaccttcacggaagggaagcggatctaaccacgctatgccctctggttctgtagtcgggggagtcatggccccgggaccagccgctggaccaagaggctcgtga

SEQ ID NO: 620184 - DNA, 200 bp, Homo sapiens
agacctttgttagatgaaggggtaggcaccagattggtctggaatctgtcaagtcaacattcaggactccatcaatatctcacggaagcagtgatggaagacacaatctggactaataaggcggttaaggttagtgtacgttgagcgctcaatatcgaggtttctacgacagatgtcatagatggcctcatcctaccaaa

SEQ ID NO: 620185 - DNA, 750 bp, Homo sapiens
  misc_feature (516)..(516): n is a, c, g, or t
cgaagaacaatgtgttctccagcgggcaacacccgccggagtaaagactgtggtggcaagaaagccacacctgtggggtgaaaaacgcagtgctccccccccgcgcggtgtagtggggaaacacactgttccccacacagagcagtttggcgcgacctatacacagccgtgtggctgcacaaaaatgagggttctcctcgccccccccccccggcttgtcgcctaagtagtgggtgtgctttctcgctccgcttcggcaggcaccgccgttgcaagacaccactttgggcgcacaacggataaacatggggaaaccgaattgctgttcaatgggcgcccaaagtctctttttcctgaagcggttgggtcctttacggttagggagcatggtataggttgcccgcctctcctcggtcaccagatggaagaagggcttgcttctcacataatagatgatgagagacgcgactcgcatacattctctcatactagcgcccgctcgcgactagtaggttntctcacctcgccgcttctgttcgatctatcgccgcctttagacggcttttcgccggcggcccactttctgtaactacgcccggttcctcccttatttcaaacagcttacgtccccgcgtatctaatgaattacgccgcggcgcatattgtcttccaattatggagaattatttctatcgccctatcttccccaataaaaggcgacccaactggaagatcaataacaaacaaact

SEQ ID NO: 620186 - DNA, 280 bp, Homo sapiens
tgaggaccccgtcaaccctacactgaacatcttcaaagcacatcgtatgtacaagagatagactaagaaacaagaatgtgttgacggagatccaaacttcagtgagtgatagtgcctctcacacagtcttccgactgtgtactcaggtaggagccacttcataatcgctgctactggcctatgttgcggaatactttgccaggtacttcctgaaatcgtgtagaaatcgaacgttcacatgtctacatctgaaaataccatcataactatgtaactttga

SEQ ID NO: 620187 - DNA, 227 bp, Homo sapiens
tgtataggaatagccacattgatagtgctacactcgctcctctccgccaatatttttataagatagtagttggttcttctatagggtgccgttgtaagttgaatatatgcctatctagttccgtcaacaccaggcggcattgcttaacctcccttctgtgtatgataattaaagtataggcttcttcctttcacctctgtttcctcctccttctcatgtcatacata

SEQ ID NO: 620188 - DNA, 540 bp, Homo sapiens
  misc_feature (47)..(47): n is a, c, g, or t
  misc_feature (116)..(116): n is a, c, g, or t
  misc_feature (186)..(186): n is a, c, g, or t
  misc_feature (233)..(233): n is a, c, g, or t
  misc_feature (235)..(235): n is a, c, g, or t
  misc_feature (243)..(243): n is a, c, g, or t
  misc_feature (245)..(245): n is a, c, g, or t
  misc_feature (262)..(262): n is a, c, g, or t
  misc_feature (265)..(265): n is a, c, g, or t
  misc_feature (286)..(286): n is a, c, g, or t
  misc_feature (303)..(303): n is a, c, g, or t
  misc_feature (350)..(350): n is a, c, g, or t
  misc_feature (375)..(375): n is a, c, g, or t
  misc_feature (438)..(438): n is a, c, g, or t
  misc_feature (478)..(478): n is a, c, g, or t
aaagctttattgagactgaacaaaggctgaatacagagatccaagcnatgaggagtacataaggggtggggcctataagccaggctcggaaactttccagaaaaacctagaaagcnctactaggaggaagtaaacgacctaatgtataaataagatcccagcatggacaagggcatgaatatagcngtatggggacacgtggctatatatagaaggaaataactgtatagctntngcaatgtngnctgtactcccctaaacnctnaaccaaaggttccaggcccanaagaaaaggccactagnaatccatgcaaaaagggtaaaagcaggacaatacccagccttccatnaaataaaaacattatctataaactnactgcttaaaaaaaatgtataaaccaacaaacctaaaaactgcaaaaaagtatggaaaagtanaaatatagtaaaaaataaaattccaagaaacccataaaanaataaactaatgaactaaagtactaactaatctataaaactttctaagaaaaggcataagta

SEQ ID NO: 620189 - DNA, 1988 bp, Homo sapiens
gtcggtaggctccacgacaaaagtcaacccttctgtaaatcacctgctgtggttatgatgctctgagttcaatacgtctgaacctttgctgtctatggatctgctctaaaccttatagcctgcttatgggggaaggtgacgccttctgggccccatctgtccttcctcacagcaccctcagcaccttaagccaccaccctcagccacaatttggcagaaggatggagtccaaggtctcagaaggtggcctgaatgtgaccctcaccatccgcctgctgatgcatggaaaggaagttggaagcatcatcgggaagaaaggagaaactgtgaagaagatgcgtgaggagagtggtgcaaggatcaacatctcagagggaaactgcccagagaggattgtgaccatcacaggccccacagacgccatcttcaaggcctttgccatgatcgcatacaagtttgaggaggatatcatcaactccatgagcaacagccctgccaccagcaagcccccagtgacgctgaggctggtggtgcctgccagccagtgtgggtccctgatcggcaaaggaggctccaagatcaaggagatcagggagtccacaggtgcccaggtgcaggtggctggggacatgctgcccaactccacggagcgagcggtgaccatctcggggaccccagatgccatcatccagtgcgtcaagcagatctgtgtggtcatgctggagtccccaccgaaaggtgccaccattccctaccgcccaaagcccgcctccacccctgtcatttttgcaggtggtcaggcctacacaatccagggacagtatgccatccctcacccggatcagttgaccaagctccaccagttggccatgcagcaaaccccctttcctcccctcggacagaccaaccccgctttccccggagaaaagctgcctttacactcctccgaagaagctcaaaatctgatgggccagtcatcaggtctggacgccagcccaccggccagcactcatgagctcaccattcccaatgatctaataggctgcataattggacgccaagggaccaaaatcaatgaaattcgacagatgtctggagctcagatcaaaatcgccaacgccacggaagggtcctcagagcgtcagatcaccatcacggggaccccggccaacatcagccttgcccagtatctcatcaacgccaggctgacgtccgaggtcaccgggatgggcacgctgtaatcctacccagcacccttcccccgcgtcacccacctgccagagcctaaggcccccggctctcgcactctgtacagcccaccttccctgcctcacagataccaatagagaggttttcttaattaacaaaaggacgtatgccatggagaaacacacccgcgcacacagctgctctctacagaggctgcaggctccgccgagtcccccctcagtgttattttatttatgacttacgctcccgtctgcccatgcaccggcatgcagtggtaattattttagaaatattgttccttggtgtcagcgtagctgtctgtcttaggagctgggtcggcgttccgacagcacttcctgtccgcccttctcctctgccatccagaaccgtccagaactgttgcctgagacccctcctctctcacacagccctgccatgctgactcggtttcccctcagagccattgttgtctgggctcgagtttctgccccaggttgtgtgctggaatcggggggtggctctcctgccacccatggggagcgccaggagaggagggtcatggaggatgttggggctctgaccccaggagtggggtggagggcggagcctgctggaggccctgccttcacagagatgccgcgtgctgggaaggctcttggggtcccctgagcgtcttccagggtggctggagagcacagacgcgccagggagccccctctgtgctcctcagagttcaataaatgtcgtggcccctcctc

SEQ ID NO: 620190 - DNA, 1913 bp, Homo sapiens
gtcggtaggctccacgacaaaagtcaacccttctgtaaatcacctgctgtggttatgatgctctgagttcaatacgtctgaacctttgctgtctatggatctgctctaaaccttatagcctgcttatgggggaaggtgacgccttctgggccccatctgtccttcctcacagcaccctcagcaccttaagccaccaccctcagccacaatttggcagaaggatggagtccaaggtctcagaaggtggcctgaatgtgaccctcaccatccgcctgctgatgcatggaaaggaagttggaagcatcatcgggaagaaaggagaaactgtgaagaagatgcgtgaggagagtggtgcaaggatcaacatctcagagggaaactgcccagagaggattgtgaccatcacaggccccacagacgccatcttcaaggcctttgccatgatcgcatacaagtttgaggaggatatcatcaactccatgagcaacagccctgccaccagcaagcccccagtgacgctgaggctggtggtgcctgccagccagtgtgggtccctgatcggcaaaggaggctccaagatcaaggagatcagggagtccacaggtgcccaggtgcaggtggctggggacatgctgcccaactccacggagcgagcggtgaccatctcggggaccccagatgccatcatccagtgcgtcaagcagatctgtgtggtcatgctggaggcctacacaatccagggacagtatgccatccctcacccggatcagttgaccaagctccaccagttggccatgcagcaaaccccctttcctcccctcggacagaccaaccccgctttccccggagaaaagctgcctttacactcctccgaagaagctcaaaatctgatgggccagtcatcaggtctggacgccagcccaccggccagcactcatgagctcaccattcccaatgatctaataggctgcataattggacgccaagggaccaaaatcaatgaaattcgacagatgtctggagctcagatcaaaatcgccaacgccacggaagggtcctcagagcgtcagatcaccatcacggggaccccggccaacatcagccttgcccagtatctcatcaacgccaggctgacgtccgaggtcaccgggatgggcacgctgtaatcctacccagcacccttcccccgcgtcacccacctgccagagcctaaggcccccggctctcgcactctgtacagcccaccttccctgcctcacagataccaatagagaggttttcttaattaacaaaaggacgtatgccatggagaaacacacccgcgcacacagctgctctctacagaggctgcaggctccgccgagtcccccctcagtgttattttatttatgacttacgctcccgtctgcccatgcaccggcatgcagtggtaattattttagaaatattgttccttggtgtcagcgtagctgtctgtcttaggagctgggtcggcgttccgacagcacttcctgtccgcccttctcctctgccatccagaaccgtccagaactgttgcctgagacccctcctctctcacacagccctgccatgctgactcggtttcccctcagagccattgttgtctgggctcgagtttctgccccaggttgtgtgctggaatcggggggtggctctcctgccacccatggggagcgccaggagaggagggtcatggaggatgttggggctctgaccccaggagtggggtggagggcggagcctgctggaggccctgccttcacagagatgccgcgtgctgggaaggctcttggggtcccctgagcgtcttccagggtggctggagagcacagacgcgccagggagccccctctgtgctcctcagagttcaataaatgtcgtggcccctcctc

SEQ ID NO: 620191 - DNA, 699 bp, Homo sapiens
taagctgattacatatagaggtttattttatgatctatataaacgtgcacgagtaatttaaaacctgcattgggattgattggaatattgtcctaaattaattaaatcttgcactgttttgaatgcatctgctatttatacatctgcaagtgggtatgtcataaggagtcagattatctttaatttaaaatgaatacttagttttaccttttgttatttttgttaatttgttttataaatgtttcaagagttatagcaaattgatttctaattttatgctattacaactgatgtaaatggtagttcagttttgtgagattaaaaaaataaagcacttattctgaatttttttgaatcgattttcaattcattttcatttagaatatagttgaaaaagctgtaatatcagttttgctagtacaaagaccttttttctggtgtgcaatgacgtttcacttataaagcttacctccactttattgagcactacataatttacagatatgcgtcgtatgggcaacaaagcaagtggttcccatatgctaaattaattgtatttccttttgagcagattgatatctgtgtccttataaaattcatactattggaaactacctacttactctttggatggactgggctgtcaatctgtaaaaataggttccatccaagtttattcctcatgaattacggtaacaa

SEQ ID NO: 620192 - DNA, 227 bp, Homo sapiens
gatgggcgttcagaggatccccgcgtaatccgtaccacacacacctgggaagggcgtggacagaaatggaagattcccacacattagtgaccgtcgatgggtgaatggtgggacacctctcggagccactaatgaagccgcctggagagacgaagtgcctgggagttggtgcgagcacttttggccccaagtgagctgcggacaggtgctgggtgatgctggcagaa

SEQ ID NO: 620193 - DNA, 221 bp, Homo sapiens
  misc_feature (30)..(30): n is a, c, g, or t
  misc_feature (32)..(33): n is a, c, g, or t
  misc_feature (36)..(36): n is a, c, g, or t
  misc_feature (39)..(39): n is a, c, g, or t
  misc_feature (41)..(42): n is a, c, g, or t
  misc_feature (50)..(50): n is a, c, g, or t
  misc_feature (61)..(61): n is a, c, g, or t
  misc_feature (63)..(63): n is a, c, g, or t
  misc_feature (65)..(65): n is a, c, g, or t
  misc_feature (68)..(68): n is a, c, g, or t
  misc_feature (150)..(151): n is a, c, g, or t
  misc_feature (153)..(153): n is a, c, g, or t
  misc_feature (155)..(155): n is a, c, g, or t
  misc_feature (157)..(158): n is a, c, g, or t
cagtactggtgcctgagctgtccccttctncnngtnccncnnctgcttcntgcttctgccncntnctncttctgcttcctgcttctgccgtctacggccataccaccctgaacgcgcccgatctcgtctgatctcggaagctaagcaggnntntnannactcactaggtgaactgctgttgacgaaaaatattgccatcattgtggggcagaagcaggaag

SEQ ID NO: 620194 - DNA, 1563 bp, Homo sapiens
gtctgacttggtgggagagtttgcgctggcgggcactctgtggtgggtaaagtgttcgttagtcgccggactttttggggttgggcagattccctcggtgttgtctggtaggtgagtggtgttcgggtgtttgtctcgtgtggcgaaccatgcggctcccacgacggcacgggtgggtggctttgagtcggggggacgaccgaggtttggtgtcggcagtgttggagagagcacctttcgtggcggcccgcggtggcgcgccttctctttgagttgttgtaggtggtttcctacagctgttgaagggcgcgcggctatctggtgctgccgcgtggtttgtcccccgcgattttataggtggcttcccgcagagattgtggacaccagtcaggcgctttgttgtcgatcagtaagagaccggctcgatgtgtccgcctttgctgggttttgtgtgtcccgttgtctccgttttgggtcttctcccacacgtgtggggcgggtaatatccccctcgagaagttgtgagcgtgttttcacccttgtctgaggtttctcgcctgttcgaccgtctgggggtgttggagggtgagctgcctcgccttggcaagtcccagcggacgaaatgtttgtgggggggggggcttatataactaacccctgacccgccgttttgatcaccctgctcgatcgtcgtcccagtttaaggaacagagtttaggatatgcacacatctgtatgggtggaagatattaattaggtgtagattcctctagagtttatagttgtcttcatatagcggggctttgctgatattaggagacctccgttcaccgggagccatatgttaccctcgaatgtaatgctctgagagctaggagctttttgtgcgaggaactccacagctttattatgggagttttattttggtggttgcgtccgctatgagctttgtgtgattcctcggggagcgccacactgtggagccacatggcccgcccctttcacgagaccctcttatacgctcgtgtaagtataggcacgttgggctggtatacgccaccacccagcagcccacgtgagcccacgagtgagttacccggctctgtttagggctccacagcctggggccctcgagcgcgtattgtgctgtcccaggagaagtgagactcgaggcccgtatagccggtaactccacgcccacgagcccacagaccgcgaagaagggaaagagagtaccaccacgctctttctggaaagtctataaggcactttcttggttggtatgagaaaagtggtgcccacacaagcctttcactggaacgcagagttattatggttcttatagagttatgtctctcttcttgttctggagttccactaacttgcgctataatataccctgagtatatatacctcggtttttccacatgtatactcgccttctatggagaagaacaaatgtacctgttcacatgctgagcaccacgatatttccgtctgcctggttaaagttttataatcttactaccaaaataatataactgggctggtttataatgggta

SEQ ID NO: 620195 - DNA, 321 bp, Homo sapiens
  misc_feature (250)..(251): n is a, c, g, or t
  misc_feature (253)..(253): n is a, c, g, or t
  misc_feature (255)..(255): n is a, c, g, or t
  misc_feature (257)..(258): n is a, c, g, or t
cttcctgcttctgcctcagggtctttgctcctgacttcctgctgtgaactacttttcctctaactctgcttcctgcttctgccatcagctgtggtttattcaaactgcttcctgcttctgccaaatggctgcttcctgcttctgcctgcaaaatggctgcttcctgcttctctgcttcctgcttctgccgtctacggccataccaccctgaacgcgcccgatctcgtctgatctcggaagctaagcaggnntntnannactcactaggtgaactgctgttgacgaaaaatattgccatcattgtggggcagaagcaggaag

SEQ ID NO: 620196 - DNA, 301 bp, Homo sapiens
  misc_feature (230)..(231): n is a, c, g, or t
  misc_feature (233)..(233): n is a, c, g, or t
  misc_feature (235)..(235): n is a, c, g, or t
  misc_feature (237)..(238): n is a, c, g, or t
tgtgtttgccagttctctctgccaggaatgcagcttcaccttctcaaagtcttcccaggcagccctactgctgaccacttccctccccatctgcactccctgttccctctctactttatatttttgcagatcacatcaaccattctcccctctgcttcctgcttctgccgtctacggccataccaccctgaacgcgcccgatctcgtctgatctcggaagctaagcaggnntntnannactcactaggtgaactgctgttgacgaaaaatattgccatcattgtggggcagaagcaggaag

SEQ ID NO: 620197 - DNA, 1058 bp, Homo sapiens
  misc_feature (85)..(86): n is a, c, g, or t
  misc_feature (139)..(139): n is a, c, g, or t
  misc_feature (171)..(171): n is a, c, g, or t
  misc_feature (509)..(509): n is a, c, g, or t
tggggattttgaatctcgccgcaggactgcacgccgtgaaggtgtcgactcacctcagcacagggcatttggagcttcttcctgnnccccggttcggcggtggcccgggctgcaaagagcaagcggtggccacgctggnggaggcggagaaacggcgccctgcacccggcnctcgggggaggctcgcttaagagaaccaggcagacggcgactaacccacagaaacatcgctgcggcgcgttgggtgggcccaacaggttaacttttttgtggggagaatcccttcgacaaggcccaagggggagaccccctggcagaatcaaccgttgaaggcgcacaaggccctctggttttggcttccctgaggagactccatcatagcggcggccaagaccaggggagcttggtttcccacttaacctcggaaggggaggaatgcctggaggaccacaggggcttgagagggcttccttggccgcccatgtggagggctctataaaccaaatttngtggccaacctcaagaggaggttcccagaaccacctctgcagggaggcagttaagggacaaactaacagggtctccgggagttgggtaacggcttccagagaagggaccgccctggagttgggggacacattcaaagctccaagggacgtgctaccccttctgggccttctggagacgggttccaccagacaggtattgagaaatcctcgtcggacagctttgcgtgtgaaaaacacagggtccacaaacagcccgtgaaacaattaaacaaggtcaacaggggtgccggactaaattagtggagaatgcacagaggacgttccatcaattatggctcgaacacagaagatgacccagacttcggggtgccgagcgcgccacagtggacgccggaaggggcgaccaggggcggtcataccgggggcggaggggccccaggagaccgcccgaagttccctcaaggggcccatgagacgcgccacagcgaggggggacctggggaacccaacacggaggagtagatggcccgacgggggggcgccccacaa

SEQ ID NO: 620198 - DNA, 157 bp, Homo sapiens
gctcttgcactcaccagtagactctgtcgcctcttcttctggcggtactagtgctttcttcacctttattttgctgtaccatcttctctccggaggatcgtaaggttgggacgggcagaccacgagaacacctgagatggaggtctattggagagcc

SEQ ID NO: 620199 - DNA, 215 bp, Homo sapiens
  misc_feature (10)..(10): n is a, c, g, or t
  misc_feature (38)..(38): n is a, c, g, or t
  misc_feature (141)..(141): n is a, c, g, or t
  misc_feature (169)..(169): n is a, c, g, or t
actcaccccnccacacacactcagactgcgaccagacnaccaacaaacctcacctgcacatctttggggcgtgggaggaaaccagagtgcccagaaagctctccgaccgggaggacgtctagacggtgcacagacagtggnccccagccgggaatcaatttttttctcnaatgttataacaaaatgacattgaataaaacgatgctatcaaggaa

SEQ ID NO: 620200 - DNA, 290 bp, Homo sapiens
ttacccgaggcagtgcatccgtagtcatgtcgtcgctagtatccagggtgcagcgttatagagggcgggacactcactcaatatgaaggcaatactgagaggtggaggaaatggctcaggtgccaataagcacatgtagacgagttcaattctgtatcaaagttcaaactatttaatacaaacaacctatggatttctcttgcagtcatgttaaaagactgcaggagcaaaatgccattgacatggaactcatggtgaatgcaaagacttggctggaggccacggaggct

SEQ ID NO: 620201 - DNA, 166 bp, Homo sapiens
cccagcggggacacattcacttttgtagttactacaaagatatagacgattgaatgcatattgcccgagttctccccaaacatatgtttgggggagaaccccccatataacatctcactcgattagatcatcttttcctaatgatttcaatagatagacggtgtac

SEQ ID NO: 620202 - DNA, 795 bp, Homo sapiens
  misc_feature (14)..(14): n is a, c, g, or t
  misc_feature (194)..(194): n is a, c, g, or t
  misc_feature (208)..(208): n is a, c, g, or t
  misc_feature (210)..(210): n is a, c, g, or t
  misc_feature (231)..(231): n is a, c, g, or t
  misc_feature (339)..(339): n is a, c, g, or t
  misc_feature (430)..(430): n is a, c, g, or t
  misc_feature (459)..(459): n is a, c, g, or t
  misc_feature (486)..(486): n is a, c, g, or t
  misc_feature (488)..(488): n is a, c, g, or t
  misc_feature (504)..(504): n is a, c, g, or t
  misc_feature (537)..(537): n is a, c, g, or t
  misc_feature (539)..(539): n is a, c, g, or t
  misc_feature (553)..(553): n is a, c, g, or t
gtgagaatggcggnttctcaggcggtggaggaaatgcggagccgcgtggttctgggggagtttggggttcgcaatgtccatactactgactttcccggtaactattccggttatgatgatgcctgggaccaggaccgcttcgagaagaatttccgtgtggatgtagtacacatggatgaaaactcactggagtntgacatggtgggantngacgcagccattgccaatgcntttcgacgaattctgctagctgaggtgccaactatggctgtggagaaggtcctggtgtacaataatacatccattgttcaggatgagattcttgctcaccgtctgggngctcattcccattcatgctgatccccgtctttttgagtatcggaaccaaggagatgaagaaggcacagagatagatactctacagtttcgntctccaggtcagatgcactcggaaccccnatgctgctaaagattcctctgaccccnangaactgtacgtgaacncacaagtgtataccaggcatatgacatgatccncnctggggaaccaggntgatctcttccagagggcactatcgcgaccaggtgcatgatgatatcctcatcgctcagtgcggctggccaagaaattgaactgctcattgctgtgtgtcaagggcattggaaagatcattgcaagtttcacccagtgccacaagcagtaacaggctcttgcagaattcaccctgtttacccggtgaagggaacgcagctaagagttggcaggtcttctacccgggggttccaggggcggac

SEQ ID NO: 620203 - DNA, 167 bp, Homo sapiens
  misc_feature (4)..(4): n is a, c, g, or t
ttanattgaaattgccaactgtaatagtgattgtctatctttactttgcagtactatcagtgttagcctcacatattttgatgctcagctgttagataaatatgtgtttaagatggttgatgttcccttggaagattgacccatttattattatataatgtcccccc

SEQ ID NO: 620204 - DNA, 741 bp, Homo sapiens
  misc_feature (14)..(14): n is a, c, g, or t
  misc_feature (285)..(285): n is a, c, g, or t
  misc_feature (376)..(376): n is a, c, g, or t
  misc_feature (405)..(405): n is a, c, g, or t
  misc_feature (432)..(432): n is a, c, g, or t
  misc_feature (434)..(434): n is a, c, g, or t
  misc_feature (450)..(450): n is a, c, g, or t
  misc_feature (483)..(483): n is a, c, g, or t
  misc_feature (485)..(485): n is a, c, g, or t
  misc_feature (499)..(499): n is a, c, g, or t
gtgagaatggcggnttctcaggcggtggaggaaatgcggagccgcgtggttctgggggagtttggggttcgcaatgtccatactactgactttcccggtaactattccggttatgatgatgcctgggaccaggaccgcttcgagaagaatttccgtgtggatgtagtacacatggatgttcgacgaattctgctagctgaggtgccaactatggctgtggagaaggtcctggtgtacaataatacatccattgttcaggatgagattcttgctcaccgtctgggngctcattcccattcatgctgatccccgtctttttgagtatcggaaccaaggagatgaagaaggcacagagatagatactctacagtttcgntctccaggtcagatgcactcggaaccccnatgctgctaaagattcctctgaccccnangaactgtacgtgaacncacaagtgtataccaggcatatgacatgatccncnctggggaaccaggntgatctcttccagagggcactatcgcgaccaggtgcatgatgatatcctcatcgctcagtgcggctggccaagaaattgaactgctcattgctgtgtgtcaagggcattggaaagatcattgcaagtttcacccagtgccacaagcagtaacaggctcttgcagaattcaccctgtttacccggtgaagggaacgcagctaagagttggcaggtcttctacccgggggttccaggggcggac

SEQ ID NO: 620205 - DNA, 152 bp, Homo sapiens
aagcacagagtcagaaagctaaataacaaaaagtcgaaactctcatgtctatcgagtaataacaagatgagagaagaaagagacacgaaacaagacgacccaacgggacattgcagaggatgggtcactgacggagacccagtagcagcgac

SEQ ID NO: 620206 - DNA, 1356 bp, Homo sapiens
tggaaacaaagtctcaccgttcacccaggctggagtgcagggtcgcgatcatgctcactgcagcctcaatctccggggcctcaagtgtgactcctctccgtgccttcagccctcccagtttagctgtgggacatacatggcatgtgcgccaccggtgttcgtggccttcatattctgtgtgcaatgtgaatgtgaaagtgctagtgaggcgcgtgagcgacccacaggaagagtatctttatccaaagagctcttgggtgtcagtgaagaaagaatgcgcggcccgtggtggaacagggaggtttccaaagcctgtggcaccacagcgccaacacaccacatctgtgccacctagtgaatgtggggtcttcccataaaagctcctcggagtctagaaattatttaaatattgtggagatacgtggagattttataaagtgtggtaacacttctagagaactcctcattctcttataactttatacgccgaagtggggcattctctcgcgcgggacacaactggtggccacaaggcgccggaaaacaccggggggcgcaagaagaaaagagccctaacctacaagagaaagcgggaaaagttatggagttgggggcgcgcgcccaagcggtgccaaataccagagatatgggccccccggccgaatatccaacacagagtccgtgattgcggggagcgtacacacagaaataccgtgcccgtgaggttgggacggtgggggaatttctccgtgggcgctcaaaggtgtgtgtactcggtaaaaacacggcatcaatccgaatgtttgtctacaagtgcatcctaatataacagaggtggggttcgggtacccagagaacctctgggtgaaacgacatgcgcactcggggcaccattcgacaggcaacaacccggtaaccgaacagggggtaacagaagttcccaattataggcgcttgccccctgagggccgcaaagacggggggggccaagatggatcccccgagggaacacacgacagcttttttaaccccaacaaaacgctcctaaaaaaatttcgcagacattgtggttaaggggaccaaagcgtggccccacatcagaggtccggtgaggaaaaaggcaccacggggggaagccttggggcgactgctacagaggccgacaagagttggcacccaaggaatttttcagaggacaagaggtcgagaccctttgaaacaagcgccgcagcgaaacttcttgttcccccacaacagtgggtgtgccccccccaacaaaaccacttgctgctggagagaagccgacccacgagctaggaatacggtcagtatatgtaacgcagctacgtcactgat

SEQ ID NO: 620207 - DNA, 216 bp, Homo sapiens
atggtgctgacacggtacttatagagtctggtgaacttaaactagagaaagctgcaacatagagtggttgggagagcatggcaggcccagtgcagaagggctaatagaagcaggtcccttgccctagacccttcaggtagccctattggtgtgaatagcgggacaccttgaggcaggcaggtgacatgggcccagagtccatggcagtgcagcagc

SEQ ID NO: 620208 - DNA, 186 bp, Homo sapiens
gctcaggttgagagaaggaagtctgattaggtgcctgggattggccaaagtgagagggagcagctgagaggtgctgaggtggtcaaacacgggaatataagtgtggagtaaggtgggaggtggaggagatagcgctatctctatcgccctgatctggaggtaacagattccagatgtagacatcac

SEQ ID NO: 620209 - DNA, 360 bp, Homo sapiens
gagcgggtctggtgcaactggtggtgagccggggagtgagggaggtgtgcagcaggcctccggtgagcaaatggacatggacaagcctgacgattctgctgatgccgccgcgacctaagtttggttgtcatctgtcttatgatcgatcaaattttcctgttattgtgtctggtaggtggatgagttttaaaggctacactagcgttctcccaagccatttcgtttgggggttggacagttagattgaggtatgcgtcttgtccagcgttgttttggtctggactaaatccgagtagaaatgttgcatgatcgaattgtaccattggaatctcataatcgaatgttgtggatgattcgacc

SEQ ID NO: 620210 - DNA, 151 bp, Homo sapiens
ggatttgctggtgcagtacaactaggcttaatagggacatggtggcttatgcatgtaatgccaccactttgggaggccaaggtaggaggatcacttgagctcagcaatttgagaccagcctgcacaacatagcaagaccccatctctacta

SEQ ID NO: 620211 - DNA, 321 bp, Homo sapiens
tctagcaggatcccaaacacgcatctcaatttctgcaaaacagactttaaaacaacaaagattaaaaaagacaaagggcattacataatggtaaagggttcaattcaacaagatctaactattctaaatatatatatacccaacacaggaacacccagattcataaagcaagttcttagagaccctaatagaaacttaagactcccacacaataatagtgggagactttaacaccccactgacaatattagatcattgagacagaaaattaacaaagatactcaggacctgaactcagcactggatcaaatatatacacaa

SEQ ID NO: 620212 - DNA, 1462 bp, Homo sapiens
ggacgcgtgggtcgacccacgcgtcgtgttgccggtgcagggagaacccctagtccccggacgaattgctcccgaaaggcgacgcggaagaagcctgaggaggagacttggaggaggactgacgtatgaggagcctagatgatgacccttgtcggagcagactatgggggcctgacggaaattgttcccggtgagaggggtccggctccgcggccggggcgcatttttgatctattcgcctcttgggtggctgcagaaggatgtacgaggttttccagggcatggcttgtgcgatagggaacaggttccctttatgatcctgggttctttcgcgttggtctttgagtacgtgagagagttgcaaagtggacgcacacagcaagcaaactgcaagccaagcaggcaaggaataccttctaaggacgcgtaactactcgggtctcttcagggagagaagtgcccaggtggctcgtaccctctactttccctgggcatcacgatcttagcagtaggtaacttctgcgtggtaaggaggctagtctcagatcgcggataaaggttgcgcacaagttccaaggtggttttggaaactggctggaatgacttgggaatctcatggatcattcaatacacttgtagcgtcaacagtgggagtctgattgtagagacaccgggctgagggcagaaattaagtcacccacaagtgtgtgttcctctgtgggcaaaggactgtctcccttttgcaccgtgtggtggctcgctccacaacaggtaattccatatcaagatttccagtggaacgtcccaagattctgtggaattaccccagggagttggtacagcccaagtggcaggacagggggttattatcgcaagtctgtggtggttacacacaggaagttcgtcctttttcaacgcaccagagatggtggccaccttaaacgtggcacagacactcttcaagggtatcacccccattgttggtgagggtatagtggaacccggatgttggtccacaaatggtgacgaagagagatgacgtttgataccccccttgtgttgaagaactaatataatagcgatagtgagttgatgatgagagggtatgaaatacttacaacgagcaaaaatgaagatgatgttagggaggaagcaggggaaaccagtgtcacccaccgacgagtggtcgtgtacaagcaacgacaaaacatggacggtcatacacacgacgggtgatgaatcaacaagggacgccacccgaagtagacaccaccaggagtatcagaagcaagacagagcaggagacagacctgcgtacaaccaaaccaccaaccaaggaggagggcagcaagtcagagaaaccggaggcacagactactaggcgaagagtgaagggaacgacagcagtggtggttaacaacacaacgagacggcccctccggcagcagaagacacacgacca

SEQ ID NO: 620213 - DNA, 90 bp, Homo sapiens
tctagaggatcaaccgccatttacaactatctgtgtaaaataaaaatgccatttccaacacctttgcgaaaagtaattgttaatgcaggc

SEQ ID NO: 620214 - DNA, 479 bp, Homo sapiens
agcctgaccttaggtgagactaaacacaagatacacaggaaggcaatacctcacagtgacacgaacagcaagcccatcggaaacagaagacagattcctaggaagaaactactttgaaatatcgtgaccctgtatgcataaaaaaaaacacaatagaaacagtagttgccaaaaacagttctatcaaatgcgcagttctatcatatgttctatttattacaactttttatttgagacggagtctccccctgttgcccaggctagtgtgcagtgtcgtgatcttggctccctgcgacctctgcctctgagtttcaagctacttgggaggcagaggtaggagacttgcttgaacctgggaggcggaggttgcagtgagctgggatcacgccactgcactcctgcctgggcaatacagtgagactccgtctcaaaaaaaaatttctgacactaaatagatcaagcccattatctaaacttga

SEQ ID NO: 620215 - DNA, 197 bp, Homo sapiens
taaagagacgactcaaagaataagtaatatataggaaactcctccagtaaataaagattatacatgcaaaagcacacagcataaccatcatactagaatggtgaaaaactaacaatcttttccatctcaggatccaggcaatacagcatagccaactatctactatcactgcccacattctcattcacccagcagca

SEQ ID NO: 620216 - DNA, 399 bp, Homo sapiens
cagaaatcggaagcacataacttgaaattgagaagttctaaatcagtgactttctaaactatacgaatttttcattatcctccatgtcacattgtaggaaatctttatagtatttgagagagaaaattctgggccatagggtgatttgtggatggaaaagccaagttagttgaagtagttttgcaagtcagctttcctggtcctgaagtatgtcctatttcagaattatgctccttaaatgcatactacaggctgggtacaggggctcatgcctgtaatcccagctacttgggaggctgaggcatgagaatcgcttgaacccaggaggctgaggttgcagtaagccgagatcaagccactgcactccagtctgggcaacagagcaagactctgtctcaa

SEQ ID NO: 620217 - DNA, 170 bp, Homo sapiens
ccaccttgaaccaccagaccacgacctgatcttcaaaaaattattattattaatttcgaataaatcatggcacctatgtgacgatttcatatcccagtcttattgatgtttgttggccaaggttagataaaaagatgttagatgaaagacatattttaagtatatgtaca

SEQ ID NO: 620218 - DNA, 350 bp, Homo sapiens
gctcgactccatataatggcagatctgatgatgcgaaggctggacctcttgcaactagccctatcgacgtggacagagcattcctagcctaatgataatgtacactgagcctatgagtctggattcatggtccacgatctcactgctactatgatgcgtagctggatgcagctaatgaccttgcgcacatacatagtgttagcaggctaatgatctgcacttactcaggggccgaacgacaggagtatggactgtcccaaccgactaggaccttatactgtacacacgatggcttcttccattctaactgaagggcctcatgtactgacgctggcctatactgctcctcg

SEQ ID NO: 620219 - DNA, 336 bp, Homo sapiens
gtaacacaccttccacaaacatgtcatacgtgcacaagtacacatgtccacaaacatgcacacatgtgcacacttcacacatccacaaacatgcacacgcatgcacacacatacacctccgcaaacatgcacacatgcatgtgcacacatacacacacctccacacatacacctccacaaacatgcatacacacatgtacacacacacacctccacaaacatgcatacacgcacgcgcacacacacctccacaaacatgcacacacatgcacacacgtccacaaatgtgcatgcacgtgcacacatacacctccacaaacatgggggatcctctag

SEQ ID NO: 620220 - DNA, 170 bp, Homo sapiens
cacgaggaggacccagagctcgctacgttgacctcctgagaccatgtggcaaccaccggagcgacccgggtctcgctcatgcggactttggcgctccactcgtgacactcgcaattctttctattttgttcgtgccacgcccagatgcatatcaaccataccttccagac

SEQ ID NO: 620221 - DNA, 221 bp, Homo sapiens
gcttaagacaaaaaataaggagagggtcatggaccccatcccagcggttagagaatctttcttaggttatatacgaactggaatgaaataactggcactttatgaggtaaaacacagacctttaccaccctatcaaaggttgagtggcccaaagagagcccccgcatggcccccaattattagagagcctcaacccatttttctatgttaaccccagattg

SEQ ID NO: 620222 - DNA, 861 bp, Homo sapiens
  misc_feature (115)..(115): n is a, c, g, or t
  misc_feature (142)..(142): n is a, c, g, or t
tgggcaaacacccttttctaagggttgataggacacctttcccgtgcggttttttgaagccccccccttggggggtgcaccaagtgatgttcgccctgcgcccccctcttttggnaccgcccctgttgtgcccacgcccagngtgtacctggccgccgcccacgcgcccctttgttggggtgtactacccccccggcggtctctcccccgaaaacggggcaataccccgccgctcgccgttttgtctccccccgacggttatcgccctccttccaacttatcgagtctccgcgacaatgttccccccgtcccgtctcctcctccgccacgactgcttgatttgcttcgtcgaccccccccgggacggttttcaagctttccctctcaccccccgggatctttagttgggggatgtccccaccaccccccggttcttctgggaaatcggtgtattaatttcgcgtccctcgactacctgtttcagtgctctcggttattcggcgccacagagtcgctggcatcaccccctcttgtagaaacctggcctctgggggacgactgccctcctgaaggcggccgctggcgggatccaacacgtcggcctggctaggacgggcgggttgaccccccccgcggagccccctccgaagagaacctacgcgccccccatatcaggcaatcgctaagaggggatgcaccacgaccgcaccaggtgcgaaatagcctccaccccagagacagaatgcagtatggccccgtggcgatacgaacgacgacgccacaaaagcacacaggtgcaacaacatacttcctgggcgcccctaaccgaccctaagctccgcgcggcgttccccaaaacac

SEQ ID NO: 620223 - DNA, 423 bp, Homo sapiens
ttaatagaaatcgacctggaaagtctggtctgcagtcagatcacgtaagacttgaatcgtttgaacaaatgaaccttaaatagcgggtgcagcatcgggatgtcctgatccaacatcgaggtcgtaaatccctattgttgatatggactactagaataggattgcgctgttatccctatggtaacttgttccgttggtcaagttattgaatcaattgaatataatatttcgctttgactgtttgaagtctaatcatagtactgctcggaagttggattctcgctccaaagtcgccccaatcgaaatttaaactagccgagtttggtaaataaaggcctgtgggtatgtaacgtactgttctagcttaataaattaacacggtccattgggtcttctcgtattggtgtatcatacccgtctctt

SEQ ID NO: 620224 - DNA, 843 bp, Homo sapiens
gccctggaaaggaaaactttcggaaagctactggtagagcaccaagcaatatcatttatgctggctgaaatggcaatgaaagtgaactagctagaatgagttaccagagagcagctgggaggtgattctggtcgtcgaaatacctattatgcttctatggcaaaggcattgctggagatatggcaaatcagttagctactgatgctgtgcagatacttggaggcaaggattttaatacagaatatctggtagaaaaaattatggagggattgccaaaaatctatcagatttatgaaggtacttcacaaaattcaaagattatgtagcccgtgaacacattgacaagtacaaaaaattaaaaaaaattactgtagaaatatgtgaataatagaacacaagccactgtttcagtccagaacaaaagaagggggtttaacgttttttccagtgaaaacaaatcctcttatattaaatctaagcaactgttatcatagtagttatactttggttaactctggtatgtctccttaaggcaggttggtctattaaaatgaggggttctttagttaccatttactgaatttagttaacttaaaaataaatagtataggactttagaataggtgagaaatctggaattatttgggcatgagaagggataaagtttcaggaggtcaaattccttgacaattgtattgggatggctgggaggaagtaattgggtaaacgtatctggcggaacatggaatgtgggtaaacgaatggtgatttatgagaaaagtgaacgatagggcgtcaaacagagcttgggcgagataatcatgaataactagatgggattaa

SEQ ID NO: 620225 - DNA, 202 bp, Homo sapiens
tagtcgacggggattacagccgtgagttatgcatccggccagaaatcagtgtttttaactggattattttattattttaatgagatggaggtctcactctgttgcccaggctggagtgcagtggtgcagtcatagctcactgtaaccttgaactcttaggctcaaatgatcctctcgccatgactcaagaatccccggtcga

SEQ ID NO: 620226 - DNA, 1045 bp, Homo sapiens
gtgctcaggtgtcgcatgagcgaagatgtgtactgatctccagtaatggggagtgcatgattcatgagtcttgtctgctgatagtgtcgcgtgcttgttatgatcctgtgtgagaagtggtcaggtgtctcgagtggtggtagctcagtattgttctcagattattggtagctccattgaatatgtccagatcatggaagattatttacagtcagaatggatattctatgatgctgtcaaatcgggtgatgtatatacagggaattatagatctctcaattaaataataaagtggcactaatatctcacaatacttgcttcagacaggatcacttagtaataaattgtccaaagtagagcatgcaagaggagggtactgacctataaataaagactcagtggtattcacgtagtagctaaagtctgtaacagtagctccccggagatgctgcgatgaaacctatgaatggtccctcctgggcaggtacgggtcagctcactgctcttgttacttgcgtatcctgccattgatagtgtgtatgcagtctgctcgtagttagtaaggtgtgactcggccttgggttggtcgcgccatgtttttgcggagtggctgatacctcgaggctcggccctttctatcttctcggcattcgtgctgttggtcggcttcgatctctctggcttgtgtgtccacctggtgtgtagcgctcatgctgggtgtctatgctagagcaacattctggtgttctgcgttcaagcatcctggaccgaggtcttccaggtcagtctcttgcccccgtcgttgcccaggatacctaccactaactggccttcagctgcccgccggagggctcatacttctttcccgaggtccccggatcgttctgagcttgatgttcttctcaccggggagccctgagagttccagcatattccaaggccatgcgttgggatgaaccgggggctggaggccatggattccttctcaggcggcaacccccccggcgggagaatgggaaagcgccccgatggccgggagacaacg

SEQ ID NO: 620227 - DNA, 389 bp, Homo sapiens
ctctatccttaatctgtcctgatagcctacatttgaccgcagttataataacatctgtaatttcaagtacaatagtacattcataataattttgaagaacgtatgacctaggaccccataatgcaatccaatatacaatttggagtatggattactttttagtgaagtttaatactaattgaagttctaaattgatcatggccagttctctgaagttctaatctcaagtatttgatcccatgtaagatacagaagggaatttttaaggcttttttggtattccaaaatattggggatctatcttatttttctattattcccctcaagtctcaattgaatattctcattttttaaaaaaaggggatttttcttaggttttttcctcacta

SEQ ID NO: 620228 - DNA, 893 bp, Homo sapiens
  misc_feature (893)..(893): n is a, c, g, or t
acgcagtgtgatcaacgcagagtgggtattacggccgggcgaatgtatgacttgcatgacctttccaaagctagaactggcgactcagcaaatatgctggaatgtgctactgggaataatggatgtgtgattacctggtcggtgaagaaagacggatggcagaactgatgccggtggggataacaacttttcagatagtgaagaaggagaaggacttgaagaagtctgtgatatacaaggtgaacctcatggactggaaaacatggaaactgagaagtttggaactcagcgtcgtagaacctcagcctgtatttgaggcatcaggtgctccagatattacaggttcaaataaagatcttccccctgaaacacctggagcggaggacaaaggcaaagagctcgaagaccaaaccctttcgctgtaaagccatgccaatatgaagcagaatctgaagaacagttgtgtgcatcacatcagagttcacagtgctaagaaaatttgtgtggaaaggagagtgcagagaagcaggcaaaagccagggaatctgggctctttccactgcaagaagaggagattcttccaagggcccattcgctgtgacgctgcggtacaatactaatcgatagatcactatacaggaactgaaaacaaccagagctggataatgagcgacgtcagggttcttgccctatcacacacgtgcgcggttctggggaacttaaaccttccgagagatcaccgtggagcgcttttcgcggcaacatgttgcctttgactaccgaagccaataatgtgtgccatcacacactaaagtttccgggcaagtaggtgtctataacacgcacgcattctgtaaagtatctgttcatcttctaaattaatcaacactgcn

SEQ ID NO: 620229 - DNA, 137 bp, Homo sapiens
gtataaaacccatttgcatgcattaggaagttttttttgggttttattcatcctgtagtgatggatttgtgcccccaacgagtaggcccttttgtactggactggttttttaaagttttttttatcccgccccccca

SEQ ID NO: 620230 - DNA, 939 bp, Homo sapiens
  misc_feature (1)..(1): n is a, c, g, or t
  misc_feature (170)..(170): n is a, c, g, or t
  misc_feature (514)..(514): n is a, c, g, or t
  misc_feature (556)..(556): n is a, c, g, or t
  misc_feature (574)..(574): n is a, c, g, or t
  misc_feature (598)..(598): n is a, c, g, or t
  misc_feature (607)..(607): n is a, c, g, or t
  misc_feature (623)..(623): n is a, c, g, or t
  misc_feature (646)..(646): n is a, c, g, or t
  misc_feature (650)..(650): n is a, c, g, or t
  misc_feature (653)..(653): n is a, c, g, or t
  misc_feature (675)..(675): n is a, c, g, or t
  misc_feature (685)..(685): n is a, c, g, or t
  misc_feature (687)..(688): n is a, c, g, or t
  misc_feature (691)..(691): n is a, c, g, or t
  misc_feature (726)..(726): n is a, c, g, or t
  misc_feature (728)..(728): n is a, c, g, or t
  misc_feature (788)..(788): n is a, c, g, or t
  misc_feature (813)..(813): n is a, c, g, or t
  misc_feature (827)..(827): n is a, c, g, or t
  misc_feature (839)..(839): n is a, c, g, or t
  misc_feature (842)..(842): n is a, c, g, or t
  misc_feature (901)..(901): n is a, c, g, or t
naaaaaaaaaacaagcggacccccccaacccccagcccccagagaaaaaagggaagaacaaaacacaacaagaaagaaggaaagcacgggggagggaaggggcgaaggcacccaagaaacaaagaacacagagagaccaacaggacgcaaggcagaacggcaaagaagancgcccagggcgcacggcaggaaggcgcaggaaaacagaaaaccccaaagcggggaaaagcgaacgggggggccacaaagaaaaccccgaaaagggagagagagggcaaaaagcagaaccaaaagggggaggggcaaaggcggcgcccaaacagaggggaaaaaaaccggaaacaaaagggcgccggcgcccccccccggccgccagcaacggggaaacacggaagaaacggaaaccaccgggagcagggcagaaaggagaaaggcgggagggggggccggccccgcaaccgggaccccaaacaacaacgcgacgggcaaaaggaaccaggcgacgccgcagcgnggaaacccagtaaggaacaccaagacaagggggctcaccgcnaccagacagaaaccagcngtgcaaaaagatgcaggaatccgnggaaaaaanggagagggagagccgnaagacacaggaaacccaaaacgnaagnacnaaagagaaaaagaaaacacccntcactcaacnanncantataaaggaaagagcaaaaagacagtcaaaaccancngcgtcgagcagcagcacagcccagcaaaacaggcataccaacaaaccgaaagcaaacacncaggaaagagcctctgggcccctcncaaaagagaccccncccagaccggancgngcccccaaaggagagaccaaagcaatataaccacagagacggggacccccgagggaggngagagggaagggccaagaagacacaaaaaacaagaccg

SEQ ID NO: 620231 - DNA, 390 bp, Homo sapiens
gccccgtcacaattttaaaaccccccaactgaaaatgtttacaaacccccctgaggattctgaaagatgtgaaggcatgtatctgtacaaaaaaatccaggttctgtttgaaagaaatgcgtctcttcatccaaaacggttcaccccagaggccatgccaactcacagaaatttatgttttctgaagactccaggaaaaccagtttccatgccacattttgtacaggccacatttagaatgattgccgcagaaagttctacggagcttaaggagtgtgctgaaccatcaacaagaaagaacttgatgaattcttttgaacaaaagataagtcgtttgtaaaaacaaagaaaagagctcctgaaagttaaccagcattggtttcggcaatt

SEQ ID NO: 620232 - DNA, 568 bp, Homo sapiens
  misc_feature (131)..(131): n is a, c, g, or t
  misc_feature (280)..(280): n is a, c, g, or t
tatgctgtctcagtacacgatgggtagttgagtcaacataggagtcaaacataccatgtgcttgagatgaatgtcagtgctggtctctccagcaacacaatagacccaacgttaggctaagatctaagatnggctcttctctgaaaaaggcacacagtgttaccacgtagagagttctagggctcactgtgagattcttagaaagcaaggccatcagtgacccggctcattgtgtcctgtgagttccgctcccattcacctgaatggcaagataaatgcnagactatggagccctcagttaaatgttggccatgcaattaccaaggtgggacgaggcgggggagcctcgttggaattccatcctccaatccgcctggctgagagatggcaggacaaaaagatatggaaagggaaagaaaacttggttgcaggcatggaagacataccccaatagtgttattggcttttcaaggtgtttttacctacaagaaaggaagtacaatgggaagcattaaaccaggaactccagggccaaaaagtgctgggctggaatccccgctttgtcatt

SEQ ID NO: 620233 - DNA, 630 bp, Homo sapiens
tgggggaatggggtgttttttctagccacttgtgttttgggaaaacctgtatggcagggatttattcatatattcctgtccaaagccacactgaaaacagaggcagaaacttgtactcgggtgtgatctcttggtcctcaggtgtctcttcggggctccgtggtccctctgtggctttatagctagctgcccggggaccaaggtacaggtgaaagcaaggtagcagcttgcgggaggaggcctgtctggcttaccagtctattacacgtggtggcctcaacctctcccagacagggcagagaactggtgggcagcctcgttgggtttctaggcgtggctggagagggtgggagctcattgtgatagactcattgagtggaaactatttttgtgaaacaggcttcctccttcgaggagagatcagtgcggactaaactgggagcaattccaggtgcaccgtggcaggtgattccttttcttggcaaagtcacgggctcttgggtcccagtaagtgggaccaccacttgacatcatttccccgggaaccgggtcctgactaacacagacaatggggactccagagcctcaagagccggagagggcacgtcactccagagggagtcaaatggg

SEQ ID NO: 620234 - DNA, 132 bp, Homo sapiens
  misc_feature (37)..(37): n is a, c, g, or t
  misc_feature (61)..(61): n is a, c, g, or t
  misc_feature (110)..(110): n is a, c, g, or t
gcaccctgtcacccagcatggagtgcagtggtgcaancttggctcaatgcaacctgggaantggaggttgcaatgagtcaagatcatgaactgcacttcagcctgggtgncagagtgagactccatctcaaa

SEQ ID NO: 620235 - DNA, 356 bp, Homo sapiens
tgttggagtgcttgtgaggatgtggagaaattggaaccctcatactctacaggtaggaatgtaaactggtacaactgctttggaaaatagtttcgccgttcctcatttgaaagttaaacacagaattacgatacaactcagcacttccaatcctaggcatatacctaaaagaagtgaaaacagatactcaagcaaatacttgtacatgaatgtgcatagcaccattactcaatataacagtaaaaaaaatgcaaatctggccaggcgtggtgctcatgcctgtaatcccagcacttcgggaggccgatgggtggatcatctgaggtcagaagtttgagaccagccttgccaacatg

SEQ ID NO: 620236 - DNA, 176 bp, Homo sapiens
tgaattgactcccgtgtccaatgtcttcagtgtgggggccccgctcttgggtcccctcctctgccatcactgaagaaccccacgccaaacactgaatgtcacctgtgcctagcgctcggtccaccttgcgtgccgtgtttgactcaactcaactcctttaacgctaatatttccgg

SEQ ID NO: 620237 - DNA, 192 bp, Homo sapiens
tccgtggctcaggacgttgccagcgccatcaagctctttcgtggcgagctgttctatgacacggaaaaaggcataccgtactggaccgatggtgcttggccagttgccgccgctggcactggtgcgcgagcggctgcgcgccgcggccttgaccgtgccggacgttgccgacgccgtaccgactatcaccgc

SEQ ID NO: 620238 - DNA, 252 bp, Homo sapiens
tggttatggagccgccttaaaaaagaatgtcgaacccaagtccccgagtaaaaaccagaaccgccagtccttccctccaacacaacagagcacaggcaccggaccggtgatgagcccgaggagctgaggccgctgggaaggacagctgacgctggcggctgccgtgtggacggagagccctctttggaatgggccgagtggagccacctagcttcccctgcacacctcattaccactgctaaggcttcaagg

SEQ ID NO: 620239 - DNA, 514 bp, Homo sapiens
aggatgttctgtgatgttcataattagaaaagttgctcggtacattatagaaccttggcaaggctgatggggaagcagtccagactaggctggactctgaaagacggcccacagcaaggaaaggaacggtggcgctggcggcggtggtgttctaagtcccagggcaggacagctaggaggggtgctgactcaggctggagtgtaatctggaaacatgatgtttgcccagttcctgaagggctggggcccactgggccagtgttcccaaggctgtcagacatctttatgaagttctccaggatgataggacatgcagggcccattctataggggtcactagtctttcggcaggtcctcatgcccaaacgaggatggcatcaattcatgcaccggcgtgacagtgtacgttccaaacagcttggacatgtacacggtccagttggagacatactctatgatgacttgcctggaggtgccacactgctagagaacatcatctcgcatttcactggcg

SEQ ID NO: 620240 - DNA, 232 bp, Homo sapiens
aagttgaaccaataatgacgtgaagtccgtggaagcctgtggtacaaaaaaatgttgagccgtagatgccgtcggaacatcatgcagggagactcgaaatactctgaggcttgtacggagggtaaaatagcagcaccagtaaacttgtccataagcagtgtatgaaaattctttggtttcggttgtatatctattcagactatgagtagcagctcaggtgataagcatactc

SEQ ID NO: 620241 - DNA, 250 bp, Homo sapiens
gagcggtctggtgttggaatcagaagattcagctgacagttcttcgtaagttatttgtgttacgtttcttgttaattgggtgagtggtcacagtaccagagtagtgacatttatgtgagacaaagcttagttttttagaagaattattgtaaacatttgatgttaattccaatgtcttcaaataggataaaatataaaggtagcaaatttggggagtaggaaaaaataagtgaccgtcgtggcatggtgg

SEQ ID NO: 620242 - DNA, 739 bp, Homo sapiens
ggcggtgggaaatgctggcgcgcgcggcgcgggcactggggccctttgctgaggggctctctactggttctggccggctcggccggcctcctctggatgtgccccgaaacacgggtgtactgttcggtgccgcagcaaggaagcgctggtgttggtggcagcgattgggccgattccaccgggatccttggagcgtggtttggaacatcctcatccttgtgtaagaccggatccgatatgtgcagagtctcacggaattgggtcatcagggtgccttgagcagtcggggtgtgactctcgacaagtgtaacctctggcaaatcggatggaggtccctttaccgtgcgcattcgtggacccctttacagggggcaaggctaggggtggtgagagggaccctgagttatgccggtcaccacaggcttagcttcaaaacaacccatggaggatcagagctcggcaaaactctctctggaccaaaggtctccccggggacgcggggagtccttgaagtgccaggctttgtgtgcggattgccattcaaaccaggtctgttgacgtggggggggatatcccggcgtgcctcccgctatctggagatccggggatatcacatggtgccaccccgggttgaagaagtctttgcccgatgcctggtggagggcgcagggggggaaaagggccacagttctcagactctgagggaaccggaaatttcgccattccatggggccgagga

SEQ ID NO: 620243 - DNA, 152 bp, Homo sapiens
agaggagagtgagtagagcataagagtctgagatggggaaagctatagagggggtgggggaggtgtctgagagttgaaggatgagaaagaatttgccagggaggacgatgctggcgatagacgaagtccacaagcgaggcaagtaggcactg

SEQ ID NO: 620244 - DNA, 281 bp, Homo sapiens
ggaacatcgtattacttgggttgtggtgtcggtgacagcggactctactgacggcacgtaggtgaacctctcaagcgggagcatccgctcatgacgccctaccaaggggtcggaccagcgtctatgcccctctgggactaccagggcagcactatgctcacgagccagtacgtacgtctgacccctgaccgacgcgcacgcaaacgcgggctctctctggaaccaccagccgtgcttcctcaaagacctgggaaactgacacgtccacattcaacagtcca

SEQ ID NO: 620245 - DNA, 286 bp, Homo sapiens
taaaaaaaaattttggctggaaccaaaccgggggtgcaggggataatcttgggccacgggaacccccaccccccaggttcaagtgattgtcccccctcagggttttaaataggggggataaaaggtgtgaccaacacgcttggctaaattttggggtctttagtaaaaacgggtgtttccccacttttggccaggctggtctcagatttctggcctcgtagatctgcccaccaaggcctcccaaagggctgggattacaggcaaaagccattatgcccagccggga

SEQ ID NO: 620246 - DNA, 633 bp, Homo sapiens
  misc_feature (44)..(45): n is a, c, g, or t
  misc_feature (47)..(47): n is a, c, g, or t
  misc_feature (50)..(50): n is a, c, g, or t
  misc_feature (61)..(61): n is a, c, g, or t
  misc_feature (64)..(64): n is a, c, g, or t
  misc_feature (66)..(67): n is a, c, g, or t
  misc_feature (74)..(74): n is a, c, g, or t
  misc_feature (77)..(77): n is a, c, g, or t
  misc_feature (81)..(81): n is a, c, g, or t
  misc_feature (87)..(87): n is a, c, g, or t
  misc_feature (99)..(99): n is a, c, g, or t
  misc_feature (103)..(103): n is a, c, g, or t
  misc_feature (120)..(120): n is a, c, g, or t
  misc_feature (123)..(123): n is a, c, g, or t
  misc_feature (127)..(127): n is a, c, g, or t
  misc_feature (153)..(153): n is a, c, g, or t
  misc_feature (190)..(190): n is a, c, g, or t
  misc_feature (217)..(217): n is a, c, g, or t
  misc_feature (256)..(256): n is a, c, g, or t
  misc_feature (270)..(270): n is a, c, g, or t
  misc_feature (279)..(279): n is a, c, g, or t
  misc_feature (298)..(298): n is a, c, g, or t
  misc_feature (309)..(309): n is a, c, g, or t
  misc_feature (311)..(311): n is a, c, g, or t
  misc_feature (340)..(340): n is a, c, g, or t
  misc_feature (343)..(343): n is a, c, g, or t
  misc_feature (345)..(345): n is a, c, g, or t
  misc_feature (347)..(347): n is a, c, g, or t
  misc_feature (356)..(356): n is a, c, g, or t
  misc_feature (364)..(364): n is a, c, g, or t
  misc_feature (375)..(375): n is a, c, g, or t
  misc_feature (382)..(382): n is a, c, g, or t
  misc_feature (403)..(403): n is a, c, g, or t
  misc_feature (413)..(413): n is a, c, g, or t
  misc_feature (425)..(425): n is a, c, g, or t
  misc_feature (434)..(434): n is a, c, g, or t
  misc_feature (439)..(440): n is a, c, g, or t
  misc_feature (442)..(442): n is a, c, g, or t
  misc_feature (452)..(452): n is a, c, g, or t
  misc_feature (485)..(485): n is a, c, g, or t
  misc_feature (489)..(489): n is a, c, g, or t
  misc_feature (504)..(504): n is a, c, g, or t
  misc_feature (507)..(507): n is a, c, g, or t
  misc_feature (521)..(521): n is a, c, g, or t
  misc_feature (523)..(523): n is a, c, g, or t
  misc_feature (526)..(526): n is a, c, g, or t
  misc_feature (542)..(542): n is a, c, g, or t
  misc_feature (544)..(544): n is a, c, g, or t
  misc_feature (548)..(548): n is a, c, g, or t
  misc_feature (550)..(550): n is a, c, g, or t
  misc_feature (564)..(564): n is a, c, g, or t
  misc_feature (624)..(624): n is a, c, g, or t
cgggctgtcatcgtggctcgtggaacaatgtcggcagctgggtnnanaanaaaaaaaaaanaanannaaaaaanaanaganaaatanaaagaaaaaatnaaanagaaaaaaaaagataanaanatanataaaaaaaaaaaaggaaaaatgganaaaaaaaaaaaaaaaatataaaaaaaataaaaaaacnaaagaaaaaaaagaaaaaaataaaaanaaaaaaaaaaaaaaaaaaaaaaaaaaaaagaatcttcgntcccttgtacaacncccacccanggggaagtctagcgccctnacccaagaatncngcaagaagacaagtttacccgcgagttcnctngngngagaaaagncctaactnaagagagactngaaacanaaactatgacataacatcacngtacagagtnagcggcatctgngaaacatangtgtnngngacacccaanagacagcctatgcggaagactatctatctcacngtgnacaaaacacaaccanacngtttgtgttcacantnacngtcacaaacagactcngngtgngngcgcctcttagcgnttcaaagtatttacaacactttgactgcacaagttcacactaaaacacatctattttttnacgttcata

SEQ ID NO: 620247 - DNA, 140 bp, Homo sapiens
ctaggaagcagaagaagagatggagacagaggcagaagcaggaatcagcagaagcagaagcggcagaatcaggaagcggagaagcaggaagcggctagaagcagagaagcagggtcttgcgtgagggcagaatgcagggt

SEQ ID NO: 620248 - DNA, 195 bp, Homo sapiens
tcagcacatggacggctgaagtgggcggatcacctgagtcccaggaggttgaggctgcagtgagccacgatcgtgccagtgcactccaaccttggtaacagagcaagatcctatctttaaatacaaaaaaacacgatccctttaataaaccaagggcttctaatttcataaacagcaaaggggaaccctagccca

SEQ ID NO: 620249 - DNA, 141 bp, Homo sapiens
ctccctacagcattttttagaatgtaccaaataagaaaaacgtggatgaagatggagaaagcatacaaaacggctacacgtggaattggaggctgacgaccgggcggaacagaaagtacaggccaagaccagtgcaggcag

SEQ ID NO: 620250 - DNA, 499 bp, Homo sapiens
ttgtaggacttacctaacctgatttcagatcccactagaaagctacagttctacaatacagtttagcacttggtagaaatgtttgtagctcaattgacatagaacagagaggatctagaaacagacccacatatgtatagtcaactaattcttatggccagaagggtaccaaccggcaatatagtatgcacctcccaattctattcggtgggccaattgcctatcatccttggtcggaatagatgttttcagtcactgcaacaccttagtcgtgtataggatttcactgtaagtactatcttcaaagtaatatctatgtttaaatagctacatacacttctgtagtcataactatcttcattgcatcaccagttaagagatttgtcctcttaactgagaatcacggttctatgagagggccatctaaaactaaatttagagatacctcaattcagtgtaacttcgatttcaataacatttaccgaacatgctgttcctt

SEQ ID NO: 620251 - DNA, 1255 bp, Homo sapiens
  misc_feature (419)..(419): n is a, c, g, or t
  misc_feature (862)..(862): n is a, c, g, or t
  misc_feature (873)..(873): n is a, c, g, or t
gtaaaacgcgggctttccaaagatgtaaactctggaaaacagttggccccgttccacaagccaacgtgtcctcgcccagaaaaacgtcccattggaaaatgggaacgcattgtaaaccgccccaactctcgggaacacttttttaattgaggaagctcgctaatttgtgccccccccacgagaaaggttggcctggctggacaccccccttctggggtgtaaaagaaaattggggaaaaagggggtttatatattgggtcccgcagaaatcacacactttggttgtgggaaaacccgaccccacacaccaaggtgtttcccccccctgggagaagcccacgcgggttttcctctggagacccacacctgggggcccgctgggtgacaccgcctcggcttatctctcgagagtaaaaagnggcgccacatttccctcgtgttacacacagagccccccaagggagagaaaccacttcgggagagagaaatagagaaaagagagagaagaaaatctcaccagctgtgtcgctggggtttggccacatctgttgggagaaatggcccacacaatttctcgagagaccgctgtgtcttcccaaacactctgggtgttatattgtgtataacaaaaataaggaagagagagaaacgagagataatttctcctcgggagactctgagctctcgagattacatcaccccacggggctctctccgcccgctctcgtgggcccgcccacacaaaagagagctttacgcccacgagatatcccccccacaacattgttgcacaaatactctctctctcaaaaaggaaagatatagatatgtgcccgccccacgtagatatgtgttgtgatangaaaaagcccncttataaatataaagagaaggtataagaaaccctcataggaacccacaagcacacccacaagaatttcacagcgtgtcttgtgtaactcccacacgtggttcctcgcacgcaccacacacacgcgcggcgtaattggcttctgaaagaaagcacgcgtatcccaagaaaaaataaaagaaagagaggctgcacgaaataatgctaaaacttttggcccaaagaagaaatgaaaggagaggctaaaggaagaagccccacaggagacccaaattgcgaaagaggaaccccagactttcctctctgcgagctttttacttctaagtctgaatcccgtccagaaataagattttttgagtaaccaaataaataagatccagactc

SEQ ID NO: 620252 - DNA, 212 bp, Homo sapiens
cgctgactctagaggatacacttcctctcctcccacctcgaagccaaggcaggcggattgcgtgaagtcagaagttcgagaccagcctggccaacatggtgaaatccgatgtctactaaaaataaaacaattagccaggcatggtggcccgcatctgtagtcccagctactggagaggctgaggcaggagagttgcttgagcccaggaggtg

SEQ ID NO: 620253 - DNA, 409 bp, Homo sapiens
ttttttgttccaaatcaatgtagcaagttatttttttctctttttcccctgatctttgacaagaataatgagaagaaggaggaggaggaataggaggagaggaaggaaggaaggaaggaaggaaggaaggaaggaaggaaggaaaggaactgcctcacaataaataaaagaccctaaaaagaaattctaaattttatattggtagattaaaatctagtttttaatgctaaactataaggaaattaacttaatatgaacttaatcatattcatcctaatggagagaaaattctccagagtagtataaaaagatttaggaggcaccagaacaaaaacagttatgaggaaaactacatttatgttcagttatgatatttccaataactctagtttgaaggtcgacgcggccg

SEQ ID NO: 620254 - DNA, 599 bp, Homo sapiens
  misc_feature (162)..(162): n is a, c, g, or t
taaaaaaagtaagcctttattcccttgttttggcaaataaaactgggctaagtgggttgcttttgggtgattagtcaaaaagaccaaactcccattatccctcgttccgactctccctccgacttcttcctttggcttcaacctttagcgtggggactgcangcagcagcaggagcagcttgttgggtggtcagcagccacgaggggcagcgagcacaaatggcagagtggaattcagcccaagaagaggccttgaacctttattcagacaagtgtgggcaagggtgttaactccggtctctcccacgagaaacagaggccgaggaacctcgttttgtgtcccccgttgtgaatgattagaaagtggggctcacgtggtgtgcaaccagtgttgtgggttacgccaatctctgtgcgagacaggacctctgtggcgaacattgtgccgggaccccctctccgaggaaggcgaagaaattgtcacgaagtttctccctcgtggtgaatcattcaaggcactttcagggggtgtggtaaattgcgtgccattgtggtcgaaacaccgtggcggggagtgtaccagccccaaaggaaaaaag

SEQ ID NO: 620255 - DNA, 966 bp, Homo sapiens
gctggttctgattactacaatctagcgtgaaactgcaatagttcgtgatatcccacgttcagtaccttgaccctgaatgggaatgagagctgaatgtgatgagacaattatcctaggtgcctgatactaaagatagatatcgccactctgtcccatcaaaaccgtctagtccatcccatgtactgacattacatgcgggactggcactctgtagtcacttcaaagtactctggccatctcaccatgcagttctctctcgcggccatgggactacatgcggttcatatccaattcggtgaatgccatgtgataagttggtacacttggtgggcgcatagtcgtggtgaaatattcccttgatctacttttcagttcaagattgtctgatctgtcacccggacgagatgaactcgtagagggttaagtgtacgtggaactctcgaggtacagattcttgaactgtaatcatttataatataaaagtggtacataatctcttataacaggtaagaaattaggggatttcttctaagttgtaaattcatatatagggaagagagtgtgagttattacgatgtctggtaggtataaatataagagatttagctgatttaccttctgtagagttcactcattgtaggctatcgaaagtactgtacatatcagcacttaccatgggcatagattcttactggtagatatgggttttctggtacggtattaatgactgcagattctgtatgtatgtactggagtgatgcatttgatcaagggttatcctattgttgtttctagtggtttgctgcagaggaattgacgatggttaaaagatgataaatgcaagattctcagtaggaatagggttagccggtagggcaaattcataaggattcctttaaaaggaaaggtgggggcggggataaccgaggataaaaatgagggaggaggaggggaagaataaaaacg

SEQ ID NO: 620256 - DNA, 863 bp, Homo sapiens
  misc_feature (734)..(734): n is a, c, g, or t
cagtcatctttaaagaacattttatttttatacaagttctttcttgcttgttttttatttttatatattttttctgactcctatttaaagaaccccttaggtttctaagtacccatttctttctgataagttatgggaagaaaaagctaattggtcttgaatagaagacttctggacaatttttcactttcacagatatgaagcttgttttactttctcacttataaatttaaaatgtggcactgggaatataccagaacatgagaccagggttataggccacaaattaggaacctatatttctggttccctctattttctcccaagttagaggttccaccatttggaaaaaagccttttgggaatagcgcccaaggggtttgggtatatttcatgtgataaatgaaatagtttatgtgtaactgggtctgagtcatctggttgaggacgccagaggaggaatggtgttgtttggagcctgaagttgttgaaatggggtaactggtgttataaaggggaatgtttggtagcgtgtgagttttgaaacacaacgtgtgataggccaggcgatggtgggtcatggctggtaatacccagcaacttggggagaggtctgcaagcgggcgggagccaaccctcgaggtcggcggaggtcggtagaaccagccctggagtcgacaacaggggggaaaagccctaagtctcctgatcaaacacttaccaaacagtatacncgaggggaggggaagacgatggcctgtgatgtccagcacaagccaaggaaggtgagagggggggaaacacttgaaacccgcgaggcgaaagttaggaaggcaagaaaaaacacaaacgggaaaggatgt

SEQ ID NO: 620257 - DNA, 123 bp, Homo sapiens
atctgatgtccaaatacacccaaggtgtggaaggtatagcatctcttggcaagttcacagtctgtccggttcctgccattccctcctcctcctgagagcagcaccaccaggacggggatcctc

SEQ ID NO: 620258 - DNA, 97 bp, Homo sapiens
  misc_feature (41)..(41): n is a, c, g, or t
cggagcagcagtgccaggccggcgcatggagtcacccatgnactgcagtttgaggagactttcccccgggacagcacctgcagtgataccagccccc

SEQ ID NO: 620259 - DNA, 882 bp, Homo sapiens
  misc_feature (46)..(46): n is a, c, g, or t
  misc_feature (67)..(67): n is a, c, g, or t
  misc_feature (135)..(135): n is a, c, g, or t
  misc_feature (152)..(152): n is a, c, g, or t
  misc_feature (166)..(166): n is a, c, g, or t
  misc_feature (177)..(177): n is a, c, g, or t
  misc_feature (181)..(181): n is a, c, g, or t
  misc_feature (188)..(188): n is a, c, g, or t
  misc_feature (206)..(206): n is a, c, g, or t
  misc_feature (226)..(226): n is a, c, g, or t
  misc_feature (240)..(240): n is a, c, g, or t
  misc_feature (246)..(246): n is a, c, g, or t
  misc_feature (248)..(248): n is a, c, g, or t
  misc_feature (254)..(254): n is a, c, g, or t
  misc_feature (259)..(259): n is a, c, g, or t
  misc_feature (279)..(279): n is a, c, g, or t
  misc_feature (284)..(285): n is a, c, g, or t
  misc_feature (288)..(289): n is a, c, g, or t
  misc_feature (295)..(295): n is a, c, g, or t
  misc_feature (297)..(298): n is a, c, g, or t
  misc_feature (307)..(307): n is a, c, g, or t
  misc_feature (309)..(309): n is a, c, g, or t
  misc_feature (317)..(317): n is a, c, g, or t
  misc_feature (325)..(326): n is a, c, g, or t
  misc_feature (343)..(344): n is a, c, g, or t
  misc_feature (348)..(349): n is a, c, g, or t
  misc_feature (359)..(360): n is a, c, g, or t
  misc_feature (364)..(364): n is a, c, g, or t
  misc_feature (368)..(370): n is a, c, g, or t
  misc_feature (377)..(377): n is a, c, g, or t
  misc_feature (379)..(379): n is a, c, g, or t
  misc_feature (388)..(388): n is a, c, g, or t
  misc_feature (392)..(393): n is a, c, g, or t
  misc_feature (396)..(396): n is a, c, g, or t
  misc_feature (398)..(398): n is a, c, g, or t
  misc_feature (426)..(427): n is a, c, g, or t
  misc_feature (436)..(436): n is a, c, g, or t
  misc_feature (445)..(445): n is a, c, g, or t
  misc_feature (451)..(451): n is a, c, g, or t
  misc_feature (474)..(474): n is a, c, g, or t
  misc_feature (491)..(491): n is a, c, g, or t
  misc_feature (502)..(502): n is a, c, g, or t
  misc_feature (522)..(522): n is a, c, g, or t
  misc_feature (543)..(543): n is a, c, g, or t
agattaaaaaaaacaaataaaagaattaaaaaaaaaacctccttcnaaaacctccctaaaacaaganaaaacccaagctccctttcgaggacttacgaatatttttgacacaggcttccaaacaattttttagcnacacgccggttgccacncccccccttctccncccttggcttnatanacccttncccagcccctcggacttncccagggtggaggtcccctnaaacacagcccctnagcttntntgcttnttttnaggccagacaggaagatttncattnnttnnaccttntnncagcagcantngcgggatnagaaactnncccccaggccgggggtnntttnngagcgctttnnaggntttnnnttccctntnccccacatncctnntcntngaccaactagaaacagggggccaccttnnggaaaattnagagcagtntttttnagagtgggtgctgcaggtttttnccctttagctttttttnaaattattttnggccgggcacggtggctcangcctgtaatcccagcactttnggaggcagaggcaggtggatcacctgaaggtcaggagttccagaccagcctggccaacatggtgaagccccatctctactaaaaatacaaaatttagctgggcgcagtggtgggcacctgtaatcccagctactgaggcgggagaatcgcttgaacctgggaggcggattgcactgagccaagattgcaccaagattgcaccactgcactccagcctgggtgacagaccgagactccgtctcaaaaaaaaaaatcttgtttccgtagagtgcctcgggggacctagtttgggaaatgctcatttagggacctgtcgtaatgtgtgcaggggtcctctca

SEQ ID NO: 620260 - DNA, 215 bp, Homo sapiens
gtaacagcccattaaacaaacttttggacgtataaaatatcagtaggccttgtaaataactaggataatttcttggaccgaatcatcacatttatctttttacttcctactaaatttagttagcacatcatcaaacaagcttagttcttgcatttttctattgtccactgtagcaagtattttacatgtgtcaacaactttcatcgtgcatgttt

SEQ ID NO: 620261 - DNA, 122 bp, Homo sapiens
ttacttactcttatagatcatctcctccagagacgaacagtggctgctgcttatggaagtcaatgcctcgcacaggaccatcatgttcatcaaacttgtcactgagagtgcacatccagata

SEQ ID NO: 620262 - DNA, 314 bp, Homo sapiens
ccatgatgtccgtttcgatcactccgggcgcaacggcattggaccggataccacgcttgccgccttcaatcgcgatcacgcgcatgagctgcgccagtgcgccttttgacgaggcgtacgcggcttgcgtcgcgaaggctacgaccgaggaaatcgaggcaaccgaaacgatcgagcctccatcggccatgaccttgatcgcttcgcgggcgtgcaggaaatttccgcgcacgttgacggcaaggatcgagtcaaagtcctctgtggtggtctcttgcaagggtttgttgagcgtgcgccccgcgttgttgacc

SEQ ID NO: 620263 - DNA, 458 bp, Homo sapiens
  misc_feature (378)..(378): n is a, c, g, or t
tgagatggagtttcactcttgttgcccaggctgcagtgcaatggtacgatcgtggctcactgcaacctccacctcccaggttccaccgattctcctgcctcagcctcccaagtagctgggattacaggcatgtaccaccatgcccagccaattttgtatttttagtagagatgggggtttcaccatgttggtcaggctggtctcgaactcccgacctcaggtgatccacctgcctcggcctccaaaagtgctgggattacaggcatgacccactgcacccagcctacatttactttttctacaaactttcattttccctgaatttaattcattgtgggtttatttgctcctttatttctttttctatgtacccatccncaaattatctatctgaagtataaatgaagtgtaaattacatctttattctctccatttcactctcaaactagcctcaaat

SEQ ID NO: 620264 - DNA, 194 bp, Homo sapiens
ggaaatggggaaaaaaattggggccccttttgttttttggcaattgggggggcgggtccttttttcaagcccttccccaaaagggggggtttccggttttttttttgggaggttcccccaaaccccccctaatggggggggggtttttgtttcggttgggtttcctaaaaaaaagggaaaaagggcccctttta

SEQ ID NO: 620265 - DNA, 780 bp, Homo sapiens
ttaatggcctgtctgacaccgcatacacgcaggagtgtccatttctgatcacattaacaagtcatgtgtaattactaagacaaactaaatgaaaaatcttgggccttggagttacttataaggtctcttatgatcctttagctgttaaagtacctcctatcctacgttatcatgagggtactacagagccactggattattaggataggcgaagagtaaacccgttttaagtgccacagctatcaaagcaactttccctttgatggtagctttataaccattcaaagtactgcaagtcttcagatggtagtagattcatcttagtcttcagaccactttgttacaatcactgtcccccatacattaaaacatactctgttaggaacatcagtacactgtgatgccagacctaatggtagaataagatatggtcaccctttacaagggcactgattggctcctgagttgggtgggattgcagggcatgcgcaacacagcgtggctaaatgaacggatagacagtaagaagatgggattcaccgagtatggcccatggctaggactacaaaatcctggatctccgagagatgcaccactgcataagctgtccaaagagtgttggaacttataggagttagccaacacaacaacggaaggccgtgtattaaacatggagaaagttgtccacaaacaagggtaagagaaactgatatgacacaaaacggaaaatactgatttaatctatcgaaacacttcctgatagagactaattcatggaac

SEQ ID NO: 620266 - DNA, 827 bp, Homo sapiens
ggacaccaggtggtggcccagcaaagaggggaaggggccgggactccgggagttgtcagccccccaaggtgctggagaggcccaaacaacgggggggtctcgggaagacccttaaacaagggcgggcgcgcccagcccccgtggaggaagtgcgtcgcgagcgagccaccccgacacgtttcaaggaatgatacggtcaaaaccgggcgcgccacaccggaagagaaagacgtcccacggaggccccgctcaaggaaacgcctttagcacacagccgggggacatcaaaggctttgtgggaagacatacaacaccgaaaggccaaataagacaagagagggaatccgcggcgactccaggggcgggacacaacacctccgggcgcgtgccacaacgcaagtcttgtcggagagcaccccgacagcagaggccgcccccaacagggggacgaacaattctgctccacacccggccctcgtgcaagagagcctccagcaaagtgcagtttcccacgacgtcttcgtgagaaatagccggccttttactcgagaggagcccacaccgccaggcaggggagataagaaaaacagagacagcaccacgacgagcaggggaaacaaaaacaaaggcgctcccccccggggcggcactattcctcaaaaagttggccaacccccaacaaaagaagtccggccagggagcacgctgcggaacaagagacaacaacaagaacaactacagccggaagcaacagggggagaaaccggacgctggctctcccaaccccggagcagcacccgccctgcaacagccaaaacatagacaca

SEQ ID NO: 620267 - DNA, 452 bp, Homo sapiens
taaactgaaaataaggtgggcttcattggggaaatggacttattgcaaatgctgtgatgttttttagaggaacttcttttacaggtgttggccatgaattttttagcaataggaatttgtactatttaagcaatctttaatggaaaatttgtgtgtaagaatgggtgctatttaggttttttaccaacccattttaagaaaattttttggtattaagcccagtttttaaaaatgtttattgtagtatatggttagctttttacccttttgacaggcatcaaaatttcattttaaagttttacttgtacaaattttgtacttctttagtggctggaatttgtgaagaaacttaatgtggatatttaattttttcaagtttttacctgcccccatccttttttgtttttgatgtgtcccgtaagttttcaataaatgttggttaccgatcctta

SEQ ID NO: 620268 - DNA, 149 bp, Homo sapiens
ccaaacgtctgactccttctccacgttcactgctcgtgctcatctcagtctcccctctcctgccttgtatcctccagtctcccctctccatacagatgggtggaggtggaaagcaaagtcatgaaaatgttcccagcttgctcagtact

SEQ ID NO: 620269 - DNA, 114 bp, Homo sapiens
ctaccggcacgcccgccagggcgaaatcactgccgtacaagccagccagcccgacaaccgcgtcgttcagccagtccaagccaaatgccagtacgccccaggacaaaatcccgg

SEQ ID NO: 620270 - DNA, 888 bp, Homo sapiens
  misc_feature (63)..(63): n is a, c, g, or t
aggagggaggtggaagggagggttattgcgaggagtgataggagggacttagatgtgcctggntagtgatcagtaatgaagaccgcatgccgtcccaagattatgtcctcacttataactatcacaggaatagggggtggggggtggtgctctgagctcctgcagtgaaaagcaggaagaggatggccttgactttttaaatacttgggaacccaaatttattacattagcagaagcatgcgcaaagagataatgtcacagcgctacaattaagtctttgtcagacattctggaggggggggaaaataatagtgtaaagttcaatttcaagaggtccggatacgatggatttttttctcagttttgaattatgctactcaccaatttatatttttaaagcaaggtgggcgttatcttttccacaaagggaaagagggtaagaacaggcaggtgggagatctcagactccaggcctgaaattaagggctctaaagcatcgtggtctttgtttttgtaccggtatttgaggttttaatgtgctggagaaatagtagcccaacaatagcttagtgattcggatagtagcattattttgggtcaggtttaggtgagaggggggaagagaagcagaagattttgggtttccctttgtgagaagggttgggagagaaactatgcatatggaggtgattcaacctggtgggggcttaaaaatggggagtccccgtcgagcctagcggatgggttcactttagagcaaaagtggtcaagggccctagactagcaattggtggtcgaagtaagtggaaagaagggagcattaagaagaggaggccggggggctagagggggaggggtggtctcttgcgttataggggtaaggaaaag

SEQ ID NO: 620271 - DNA, 477 bp, Homo sapiens
acccaaggattctagcacgaatgtcattgtttacggtgatgatgtggtaagcgccaccgcgatgcagttggcccacttgcgtgccaacttgatggccgcttcacaggcttcggcaccgctgttgagcaaataggcctggtcgctgcaggtgtggtggcacagacgatcgacaagatccagttgcgcgcggttgtgcaaacccaggccaggcttgatcacggttgtcatctgtttggggcaatggcgtcgcgtacggtctggggactgtgacccaggctgttggccccgccgccttgactgaaatccagataagcgcgggccgtccagcgtcccggaaaagccagggaaccctgccccctgtacaaacacctgggggcgggcgcgccacaggtgggcattcaggcactgggctggaaacattctgcacgcggggcatgcacaaccaggtcatccagactcggcgcgcagggacggaac

SEQ ID NO: 620272 - DNA, 248 bp, Homo sapiens
gactagaggatcccctctctccacactggattgtaaactccttgatgtctgggtcatctcagctcatgagctgagctttcagtgggtgctcagtggaacaggtgctgaatggagtccggctctagggaggccagggtgtgttggtaagtgagagactaaaatccttttaaaaagaatctttttgcccttcagttgtgtttgccatgagttaatgtgatttactctagtggaagccagtgtggagagag

SEQ ID NO: 620273 - DNA, 271 bp, Homo sapiens
gggctgtccgtcccgggaccgccgcgatgtcccctgtgcgcccaaggagtcggggactgggtacccggaccagagtcactgtggtcacggagcaccagagttgtgctccatgatgccacgtgatcccacctctgggtgctgccacctcaagcatagcacagatcgttcagataagtgggtacccaggccaaaccgtatgtgctcaaggatggtgggagttggaactgtcacattgagaatataataaaacattggagatttctctgtatga

SEQ ID NO: 620274 - DNA, 172 bp, Homo sapiens
agttacataatcatcagatgtgctccaggttcaggagactcctccagcaaacgctgacagaccctccttcgcgatggcgtctaaaatcccgtcatgctgggctgtgtcggagacacaccctcttccacttcatactataaatactttctttttaaactgactatggattcct

SEQ ID NO: 620275 - DNA, 185 bp, Homo sapiens
ctcatggaggaaacgcaggacaaactcccatgaacatcaatccccaacagacccgtttccctgatttccttgactgtcttccaagaacggggggggacttaagaactttggaatctgaagacctgatccccctcttcaatgatgtagaggctgctctgaacaaaagtgagccctttctaacctgg

SEQ ID NO: 620276 - DNA, 620 bp, Homo sapiens
ttactaccagacacccttagccaaaccacttacccaaataaatgtatagtgcgatagaaattgaaacctgagcgcaatagatatagtaccgcaagggaaagatgaaaaattatagccaagcataatatagcaatggactaacccctataccttctgcataatgaattaactagaaataacatttgcaatgtgatgatgccaaatgctaagacccccgaaaccagactgatgctacctaagaacagctaaacagatgcacaccctgtctatgtagcaaaatatgtgggacagatttatatggtagagtgcgacaaacctaccgatgcctggtgatagcatggttgtccaagatagaatcttagttcaactttcaattttgcccacagaaccctctaaatccccttgtcaatttaactgttagtccaaatgaggaacagctctttgtgacactagtgaacaaaaccttgtagagagagtaaaaaatttaacacccatagtattgcctaaaagcatgtcacaattatgaaagctgtcaagctcaaaaccccactacctaaaaatcccaaacatataacttgaactcctcacaaccaattggaccactctatcaccctatagaa

SEQ ID NO: 620277 - DNA, 300 bp, Homo sapiens
cgggcccccaaaacccggaaagggcctgtttggttcctgttttttcccaaaagcccccccgcattttcaaaggtggggggggggtcacccaccttcataaaagttgggttttgggtacgcccccccttgggcaggtgaagccccccccttttgcataagttgatcaccctgtgccccccttccctttttaggagttcaccggtttggcagggcaccaggaggctttttgggttttggccccccccggaagggtgggcaaagaaaattgggctatgtattcttaataaattgggcccccca

SEQ ID NO: 620278 - DNA, 465 bp, Homo sapiens
gccaaaaaaaaaaaaaaaaatttattggtcttgggcagatcccctgaatttattttgggttcccttctttaaattgtgatatagctgtcaaattaaagccatgaggcagcagaaacaaaatttatgcacttgttgattgtgattcatgaaatgtgggaaatttattgcactaccaccagaagcattgaaattaaattgaattttggaaacaatttaccaaccaatctctaggcatttaaattgggcaacaggaaggctcaaaggaaaactcattgagtctctggagtgtgccaagggcaatttaaaaaggattgtgacaccttgacctagactctcataaaggattggaatattttttagataggaaagcaaaaaagatggacccctttcgaaaagttagtaaaggcagaaaaagaaaagtgaccttgatgtgtttgtgacactgtgaggaaccctcttaagcaa

SEQ ID NO: 620279 - DNA, 466 bp, Homo sapiens
  misc_feature (85)..(85): n is a, c, g, or t
  misc_feature (465)..(466): n is a, c, g, or t
tcatcttgggcctgtgttatcagcggacaaacggtggatgtttccgacagaaattttttcatggctgctgctaaagggaaaaatnttgttgccgaaccgcttgtttctcgattagacggagcttttgttcttgtatttgccgttcctatttatgatgataatcacgctatcattggtgttttactggcatcagttgaagcgtcagctctttcacatgatatagaagatattattgtcggcaaaacagggtattgctatattctcggtcttacgggaactactattgcggcaaaagactttgccagagtaaaggctatggagaatgtaataaagatggccgagactgataaaagccttgcttctcttgccgcctttgaaaagatggcaagagaaatagatgagccttccatcagcttctatacctataaaggtatacataagattgcgtcttacgctacgatgaann

SEQ ID NO: 620280 - DNA, 935 bp, Homo sapiens
tcctccactccccccatatctttaaagtgtggaagcagaaaggaactgccatttgtcctacattgagagagctgacataggggtaaggtcctggagagaggtacgtgctggctccacgtgaacaagcattgcggacggaaggtaaagagtccagtcagccaccacctggaaggtcgcaatgaaaaagccagagttccacttgttgtgtactcctgttgctgaacgtgtatcctgagtaccagcaatgatccctttttgtctctcatgtggcctagcataggtatgagtccaggactcctttcccttggtcccttaagagaatcaaaacccctattgcatgcagaccaggcggttaaggatagccctccaaccacgagcttgataaaatctggaggagacactggtggcctgtggaaagcattgtatccagtgaatggcactgcaagacttggaggaactgaccgggccaggcaggaggacggaggaagccccacatatcctttccatccgtcatggttggttaccgtacatcacgacctgtggcacatcttagaaccgtagagagccggcttgaaggagaatagaggacgccgtcagggtgtgaaacaacggacataccttgatgccaccagtctagtagcgggtcccctagccttttgtttattagtaggccaccctttcccatctcctccgtgtgagaaatgacagtccgcatggccagcgaaagcacctatacctccataggtgggtttccattggcacgaatcccaaactcaaatcaaatcctcgaaaaggtaaacacctttggaaacccttgcggcaacaagatatccgggcccctggcttttgatacactcttatccaatgactaagacgtggtgactaacccacagtttgcttacagcgaatgtgccccagcggaaccccgcgcggtc

SEQ ID NO: 620281 - DNA, 190 bp, Homo sapiens
actcagaatacaacatcatgtttgaacccgacgtgtgtgaacgtggcaccaagaagttgcatgtcatcttcaactacacgggcatgaacgttgctgatgaacaaggacatacgttgcaagcgatgatgagtttacacacctagtacacactgatggtgcggccagacaacacctatgaggtgatgcattg

SEQ ID NO: 620282 - DNA, 1083 bp, Homo sapiens
  misc_feature (437)..(437): n is a, c, g, or t
ataggaatagtgatagtaagatcaaaaaatgcagatgaaagtgagcttaactacatcatgtggttgaaggagagtattcacgttttagtcttcgttggaaggatggatgagaactgataagaaatatagcaagacatgttagatcatatagcgttatatttgcatatttgcatttatgctggatatattaatgaagttcttggagagaggtactgaatctatatgatgtaatatggtcaaattgtatcatacaaaggtgccaattgaatagacaaagtgtaagaacaaatcgtgagataaataatcaatgaagtggatgagttaatattagagtacatgccgtacaatagtgaagtcaaaataattgtgtattaacttatgaggtatagcaggggaacagaagttgactatagagtcgaccggattatatttaaccnccataagatggggtccaattgctgtcatggataattgtcatgggctgggtgaaactgaaatttagttctataagccagatgttttgaaaaaagatctgttggagatagtaattccttaaagaggtaagtagaggggagaggactggtgttaggtattatagaataattaaactgtgagggtagcacttaaattaagcaattcaagtaaaaggttaccaattagtactgtctggttgggtaaactcccgacgattatggggatgaaggaacataagaaataaagtgagacgttcttgattgccataaaacaagtttgagtagattttggggtaaacgtattgggaaattttgagggtattatgttggaagggactgtgggttaccaaaggttggtgtgcttggacattagtcattataagataaaagcaaatgtttggactttggtgtgagcaggtaacagaataagataccagtaacgggcattaatagggtaaaccatgaaagatatgagaggaacacgaataaagggggaacaacagtaagaaagagacagaaaatatttagtgtaggtgcttaggagagaacacacaaagaataaaatttttaaagacagagaaaatcggtaagggaaggcagaagcgaaaaa

SEQ ID NO: 620283 - DNA, 208 bp, Homo sapiens
ctgcttcatgataggaagtatgctgttctctatcagcctctattttattagcgatttgaaattattaatgcaatttatgaacctacggaataagaatgtgaatgaatccagataaagaagatgagatttcggaggaattgaaagaaaaggccaagattgaagataagaaaaaggatgaagaacaagaagacccccaaggaattcctga

SEQ ID NO: 620284 - DNA, 1495 bp, Homo sapiens
  misc_feature (559)..(559): n is a, c, g, or t
gccgcagtatgtggtgtgccttggtgtgtagttcgccccccgtcgccttcgtggccagaagggtctgctccccctggggtgtgtgggtctgtgtatggtggggcaaaaagtgttttttttacaacagggggcggcaaccgactctttttgaaggggttggtcgcccctggctgtttcctgtgttagagtagtgcgctctgtcccccacgttgggtgcacacggtagtttgcgtctggggggggttgtgttttctcgcgaaagcccgccccccgtgtgagggggggctccactaatgggccaatatctccccacccgcagcccgcacggtgctgtccctgttggggagaggggttcctcaccggagaagggccccccacaggaggaagggtgttccctcttggggggagaaccacccacattggggggtctcgccaccaatgggggagagagtcccctctttggggaagtgagtagatataatggtagagggaagggcccgttccccgcccgccgcccaaagtatgggggagccccccccccggggggttgttccccccncgaggagggggaaagcagcccccccctgctttgggagagagtagagtgagtatatctctttccccacgggccacctccgagaggctttgggagggaatctcgtgcccacgagtgtgggtgcccccacagatcacccgccgcggtgtttgtggagaaacacgcagcgaagaatctctttcgctcctcgttggagagagacccacgagaggtgggacacacagcacacagctggtgatataggggcccccctcacataagcccctcgagaaggcctctttctctctcccgccacacccgctctttcgcgccgcccccggcgcgttgggttgatgtcgcttggccacagaaggttgggcctctcgtgtggcacatctcccgcggggagaggagatagaagtgttggcctccccactggggatttctctgtggtggggttccccgcgtgtggagaagtgttccacagaaggtgtgggcccctgtgtgtgtggaagacacacagagaggtgggctctcccctgggggtgggcccgggcgccattggagccgagaggtgttgcctttggtgtgaaggaaagaccgaaggtggcccctgtggggcgccccccgtggcacccttgtgaatggacaccaagaatgggagggaaagaaagaaggagagagaccggtggaaggcaccctggagaaaaatgtgagtaaagggccgagccccctccaggagccccagagatccgcgccctactagaatacccagagacccccccagaactcgccattgactcacccagaatttattttttaacacaccacgaaaatagttttaaatttataattcccatatttataatgttggcccacccaccttatgattattcccttgtctgtacctttagtatttttcccccctttgtgaagaaaccacttaaaaccagttaaatg

SEQ ID NO: 620285 - DNA, 1016 bp, Homo sapiens
gggagctggaggttatgccgacaatgacatcggagccgtctcaaccacagggcatggggaaagcatcctgaaggtgaacctggctagactcaccctgttccacactagcaacaaggaacagacggctacgaacgaggctgcggacctatcgcttgggttatatgaagtcaagggttaacacggttctaggtggcctcactcgtggttacgcaaacacaggagactgcggtgcgcaccagctggaccctccaactccatgccctgcggccaagccgcccaaggcaccggcaagctgcaacttcggcaattgactccctgaccgatactactaatcagccgagcactatccctaaagccgcctggaagaacttgtacttcccagactgcctacgcctctcacaagggcccacagtcaccaagtcctccctcgattcaggacataagcccttaatccacacctaagatctttagcaacttcgcgacacaacttgcgtcccccgttccttgtcactttgtttcccgtccgccctttaactacagcatccttgaacatggtctctggctctgctgcggggagccggggttccctcgcacagcgcattgcagcaagcacacattgaccccgggttatctcagcggacggcattcacctctgcagaccccgtgcggccagcgcgtccaaacagcctgcaggttgcaaagccccagtggaaattttacggtccccgacctgggccagcatccccaagggaccctgtgcagcccacacgcagacacgcccccaggggagccccctgggcttatctcgaagccaccacacagacaccctcaaacgcgagcggcgaacccccaccgcacgtccaacggcaaacaggccgacgccacgccaatggcaacgtcccctttggaaccatcttgacacccacgaacatgcgttgaggaaaagaccccccaacaaggaccccctgcaacggaaacccccctgccagcggccagccaaaaccgatcggcaccac

SEQ ID NO: 620286 - DNA, 1860 bp, Homo sapiens
acacacacacacacacacacacgtgggaatgtaaggcttattttcttggcacatggatattcaattgcttctttaccatttattgaaaagactgtccattctgcattgaattgcctttgtacctttgtcaaaaatcatttgtctctagaaaaatcaggtttccaggaaaaaaaagactaatgtgttccactagtgttcttatttttcagttgtgttggcttttgtagattctttgcatttccatataaattttagaattagcgtatcaatttcttaaggcttggtgggatttccattgggattgtattgagtctatataaataaataaaactgagagagaattaacattttattttatttttttgagatggagtctcactctgttgcctaggctgtcgtgcggtggtgcggtctcggctcactgcaacctctgcctccgagattcaagcaattctcctgcctcagtctcccaagtagctgggattacaaatgcctgccactacactcagcttaatttttttatttttaatacagacagggtttcaccaggttggccaggctgttctcgagctcttgacttcaagtgatcagccctcctcagcctcccaaagtgctgagattacgggtgtgagcccccgcgcctgactgagaattaacattttaatattgagtgttttgattaaagtcttctctaatttccttcataaatgttttgtagcttttgtacagtcttgcacatcttttatccaatttatcccggagtgtttcatattgtgatgcttttgtaaaatgatttagtttttaaaatttcagtatctgttcattgctattatatagaaatgtaattgatttttgtgtcttggtcttacattctataaccttcctaaattcttttattagttttagtaactttttaatagatttcatcaggttttccctgtaggttatcttattgtcagcaaataaagaaatttttacttgtttctttctgacttggatgccttttattttcttttctggtgctgctgactgggtcatacggtaggtgtgtgtttaactttttgagaaactgccagctgggtgcggtggctcacgcctgtaatcccagcacttttggaggccgaggcgggcggatcacgaggtcaggagatcgagaccatcctggctaacacggtgaaactccgtctctactaaaaatacaaaaaattagctgcgcgtggctcctgtagtctcagctactcgagaggctgaggcaggagaatggcatgaacccgggaggcggagctttcagtgagccgagatagcgccactgcagtccggcctgggcgaaagagcgagactctgtctcaaaaaaaaaaaaaaaaaaaaaagaaaagaaaagaaactgccaaactgttcccaagtagttgtaccgtttttcatttctattagcagttgtatgaattccggttgcccccagccttaccaacaattgggtatggtcactattttaaaatgtttcccccaactttttaattataaaatacacataatatacacataaccatctttttaaaacctctttataaaaacgttttggctgggtgcagtggctcacgcctgtaatcccagcactttgggaggctggggtgggcagatcacctgaggtcaggagttcaagaccagcctggccaacgtggtgaaaccccgtctctactaaaaatacaaaaattaaccaggcgtggtggcaggtgcctgcaatcccagctactctggaggctgaggcaggagaatcgctggaacccaggaggcagaggttgcagtgagctgagatcatgccattgcacttcagcctgggtgacaagagtgaaactccgtctc

SEQ ID NO: 620287 - DNA, 895 bp, Homo sapiens
gctggttctggttcggaggtcgtgagcggagtccaaaaagaattacctgctgctgctccctatattcccaatgcggggcggcagtgggccaaggtgtgcgctgtcaagcgccacaatgctgtgagcctctcaccaacctctctttggtctgcttggagttcagcctctgtccccccgtagcgtggctagtcatgcagacatcggcttgtggagcacggtagactactggtgacctggacatagtcggggcctggggaacctactggagcatgtatgtggactgggctcgcagatggggaccccgctggatgaaactcaactgggtccggattccccctgggaaccgtctaagtgctctgttaccagggaatttcactgtcggggtcccctatcgaatcactgtgaccgcagtctctgcttcaggcttggctctgcatcctccgtctgggggttcagggaggaattagcacccctagtggggccaacgctttgtgcgactccaagatgcccctccaggacccccgccatagcgtggggagaggtcccaaggcaccagcttcgaggccacctcaccactacacttgtgtgcacagagtggaaccagccctccgtctgcatgaatgtgagtggcaacacacagaagtgtcacccctggcctgacttccttggggtccctgttgagcttgtggggtgacagcattcttaccatcgctggacagaggcctcctggtccatcctccggttcatctagcagataacacctgaggtgggaaagttctggccggctcctatctgtggggtgttctgtgggggttgggctgcctgcactctggaggggtcccctaggcacatgtgccctggttggggaagctcggttgcgggtggggcctgtgat

SEQ ID NO: 620288 - DNA, 295 bp, Homo sapiens
gttgcacacaagcatgggaccctggacccaatcacaaaaccactttttatcctgggcctccacacctgtgatgggaggggctgccatgaagttctctgatatggcctggagacattttcccaatggtcttgggaattaacattaggctccttgctgcttatgcaaatttctgcagcgagcttgaatttctcccccagaaaatggattttttttttctatcacatagtcaggctgcaaattttccaaacttttatgctctgcttcccttataaaactgaatgcctttaacaacaaa

SEQ ID NO: 620289 - DNA, 324 bp, Homo sapiens
caccgcacgctatccggtcaatgacacccttcacgagatgaagctggtgtgtgagtcctacaaggttcaataagagcgcgcgaggctttttgaaccctggagccaggagcacacctacctcgacaagcttaagatctcctcggccagcaggacacccaaggaccagagcctgtagcacaagctggaacacgacgtcagcgtcctaaagcagtggagctcagccttccagtacagggcgacattcagaagtcttgagataccgtacggtatcagataagcgaaccgaatagcttgccggggaccatgctggaaatcgctataatc

SEQ ID NO: 620290 - DNA, 187 bp, Homo sapiens
cgttctgaagaacgtgtgcaatcaagttaggagccaacgatcaccgtcatgtataggaacccagtaattattgaggggtggtgctgtatcctgcacgatcctgatacgagtgggtgaagaagaagaaagccaggatccccacactaccaacgatcagaagtttgcccaacagggacacgaatgttca

SEQ ID NO: 620291 - DNA, 233 bp, Homo sapiens
gggtgatctagaggatcctggcaggtctctactgggccaggcccggtttcaggtctcagtccagtttctcctaacaccgggctcagccggaaggtgccacatacacggattctaaacacggaaatattaaatactggcggcagaacagctaatttatggtctggacactaactctggggtctcagaaagatctagctattacgacttttccttcttttttttttttttttttt

SEQ ID NO: 620292 - DNA, 119 bp, Homo sapiens
gactctagaggactcccctctctctgtggggggcatgtccggcgggatgcggtgagccacggcactcactccctcctccatcgagctgtcccgcagggcctccggcagggcgggcaggt

SEQ ID NO: 620293 - DNA, 817 bp, Homo sapiens
agcctcagcacatctccctttctgttttcccctcaagttctcttcacccactcaccttctcctgtggtgataagctgactctggatcagttaaagatgaggtgtgactccctcatgctctgagtggtgaggcttcaagccttaaagtcagtgtgccctcaaccagcacagcctgccccaattcccccagcccctgctccagcagctgtcatctctgggtgccaccatcggtctggctgcagctagaggacaggcaagccagctctgggggagtcttaggaactgggagttggtcttcactcagatgcctcatcttgcctttcccagggccttaaaattacatccttcactgtgtggacctagagactccaacttgaattcctagtaactttcttggtatgctggccagaaagggaaatgaggaggagagtagaaaccacagctcttagtagtaatggcatacagtctagaggaccattcatgcaatgactatttctaaagcacctgctacacagcaggctgtacacagcagatcagtactgttcaacagaacttcctgagatgatggaaatgttctacctctgcactcactgtccagtacattagacactaggcacattggctgttaatcacttggaatgtgtttagcttgactgaggaattaaattttgattgtaaatttaaatcgccacacatggctagtggctactgtattggagtgcacagctctagatggctcctagattattgagagccttcaaaacaaatcaacctagttctatagatgaagacataaaagacactggtaaacaccaatg

SEQ ID NO: 620294 - DNA, 1228 bp, Homo sapiens
  misc_feature (817)..(817): n is a, c, g, or t
ccttctttcttacatatctggtacctgacctccactgtcccgcgcggggtggtttaacacactaaactggtgcctgatcccacatttctcaacggggaaggtccccagacgtggtcgtcgtgtgtttataatcgtccacgcgatctcgtgctcaccatatgagaccctcgccctcgtttccctgtctctactacgttctccgtctggtggatgagcccacgacgtacccttttgcccacatgtctgttgggagaatgcgttcttctcccccacgaaagaagaaaatttgttgttgaaggaatttctggcgcgatatactggggccgccacatggagactcgttgttactcgcgcctctagagaaagcttgttctcctctcctttttccatggaacgcgaatggttgtgtccacacaccccccctcagatgcacatcacattacatgccgcctttcttactaaccacagaggcggcttttttccctcctccaaaagaccccacactataggggccacccccagagggggggcgaaaaaacaagggggggctcccatattatccgcgccccttcttatttcaccgtgccccccgtgcggttgtaaaaaaatagtgggtgtatagtaccacacatcttatgagtgtgcgctttttggtatcactcatggtgctcggtgccacacacatttttggtgtacctttcgtgggggctattcccccccacacatttctcaggcttttctctctgtcccgcacactattctccttctcatttgtacattgggggcgtcccacagaggaaaaaggatattcttgtgngagagctccacagagaggctgtgccaacctgagacagcgcccattgccagcgcgtcttcagtaggggcccaccaccggcctggcgcatatttgttgaccccctgtcccctgcgttgcctgttccccctgcgcatcttctgtctctggtggtgcccccgaggtggtccgcggggacacctgcctcggcgtggcttaagaggggcctggggtctaagggcctggcgatgaacactggcctccccgggggaacttcagaacttagggtccccagaccaccagaccccagaaaacccttggcgccccaccagaaagatggggtccacatccagaggcttgggcacggggtcaccccccatttgggatggttgaaaaccgtatttttcttaaaaattaaaaattttttaatcccca

SEQ ID NO: 620295 - DNA, 249 bp, Homo sapiens
tcctaaaaaaacccaaaacccccaattttggttttgaggaccggaatatcccggaaaaaaattttaaacaggtttgttttcagccctcaagggaaaaaccagtggtgggtttttttttagttgccaacagttggaagtttgctgattatttatgacccgaaaaaaaaaatttttttttttaaaaaaacattttgttacataaggaagacttttttaaacaatggaataaattatggcatttttattgga

SEQ ID NO: 620296 - DNA, 1601 bp, Homo sapiens
  misc_feature (501)..(501): n is a, c, g, or t
  misc_feature (682)..(682): n is a, c, g, or t
tggacctggggcaaaccgtttcaattggtgtaccagtaggccaaggggggaggacaaggccccaaaacccagccttttctctccgtgatgtgccccgggacctgtgtggttgcctgtgggccagtccccatgtgccgtgccccaagcccgtgaggcccacaaggctcccaaagaaggaggtgggaacaaaaagtgggggtggttgtgcagctctcacccccagagaagtctctcagggagaggaaaaaacacaggggcctagttgtgaattttagccctttggagaaaatctccattctctcgcgggagtgttgtgcaccccgtgtggaacctttcttctcagaaatctcctcctgtggttctctcttcggtggtccggctccgtagaagtgtgtggacacgccccccgtgtggaacttctcttgggtcggcgtggtcccatataccctctcatctcttttttctcccacccatgtgtcgtgtgcggaggtctctctcacncctgtgtgtccccacagggtctctgtcgacacagcagtctgtgtgggaaaaatctcctctcagagggcgtggtttaactcctctctctgtgaggggggtgtgtaggaaactctctccgaggggggctccccacgctgtgtgggcacccaccccaagagaccgggggttctccccagcacanaactctccccatgctctcttttatgtgtgacactcctatatctctccccgagagatggtgctcccgcgaggtcgtcacaccccacaactcctgttgtggtgcggcgcggcgtcacctcttctccaattgtgtgaacgccccccaccgaggggaaggagcccttcctctctgctcttctcaccacccctctttttcgcactgttcttcgagacttcgttcggcgttaggagaagaggcgtctccccccgccgcagatctcctacatggtaggcatctcctcgacctagtggaggacgtagtagccgcccccccctttttgttgtagaaggcgccccccccataccaccaccccgccgtgggagctagtgggttttgccccccaggcaccgctcgcgcctcagtcggcagagagtagttggtcgtctctccactgcacagacccactatgtggtgtgtccctctgtcttgccgccgctttgtttttttcacgaacgcccgccgggcggaagaagagctgtctttccaccacccaccgggcagcgaacaacctgggggggcggcaccgcccgtgccccgcaaggtgtggtccccacatgagtgctttcccccagcaacaccggagggcggggatctctataaggagggagcctcaccccacagcgaggcgggggctacacacatttcgtgggccgcgccccgtgggtgtctttttcccccccccccgattgttttgcccccccatcaaacgggggtggggggggggggcctcatcacgaaggaagttaattcccccccccttgatgtggggcagcactccttcttctaacagtctattttccacgcccaccgtcccacgaatttatctttcgccctcgcgaaggaatatatacactgtcgggcgttcaacaccccaccggag

SEQ ID NO: 620297 - DNA, 237 bp, Homo sapiens
tacaaatgacataaacctagccatctacagctacttatataacttcatacagatacatgaattaggctaaaatgcactataatatatggtagactatcaggaccagtctccttcgtacatcacaaaatacattttgatatcccaaagaagcaagaatagcacgtaggcgttataaacctaactaatctacagctacaaagttctactcttgatagcatttattttactggggagtct

SEQ ID NO: 620298 - DNA, 703 bp, Homo sapiens
tggtaaagcaagttgcaaggtaggggttgacatcaaagtccatgcttttgccataaaaaagaaggaaatcatgtgctttacagcaatacagatggagctggaggccatgattctaagcaaattaacacaagtacagaaaaccaaatatcatatgttctcactcataaatgggagctaaacattgcatacacgtggacaccaagaagacatggatacacattcgggcctacttgagagtgaagggtaggaggagggtaaagattgaaaaactacctatcaggtattatactgattaactgggggacaaaattatctacataccaagcccccaagacacacaatttacccacggaacaaacccgcatgtgtacctcttgaacctaaaagttggaaagaaaaaaaacaaacaacaacagcaacaacaacaaataaagtctatgcttttaacataaggttatatgcatgtaacagacatttactgaggcactggggagagtaagacaaggtctctatcttcaattatgataaaacgccacataatgttcattttttgtttgtgcttgttttgagacagtgtctcattctgttgtccaggctggagtgcagtggcgcaatcttggcccactgcaacctctgcctcccacgctcaggtgagcctcccacctcaacctcccgagtagctggtactacagacactcaccac

SEQ ID NO: 620299 - DNA, 622 bp, Homo sapiens
  misc_feature (28)..(28): n is a, c, g, or t
  misc_feature (81)..(81): n is a, c, g, or t
  misc_feature (92)..(92): n is a, c, g, or t
  misc_feature (97)..(97): n is a, c, g, or t
  misc_feature (134)..(134): n is a, c, g, or t
  misc_feature (152)..(153): n is a, c, g, or t
  misc_feature (173)..(173): n is a, c, g, or t
  misc_feature (181)..(181): n is a, c, g, or t
  misc_feature (211)..(212): n is a, c, g, or t
  misc_feature (215)..(216): n is a, c, g, or t
  misc_feature (229)..(229): n is a, c, g, or t
  misc_feature (231)..(231): n is a, c, g, or t
  misc_feature (250)..(250): n is a, c, g, or t
  misc_feature (261)..(261): n is a, c, g, or t
  misc_feature (277)..(277): n is a, c, g, or t
  misc_feature (348)..(348): n is a, c, g, or t
  misc_feature (575)..(575): n is a, c, g, or t
tagcattattctcactcagaaacatganaccagtgtgtgaattacaacagtaaattcacattcaagatgaatatgcaatanacatttataanaaganatcaactatttacatagggctataaaatacttttaanaatatgtacatggttatnnaaaaggggggggtcaatttnagtaaganattatatgggtgggggggtgggcaccattnnggnntgggttttggggngngaggttggggcttgtggcncaggggggggngcaatggggcaatctngactcactgcaacctccacctcctgggttcaaggctattctcctggcctcgaggcatcccaaagtagctgnggattacaggcgacccgcgcaccacacccaggctaatttttttggtatattctggttggagggtgggggtttcaccatggtgtgggcgcgagggcgtgggtgcgtgtggaggctcgcgtggacttcagggtggatccacccacctcgggcctcccaaagtggctggggattacagggtggtggggccaccggcggcccgggcctatatcccccataaattttctctnttttggtggacaggagtcttggctctggacaccccagggctgggact

SEQ ID NO: 620300 - DNA, 815 bp, Homo sapiens
  misc_feature (745)..(745): n is a, c, g, or t
  misc_feature (772)..(772): n is a, c, g, or t
  misc_feature (774)..(774): n is a, c, g, or t
ccctggtgtgattccgtcctgcgcggttgttctctggagcagcgttcttttatctccgtccgccttctctcctacctaagtgcgtgccgccacccgatggaagattcgatggacatggacatgagccccctgaggccccagaactatcttttcggttgtgaactaaaggccgacaaagattatcactttaaggtggataatgatgaaaatgagcaccagttatctttaagaacggtcagtttaggggctggtgcaaaggatgagttgcacattgttgaagcagaggcaatgaattacgaaggcagtccaattaaagtaacactggcaactttgaaaatgtctgtacagccaacggtttcccttgggggctttgaaataacaccaccagtggtcttaaggttgaagtgtggttcagggccagtgcatattagtggacagcacttagtagctgtggaggaagatgcagagtcagaagatgaagaggaggaggatgtgaaactcttaagtatatctggaaagcggtctgcccctggaggtggtagcaaggttccacagaaaaaagtaaaacttgctgctgatgaagatgatgacgatgatgatgacgaggatgatgatgaacgatgatgcatgatgatgacttttgatgatgaaggaagctgaagaaaaagcgccagtgaagaatcttatagagatatcccggcaaaatggcaaaagtcatccgatgggaggtccaacctcttcaccngatcaagggagatcttcagaaaggaancntaaaccaaggcttctgtcgaattctcaccgccctttaaagg

SEQ ID NO: 620301 - DNA, 1644 bp, Homo sapiens
  misc_feature (562)..(562): n is a, c, g, or t
  misc_feature (669)..(669): n is a, c, g, or t
ggctctgtcaccccgggccacagcacagcccaggccatgctcctgttctcagtgttgctgctcctgtccctggtcacgagaactcagctcggtccacggactcctctcccagaggctggagtggctatcctaggcagggctaggggagcccaccgcctcagccccctcatccccccagcccagtcagtgaatgtggtgacagatctattttcgagggaagaactcggtattccagaatcacaggggggatggaggcggaggtgggtgagtttccgtggcaggtgagtattcaggcaagaagtgaacctttctgtggcggctccatcctcaacaagtggtggattctcactgcggctcactgcttatattccgaggagctgtttccagaagaactgagtgtcgtgctggggaccaacgacttaactagcccatccatggaaataaaggaggtcgccagcatcattcttcacaaagactttaagagagccaacatggacaatgacattgccttgctgctgctggcttcgcccatcaagctcgatgacctgaaggtgcccatctngctccccacgcagcccggccctgccacatggcgcgaatgctgggtggcaggttggggccagaccaatgctgtgacaaaaactctgtgaaaacggatctgatgaaagngccaatggtcatcatggactggaggagtgttcaaagatgtttccaaaacttaccaaaaatatgctgtgtgccggatacaagaatgagagctatgatgcctgcaagggtgacagtggggggcctctggtctgcaccccagagcctggtgagaagtggtaccaggtgggcatcatcagctggggaaagagctgtggagagaagaacaccccagggatatacacctcgttggtgaactacaacctctggatcgagaaagtgacccagctagagggcaggcccttcaatgcagagaaaaggaggacttctgtcaaacagaaacctatgggctccccagtctcgggagtcccagagccaggcagccccagatcctggctcctgctctgtcccctgtcccatgtgttgttcagagctattttgtactgataataaaatagaggctattctttcaaaaaaaaaaaaaaaaaaaaaaaaaaaaaaaaaaaaaaaaaaaaaaaaaaaaaaaaaagaggggggggcggccataaaaaatttccccggggggggacaaaagataagggaacacccagattttgttgaaaccaagggggccccccaaaaaggggacggcataattagagagcaggaagagacggcgcgccgcgggattaagaaaagagcgggagaggagggaaaaacaacggcgaccacggaggagacacaaccttggggggaggaagcaccccacacaagaacggggggggggggggacacaaaataggtgggggagccaaaaatacatatctaggagaaatattataagatcactggcggagtggtaaaataataaaaattttgaaaagaccgatgattattgtggtggtgtaaaaacaagagagagagcatagaatatgatgggatggatgaagaaaagaagattgtggtaaaacgaggaggataattataattatgaagagaaaaatttttttacagaagggc

SEQ ID NO: 620302 - DNA, 159 bp, Homo sapiens
  misc_feature (121)..(121): n is a, c, g, or t
  misc_feature (139)..(139): n is a, c, g, or t
  misc_feature (159)..(159): n is a, c, g, or t
attcttccgtattctgttacatcaaccaaaagttttgaagtgatccaagttatccatggcaaaccgttggatatggtggggccagtacaaatacctattaccttggttgggaataagaacnacctgcatatggaaaggncgatcagttatgaagaagcn

SEQ ID NO: 620303 - DNA, 560 bp, Homo sapiens
  misc_feature (24)..(24): n is a, c, g, or t
  misc_feature (62)..(62): n is a, c, g, or t
cttgggccaccagccctaaatccncgggttgtaggagcttttgcctcaggcaaaagctcctncaccaccaaaaggacctagttctgtagaagacattaaagcaaaaatgcaagcaagtatagaaaaaggtggttctcttcccaaagtggaagccaaattcatcaattatgtgaagaattgcttccggatgactgaccaagaggctattcaagatctctggcagtggaggaagtctctttaagaaaatagtttaaacaatttgttaaaaaattttccgtcttatttcatttctgtaacagttgatatctggctgtcctttttataatgcagagtgagaactttccctaccgtgtttgataaatgttgtccaggttctattgccaagaatgtgttgtccaaaatgcctgtttagtttttaaagatggaactccaccctttgcttggttttaagtatgtatggaatgttatgataggacatagtagtagcggtggtcagacatggaaatggtggggagacaaaaatatacatgtgaaataaaactcagtattttaataaagta

SEQ ID NO: 620304 - DNA, 1138 bp, Homo sapiens
  misc_feature (562)..(562): n is a, c, g, or t
  misc_feature (669)..(669): n is a, c, g, or t
ggctctgtcaccccgggccacagcacagcccaggccatgctcctgttctcagtgttgctgctcctgtccctggtcacgagaactcagctcggtccacggactcctctcccagaggctggagtggctatcctaggcagggctaggggagcccaccgcctcagccccctcatccccccagcccagtcagtgaatgtggtgacagatctattttcgagggaagaactcggtattccagaatcacaggggggatggaggcggaggtgggtgagtttccgtggcaggtgagtattcaggcaagaagtgaacctttctgtggcggctccatcctcaacaagtggtggattctcactgcggctcactgcttatattccgaggagctgtttccagaagaactgagtgtcgtgctggggaccaacgacttaactagcccatccatggaaataaaggaggtcgccagcatcattcttcacaaagactttaagagagccaacatggacaatgacattgccttgctgctgctggcttcgcccatcaagctcgatgacctgaaggtgcccatctngctccccacgcagcccggccctgccacatggcgcgaatgctgggtggcaggttggggccagaccaatgctgtgacaaaaactctgtgaaaacggatctgatgaaagngccaatggtcatcatggactggaggagtgttcaaagatgtttccaaaacttaccaaaaatatgctgtgtgccggatacaagaatgagagctatgatgcctgcaaggtaactagggggtacctccctcaccttataggtcctcaccctctgggaactgccagtgcaagggtattctctctctgctgcaaatagacaattctgagtctggaaaatgtatgggaattagggcctgcagccatgagaatgagtatgtggatttcagatcctctggagctgtgagtgagcaccctgggagtcaatatgctgcaaccctgcttaactatttctgatcttcttcaggtacactaggtaaaaaggacgccaaggcttttctcatttctgggaattctttttaaaaatccaaggaggatttggtatctatataagaagtcattttagttcattaacttagaaacctttgttgagcata

SEQ ID NO: 620305 - DNA, 253 bp, Homo sapiens
ggcgcagtgtgctggatatcggtagctaggctacctggagccggcaatattcacaggagctgtggcatgtagcagaccgaggacccaacaggtaatgcaagaggctagagagcctgtgatgtactgcagctgaagggatagtttgcagcagttaggtggtgtgccagagcctgtgagactcagagctgacaacggcagctggggttcctaggcccctgctaggttcacagctggagctgtaggagtgcgaggg

SEQ ID NO: 620306 - DNA, 756 bp, Homo sapiens
ccctggtgtgattccgtcctgcgcggttgttctctggagcagcgttcttttatctccgtccgccttctctcctacctaagtgcgtgccgccacccgatggaagattcgatggacatggacatgagccccctgaggccccagaactatcttttcggttgtgaactaaaggccgacaaagattatcactttaaggtggataatgatgaaaatgagcaccagttatctttaagaacggtcagtttaggggctggtgcaaaggatgagttgcacattgttgaagcagaggcaatgaattacgaaggcagtccaattaaagtaacactggcaactttgaaaatgtctgtacagccaaattcatcaattatgtgaagaattgcttccggatgactgaccaagaggctattcaagatctctggcagtggaggaagtctctttaagaaaatagtttaaacaatttgttaaaaaattttccgtcttatttcatttctgtaacagttgatatctggctgtcctttttataatgcagagtgagaactttccctaccgtgtttgataaatgttgtccaggttctattgccaagaatgtgttgtccaaaatgcctgtttagtttttaaagatggaactccaccctttgcttggttttaagtatgtatggaatgttatgataggacatagtagtagcggtggtcagacatggaaatggtggggagacaaaaatatacatgtgaaataaaactcagtattttaataaagta

SEQ ID NO: 620307 - DNA, 150 bp, Homo sapiens
ctatgtactccacaaacagcaacatgtgcgtatgacccgcgtaaagaccacggggatcgaggagacacacttcaccatcaaggacctacacttacaagaatgttaagatgtagggctggtcagctggtctgacgcggaagacagtggatc

SEQ ID NO: 620308 - DNA, 936 bp, Homo sapiens
tttctggtatcgtatatagatttcttcactgggctttttcttcagcttcctcatcatcaaaaccatcatcaacaccaagatcaaaaggacaagaatccttcaagaaacaggaaaaaactcctaaaacaccaaaaggacctagttctgtagaagacattaaagcaaaaatgcaagcaagtatagaaaaaggtggttctcttcccaaagtggaagccaaattcatcaattatgtgaagaattgcttccggatgactgaccaagaggctattcaagatctctggcagtggaggaagtctctttaagaaaatagtttaaacaatttgttaaaaaattttccgtcttatttcatttctgtaacagttgatatctggctgtcctttttataatgcagagtgagaactttccctaccgtgtttgataaatgttgtccaggttctattgccaagaatgtgttgtccagaatggaaataaaactcagtattttaataaaaaaaaaacaacgaaaaagaagaacacatcaaacacgactgaaaagcaccctgaacagcactggaatgggcacgcgaaaacgaataagaccgagcaccacaccgctcgcagcccgtgccaggcacccagccgcgcccacacctcgtagcgttcccacagaggcgcacccacgagcttagcatcaggccaggagaaaagcacgaaccaaagccgccccaatagcagcgcgaagccacccacaaaagggcacatgggaggggagaaccaaagcttgcacgcaacacaagcgaaggagcacccacacctggacaaccaagatccggcgcacactccacggtgcagagaagcaacccgctccgcgcgccaatccggcaccacggcaccaaagcgatgccggacgagtatacaggacggacacagcgaagcagtaaaacacggaagaaaaag

SEQ ID NO: 620309 - DNA, 497 bp, Homo sapiens
acagtaaatatgaagaccgttctaactgtcacatgagtcgagttcagacgatgagatactacccttccacattgcttggaactatccaaatagtggggaatttgaatttacgaagctgcaggttcttaataaatacatctcaatgttctccaaggactagcaattcgctaaatatctcccagagttccagggaagaggaccttctgcagggatggctgcagggctgctggatcctacctttgctgctgtcttctcttcatttgggttcttcttgcttcgtctcatcctgaactaaccctctccatgtgccttggcctacagattctgtgtaccaaggcagagaatgccaggatggttgtgaacattgataatgccaaactggctgccgatgacttcagggccaagtgagttcagtcggggggctggagctggggaggacctgtcctcataggctctggggcaactttccattagtttcacggagggttggaaagtgc

SEQ ID NO: 620310 - DNA, 537 bp, Homo sapiens
  misc_feature (19)..(19): n is a, c, g, or t
gcgtgcgtaactccacagntctttagggtaaaacagagctgcgggacgctggaggacaaaaccaactttccagggaagccgaggagaagtcatgccttcaaaaaggtggttctcttcccaaagtggaagccaaattcatcaattatgtgaagaattgcttccggatgactgaccaagaggctattcaagatctctggcagtggaggaagtctctttaagaaaatagtttaaacaatttgttaaaaaattttccgtcttatttcatttctgtaacagttgatatctggctgtcctttttataatgcagagtgagaactttccctaccgtgtttgataaatgttgtccaggttctattgccaagaatgtgttgtccaaaatgcctgtttagtttttaaagatggaactccaccctttgcttggttttaagtatgtatggaatgttatgataggacatagtagtagcggtggtcagacatggaaatggtggggagacaaaaatatacatgtgaaataaaactcagtattttaataaagta

SEQ ID NO: 620311 - DNA, 786 bp, Homo sapiens
  misc_feature (239)..(239): n is a, c, g, or t
  misc_feature (535)..(535): n is a, c, g, or t
  misc_feature (538)..(538): n is a, c, g, or t
gttggcggcctgcaccgcggacatgaactctcagctgagtctgagactaacgagacaatacaggccgatgtcgcctgtcgattccgccttgtgctccgtctcgatgatgccgacggaggtagccattgcgtccatggagacgttctactagaggcgggcatgggccctcgatgcctgggcccctactggtcctactctgagtctgctctgattgtcctgctgtcctctgccgtggctgnattgtcgtaatgggccgtcatggcagacgttggggcaggaccgtccaaacaagcagcccctcaattttgggaaggcatggcggaacgacaggaaagataagcgcttcgatatgtggctgtaatataatcgcgacgcgagcgactgcaccattctgatcagtgcgtgagcgtcggcgtcgagaatgttccgtgggttctgccgacatagccgtacaatcttactcacgcaacggcgtttggctttgagggctgggggtccacctatcgaacccatggaatcgctccccatagtcgancantagacctaacagaggcctgcatatgcgagcgtattctactaagatagctggcaaatgtgcgcatctcaaggaggccgggtgcacaacttctcagcgccccaagagagtatttccacaagggaccgcccccggattggtgagttacctacgcattagcgatacccagagcacggcgtggattgcatcgaaagatttttacctcgagggaatttagaccgttgacttttgtacaaaggcgcaaaaggtag

SEQ ID NO: 620312 - DNA, 298 bp, Homo sapiens
aatgttgtcactctgcattataaaaaggacagccagatatcaactgttacagaaatgaaataagacggagtgagaactttccctaccgtgtttgataaatgttgtccaggttctattgccaagaatgtgttgtccaaaatgcctgtttagtttttaaagatggaactccaccctttgcttggttttaagtatgtatggaatgttatgataggacatagtagtagcggtggtcagacatggaaatggtggggagacaaaaatatacatgtgaaataaaactcagtattttaataaagta

SEQ ID NO: 620313 - DNA, 858 bp, Homo sapiens
ctgtgaaactgctggggaaaatataatacttgctggcctgaatgacgttatttttgacccgaagattggcgttgttgtcacccctggggaatgcggtgtattacaagatttttccgctgtgctcagatgaactcctggttccctactggcgggttctccccctgtccctattaggagatttcttcctgtgctccgtgtcacacactttcgctttcctgggttactacggcttagttatacccgtcgtgtgttgcgcctgaattctttgcggttaactttgtcgccaatgtgcatggccccgcctccctatttgctgagaggaagcaaagtttggctcaaacaacttttagaaaagtttcattaccgccgcctttcctgaaggagcttggtcccaccatgctggaaaactttggtctgaagtgccactgtatacgccatcgccctatagatggtcaaaagcgggcctcactatacgcggaaaacaatccccaaatgtttggagtcatgtagtactttcgccccgggcatagggtggtccttcacacaatcttggcgagagaaactctttttactcatctgtacccaggccccaccaaatgagatatataaatctaaaatggaatggttttctttcctccccagagccccttggcggcaataacttaaaaggcacagcacctagtttattatgaataactcagcccatgacaccaattgatagtgactgctcttgcagagttcgaatataccaccccctgatccccattaacatactcaaagataaattgatggaaaaaaatttttaaatagtttcaccccagtttttccccccccatatcaaagtttcccccaacatac

SEQ ID NO: 620314 - DNA, 940 bp, Homo sapiens
  misc_feature (27)..(27): n is a, c, g, or t
  misc_feature (36)..(36): n is a, c, g, or t
  misc_feature (88)..(89): n is a, c, g, or t
  misc_feature (103)..(103): n is a, c, g, or t
cagaacggaaaaccctaaacccaaggncctgtcgtngagacaagcaaatgcagcagtataaaaaggtggttctcttcccaaagtgganngccaattcatcatnatgtgaagattgcttccgatgatgaccagaggctattcaagatctctggcagtggaggaagtctctttaagaaaatagtttaaacaatttgttaaaaaattttccgtcttatttcatttctgtaacagttgatatctggctgtcctttttataatgcagagtgagaactttccctaccgtgtttgataaatgttgtccaggttctattgccaagaatgtgttgtccaaaatgcctgtttagtttttaaagatggaactccaccctttgcttggttttaagtatgtatggaatgttatgataggacatagtagtagcggtggtcagacatggaaatggtggggagacaaaaatatacatgagaatggaaataaaactcagtattttaataaaaaaaaaacaacgaaaaagaagaacacatcaaacacgactgaaaagcaccctgaacagcactggaatgggcacgcgaaaacgaataagaccgagcaccacaccgctcgcagcccgtgccaggcacccagccgcgcccacacctcgtagcgttcccacagaggcgcacccacgagcttagcatcaggccaggagaaaagcacgaaccaaagccgccccaatagcagcgcgaagccacccacaaaagggcacatgggaggggagaaccaaagcttgcacgcaacacaagcgaaggagcacccacacctggacaaccaagatccggcgcacactccacggtgcagagaagcaacccgctccgcgcgccaatccggcaccacggcaccaaagcgatgccggacgagtatacaggacggacacagcgaagcagtaaaacacggaagaaaaag

SEQ ID NO: 620315 - DNA, 180 bp, Homo sapiens
ttctactgggcctctgcttatccctcttcatcgtttctttcactatccaattttgcctactgcttatctcctactctcccttctctttcgcttttcccactttcgctcattcttttctccttctctcttctccacttctttccgctcttctttttcccccgtttctcttctcgtctttcc

SEQ ID NO: 620316 - DNA, 1300 bp, Homo sapiens
ccctggtgtgattccgtcctgcgcggttgttctctggagcagcgttcttttatctccgtccgccttctctcctacctaagtgcgtgccgccacccgatggaagattcgatggacatggacatgagccccctgaggccccagaactatcttttcggttgtgaactaaaggccgacaaagattatcactttaaggtggataatgatgaaaatgagcaccagttatctttaagaacggtcagtttaggggctggtgcaaaggatgagttgcacattgttgaagcagaggcaatgaattacgaaggcagtccaattaaagtaacactggcaactttgaaaatgtctgtacagccaacggtttcccttgggggctttgaaataacaccaccagtggtcttaaggttgaagtgtggttcagggccagtgcatattagtggacagcacttagtagctgtggaggaagatgcagagtcagaagatgaagaggaggaggatgtgaaactcttaagtatatctggaaagcggtctgcccctggaggtggtagcaaggttccacagaaaaaagtaaaacttgctgctgatgaagatgatgacgatgatgatgaagaggatgatgatgaagatgatgatgatgatgattttgatgatgaggaagctgaagaaaaagcgccagtgaagaaatctatacgagatactccagccaaaaatgcacaaaagtcaaatcagaatggaaaagactcaaaaccatcatcaacaccaagatcaaaaggacaagaatccttcaagaaacaggaaaaaactcctaaaacaccaaaaggacctagttctgtagaagacattaaagcaaaaatgcaagcaagtatagaaaaaggtggttctcttcccaaagtggaagccaaattcatcaattatgtgaagaattgcttccggatgactgaccaagaggctattcaagatctctggcagtggaggaagtctctttaagaaaatagtttaaacaatttgttaaaaaattttccgtcttatttcatttctgtaacagttgatatctggctgtcctttttataatgcagagtgagaactttccctaccgtgtttgataaatgttgtccaggttctattgccaagaatgtgttgtccaaaatgcctgtttagtttttaaagatggaactccaccctttgcttggttttaagtatgtatggaatgttatgataggacatagtagtagcggtggtcagacatggaaatggtggggagacaaaaatatacatgtgaaataaaactcagtattttaataaagta

SEQ ID NO: 620317 - DNA, 1303 bp, Homo sapiens
ccctggtgtgattccgtcctgcgcggttgttctctggagcagcgttcttttatctccgtccgccttctctcctacctaagtgcgtgccgccacccgatggaagattcgatggacatggacatgagccccctgaggccccagaactatcttttcggttgtgaactaaaggccgacaaagattatcactttaaggtggataatgatgaaaatgagcaccagttatctttaagaacggtcagtttaggggctggtgcaaaggatgagttgcacattgttgaagcagaggcaatgaattacgaaggcagtccaattaaagtaacactggcaactttgaaaatgtctgtacagccaacggtttcccttgggggctttgaaataacaccaccagtggtcttaaggttgaagtgtggttcagggccagtgcatattagtggacagcacttagtagctgtggaggaagatgcagagtcagaagatgaagaggaggaggatgtgaaactcttaagtatatctggaaagcggtctgcccctggaggtggtagcaaggttccacagaaaaaagtaaaacttgctgctgatgaagatgatgacgatgatgatgacgaggatgatgatgaacgatgatgcatgatgatgacttttgatgatgaaggaactgaagaaaaagcgccagtgaagaaatctatacgagatactccagccaaaaatgcacaaaagtcaaatcagaatggaaaagactcaaaaccatcatcaacaccaagatcaaaaggacaagaatccttcaagaaacaggaaaaaactcctaaaacaccaaaaggacctagttctgtagaagacattaaagcaaaaatgcaagcaagtatagaaaaaggtggttctcttcccaaagtggaagccaaattcatcaattatgtgaagaattgcttccggatgactgaccaagaggctattcaagatctctggcagtggaggaagtctctttaagaaaatagtttaaacaatttgttaaaaaattttccgtcttatttcatttctgtaacagttgatatctggctgtcctttttataatgcagagtgagaactttccctaccgtgtttgataaatgttgtccaggttctattgccaagaatgtgttgtccaaaatgcctgtttagtttttaaagatggaactccaccctttgcttggttttaagtatgtatggaatgttatgataggacatagtagtagcggtggtcagacatggaaatggtggggagacaaaaatatacatgtgaaataaaactcagtattttaataaagta

SEQ ID NO: 620318 - DNA, 1300 bp, Homo sapiens; identical to SEQ ID NO: 620316

SEQ ID NO: 620319 - DNA, 314 bp, Homo sapiens
  misc_feature (22)..(23): n is a, c, g, or t
  misc_feature (25)..(25): n is a, c, g, or t
  misc_feature (161)..(161): n is a, c, g, or t
  misc_feature (193)..(193): n is a, c, g, or t
  misc_feature (205)..(205): n is a, c, g, or t
ggcacgagcatcttacacctcnncnctatagctgggactataggtgtgtgccaccacacccggctaattttggtatttttcatagagatggggcccccactatgctgcccaggctagtctcaaactccggggctcaagcagtcctccggcctcagtctccnaaggtgctgagattacaggtgtgagtcaccangcccagccaganttgggattttatggcaaatgtggtctgaagtggggatggccagttggatgtgtcaacttacctatgtgacagttccagttattcaatcaaacactaatcagtgtgtgga

SEQ ID NO: 620320 - DNA, 898 bp, Homo sapiens
tatgctgtacatgcaaatcactgagtgagcagataaaagtatggacagccaacccccaaaattggtagaagatgaagatgatgatacattctcctatactgtagaatagcagctcaagacttgttgctggctgtggccacagatttccacgaatgaacagtgcagcagccctggctgctgccgccaattcgacatttacacagaagctgagcaaaccaaaaacagtggccactgagcactggtggaaagatccatgaggcatgcatgcttgcccttaggctcagtgcacggccatcatcactgaaagtgtgaaaaatggcagagatccactttatgacatgcatgggttcatgaccaaatgtcatcccttgcatgacacttcaagacctctcaaggtgtactcgctttcactactttgggccgcggcacattatgggctagtcaggcggtatcaacttgtaagctaatggtacccctgactctgatcaacagacaagttcctaaaatgggcagaatgtatacgtgggcttccaccgagacacaagccccccatcaagttccgaatttgctggccagggacagccaatctggcgggttattggtggacccaagctggaacggttctcagagcaggtacccacagtgctacacggacgttctcccacgattccattaatgggctcactttcaacataacacgaccagatcagctcaagaggtactccacctgtgtgatgggaaaacactgtgcatcgctgtacacatcgaacccgaattaacaggcggatgaacaagaacatctgccgtcaccacggtgtgtgtacagtaagcaagagcccctgaaaccaacgttcgacataacgacggacactataactattgtccatacactggctac

SEQ ID NO: 620321 - DNA, 178 bp, Homo sapiens
gtagcatcaaatcaagttccaaatctatcagctcctctagtctgtccaaggcatcattgagtttcctccttctttccttacgccaggagacaagacttgccgacatttgctcaccagtacgtttaccctaggtattttaggtatcaatttagtgtctgtgacccagagggatacaagc

SEQ ID NO: 620322 - DNA, 109 bp, Homo sapiens
gattcgtgtgagcccaatgacgagtttctcaactggcttagcgtagggctcttggtagtcgggtaggcccttcatatcgtcagtgaccaggcacattgcggtcgacgag

SEQ ID NO: 620323 - DNA, 452 bp, Homo sapiens
aaacaattcaatgcttgtagctggaggcatgggcaaggggggtccccaggtacaaaacaattcaatgctttttttttttggtccaaaataaaacctcagctagctctgccaaaaaaaaaaaaaaaaaaaaaaaaaaaaaaaaaaaaaaaaaaaaaaaaaaaaaaaaaaaaaaaaaaaaaaaaaaaaaaaaaaaaaaaaaaaaaaaaaaaaggggggggcggcaaaaaacatatacctcactgggaggccccaaaatgaccgcccacaccctatttttgatgaaaaagagagggcgcccccaagaaaggacgcggctttatataataataggaagcagaggcgccgagccattaaaaaaacgccgtgagtggagagacaaacacggacaagggcgacttttggtgaagagacacaccaccagcctgtgggcgggggacaacataaggaggacc

SEQ ID NO: 620324 - DNA, 365 bp, Homo sapiens
atggtgtaatgtgatactcgctcaactctggtgcatcacgatgaatagatagtgatcgtaacaggccattcataaggtcttcatatgttagtgacatctccagacctcatagcataggtgtcatcagatcattcatcgattctcagatgtagtgagcgcgtatagctaagtggtattaggtaatagggcagtctaagctgtctgtacaagataagggtatcttgtcctacacggtcaatgaataaccctcgtaaggatcagtatgtgccctgcggtactctagagtggttgaatctgtctaggctagtcgtagcggcagctcgcagtagagatcaatatgcgctggtgtatattcgagcatgatc

SEQ ID NO: 620325 - DNA, 245 bp, Homo sapiens
aaaatgcagttttgaaacctgtcaggctcctgagctcaagctaaggcgtggggtgccgtgacatgcacatacacatcagatggcctgaagcaactgaagatccacaaaagaagtgaaaatagccttaactgatgacattctaccattgtgatttgtttctgccccaccctaactgatcaatgtattttgtaatctcccctaccctggggagggttctttttaatctcccccacgcttaagaaggt

SEQ ID NO: 620326 - DNA, 125 bp, Homo sapiens
cggtacaaggaagggatggagctgacttcgccaaggggggtggtgtgctgaaggatgggggaacacaccccctcagccctcgccatcatggaaaatgccaaggtcctggcccgttatgccagtat

SEQ ID NO: 620327 - DNA, 127 bp, Homo sapiens
cctcccacagtgctgggatgacaggcgtgcgcccgtgccgacctatttccttagtgacagtgtcttgatctgtcacccaggctggagtgctgtgctgcgatgactcactgcagccttgacctcgtga

SEQ ID NO: 620328 - DNA, 311 bp, Homo sapiens
gctcgacactcgagggggctgaggtgggaaaatgctctattacagtacaagattgaagataagaagattctcaggtttttatggttttaggtctaacgttgatggattaaagacttaaacgttagacctaaaaccatgaaaactctagaagaaaacctaggcatcaccattcaggacataggcatgggcaaggacttcatgtctaaaacaccaaaagcaatggcaacaaaagacaaaattgacaaatgagatctaattaaactaaagagcttctgcacagcaaaagaaactaccatcagagtgaacaggca

SEQ ID NO: 620329 - DNA, 356 bp, Homo sapiens
tggattatcttgcagaatgttatcacgtgagtcatggaatcaggagtcagtttcaagatggaccttagaggttatctggtccaacatcttcagaggatacagaggcttagaggggggaattaatctctctgaggcaaagcagtgtggaccagaatctaggtctcttcatcgcccccctgtgtcacatgtttccttccaatagaacagctgtctccttgatagaccacaaaaaaactttttgttagaccacaaaaaagcttaattcagataaacagtgctaattgatcatagaattaaagtcttggcctaatgagtggctaattgttttttagggatttaattcaagtccttagctg

SEQ ID NO: 620330 - DNA, 216 bp, Homo sapiens
actagtttacgtgaacggtagcaggagttcctggccacttggtgatttctatataggtcgacagagcaatccaatcactttatagcttcatctatctaggcatcatttcacatttaggcactggtttcctgggcatcgaattaaacaaagataatgtagcaatacttccatagataactcttttccaggcagtttggtcagtacatgtattcacgt

SEQ ID NO: 620331 - DNA, 925 bp, Homo sapiens
tccccttggcccataaatttttattgggcgggtcgggaaaaaagccggggggtaggggtcccttccttcccatccctctacccaaaaaacaccctccaagggacagaaaaacgccccagagccgtgtgctgtgcctcaggaggacctttggggggcagacaaagtgggtggatagtgattcttctcccggtgctccctcgtagcgaggcgtggggtgagggtggcaactcctcctgtgctccaggccgcgattgtgagtgctccagtgagccgctgtggttacctcctggtgattcgtgccgccctcactatcagcccttcgcacatctcgcccaggctgtggggtcatctcaaatcgccggcgtggattcaggcgccctgtggtaatatttgcgccaggtgtggggacctcacaaacgcgtcgcctctccgttttcgttgccgaggtggtgttcttctccaggggcagtctctaccagtgcactcagcctgtggtgacgtgcaggccctcaatctctcaagaaccccttggagagggtgtgccggccccgaccggggtgccagtaaaccacgtggggacaccgtggctctatcgtggagacttgccctcgcggggtgtgggccaagggaaccctccccgcggatcacaatttcctctaagctccgggcgtgggttgaccccgcggtgctacagcgcattccttacagggtttcttgctcgggccaattggcccctcattattgggggctccgcatttggacccacaaggactcctgggcgaagactcggtgcgcccgggcggcgggattcacccctccaacattgcctgtggctccccatttggccccctcaggcgtcttggtttccccccccaggggtcctcgcaaggggaggcacgcctccttaatggcgtcgatctggatt

SEQ ID NO: 620332 - DNA, 306 bp, Homo sapiens
  misc_feature (155)..(155): n is a, c, g, or t
ggctccacctgcgccgcgtgctgctgccagttggaagtcatgctgatcaccgacaccggcgtgcctgaccgctttatcgataccgacgattggggcggcgaagtcatgctgcgcctggatgatggctggtgcgcggcgctggatcgcgacacgangatgtgcacgatttatgagaagcggccgctgatctgccgggagttcgagatgggcgcaccggagtgcatcgatgagcgccaggggcttgcgacggtgtatcgctgattttgaaaaaccaacgatgagcaaatgtgggagcgggcttgcacg

SEQ ID NO: 620333 - DNA, 588 bp, Homo sapiens
  misc_feature (491)..(491): n is a, c, g, or t
  misc_feature (583)..(583): n is a, c, g, or t
ccaagaattcggcacgaggagaagttatattagtctttgtctgcagttgctcaaagactctcttttaaagtgcagagactatccacctcagctatagcaccgggctcagcactgtatttccagttatggaatacagttatttcatatatgttatattattcttaattctgtccctagttcctgctgctgaggaagtccatactcagcaggacagtctcctggtctgccatgaattcgaacacgatctgtgaagacagtgaaggaagctacatctgtgcatgggggctttggagaattattggcttgaagcaataagaggaacatctgggctgagtagtcctcgaagactctcatgtgattcaaaagtccttttcttccttattatttcctatcttgctctcaagcatctcctctggcagcagcaactggaactaaaagtgatttctctataacagcgagcaagtttctcatggcctttgctattaactctntcatgcctgctgacctgcaaaagaatcaggagggctggtgctggagcagatggcgcactgtgagtgatggtttagattctgcctggactcanaccat

SEQ ID NO: 620334 - DNA, 252 bp, Homo sapiens
  misc_feature (17)..(18): n is a, c, g, or t
  misc_feature (45)..(45): n is a, c, g, or t
  misc_feature (63)..(63): n is a, c, g, or t
  misc_feature (75)..(75): n is a, c, g, or t
gaaacattagactaatnntaagacgtccctctagaactaatggcncccgcgactccaaatatnctcgagataggnaaccccttgtttatcaaaaacacaaaataaaccggcatggtggcacatgcctgtaattcccagctcttgggaaggctgaggcaggcaaatcactttaacctgggaggcgggggttgtagtgagccaactcacgccattgtaccccgcctgggccaacaaaatgcaaacctttccaaa

SEQ ID NO: 620335 - DNA, 202 bp, Homo sapiens
agcaaactagatttatctagtgacatgagtaacacagcggagcacaaccgcgagcaagtctctcgagcgagtgcgcagcatatggggagcgtgtagagtcctcctagctagacccgacatggcacggtggcatcgagcgctgagtcgcaggtcacagtcagcttgatggctcggtcatctagcaggtagctagctttagcta

SEQ ID NO: 620336 - DNA, 212 bp, Homo sapiens
ggggggtttcccctttttttttaaattcccggggggggaaaaatttgggccgggaaaggggggtgttcccctgggggggggacttgggggcccaaggtttccccttttttttttacccccggctccttttttggttttgggggtttaagggggggggggggtttgttttttccgggggttttttttaattaaagggttttgttcccccccca

SEQ ID NO: 620337 - DNA, 109 bp, Homo sapiens
  misc_feature (27)..(27): n is a, c, g, or t
  misc_feature (47)..(47): n is a, c, g, or t
tttgatgaagaactgatgtcagcctgncaggtacctgtaatttattntatcatattattatattatatatcaagtaggacagtgaaaaatgtttccttgcaaacttgta

SEQ ID NO: 620338 - DNA, 218 bp, Homo sapiens
  misc_feature (143)..(143): n is a, c, g, or t
tttcggtcatagcaaggggaaatatccagattagaaaagcattgcaaaatgctgttcagaaaaagtgaaatcctaactggggatattcacaaacccatggtggcccatgctgtgttgcttagcttgctggggaggggcctttnctcactgcactttctgtcattctcaccctctctcacagtttgaacaagaggacctatgaggtctcttccaaacct

SEQ ID NO: 620339 - DNA, 467 bp, Homo sapiens
tgcatttatccatggcgtgtatatgaacagagtatctctggatggataaaggaaataagtgctaacagctagtggtagaggtggaacagtggttgaatgtttagatgtgaacacgttacctattctacagaaatttttttattttggagaagaagttgtgctctggttgcccaggctagagtacaagggcgcaatatgggttcacggcaacctccgcttccggtgttcaagcaattctactgcctcagctaccgcgagtagctggaattacaggcatctaccaccaggccggggtactagtggtattgtcagaaaagacggggtatggccaaatggtccagggtgttctcaaactcttgacctcaagcattcctcccgcctcaccctctcaagtagcatggactacaggcacatgccatcatgcctggctaatattgaccatttgggtaaagaccgggtccccctgt

SEQ ID NO: 620340 - DNA, 320 bp, Homo sapiens
tacaagggatgccactgactttgtactttaccaagagtgccaataatggactacgtcccctaaattctcccaaccagacacagctacatggtcagcttgcacatttacctctggttttctgactcctaggccacactcctgggtggcaaatggcaaactcttcatctggcatatcatcacaaaaagcatttttagagtagttttggtcccaacatacaaaggggaaatatatttattgtagcaccagtattctgttaatggaaaacagttttcagtatttataggaattcaaaagaagtaatgacttttttatgtatctc

SEQ ID NO: 620341 - DNA, 782 bp, Homo sapiens
gaaacaaacacatccctcttcctcactagagaaaatttcatccatccttttgcatgcccctcatcgctcctaccgacagtaagaatgactgtataagtggtatgctcctaatatgctatttggtctctgtgatcctaaataatgaagtaatttttttactgctactttggctttcatatgaagtttccattagttcagtatctttttgtgtctaaaagttgcgaagttcccttagtaacagctctgatcatctctgattgttactcaggaaaagcggaaaaactttcagattcacttgcatttctaatgggaaccacaccaggtagatattgatgagaatttgaaagctcagtctctttttctcataccagaaacaaccctaatataagatgctgggttcatacaattagtagtacacactttcttttgacagtaatttttccacagcattacagacaaaattatttttcttcctgagtctccgtagtttacacgacaaaaattctacactagaaatacattagacagttctagctcttgatttttaattactatgtatatcatggggtctaacatttataaatgctataaattaggaactatcaattagatggttagcattttaaattatcctaaaagtaagagccaaggtaatcttggtcagatcctcaaatttgcttattggtaagtttaaaaatttttcaatgcagggtatatttaaaggaaaaaatatagagtttgtccaaattgcagtgaatatctgaatgagatatggataaatg

SEQ ID NO: 620342 - DNA, 120 bp, Homo sapiens
gggccgcctactactactactactgctcgaattcaagcttctaacgatgtacggggacatgatgtgaagagtctgcaaatccttcaaaataaaaagtaatgacttagaaactgcaaaaaa

SEQ ID NO: 620343 - DNA, 200 bp, Homo sapiens
gctcgacatgactgcagtatctcaagtttgagaggtatggttagaacaaaagatgagcacatagttcaaaggatacagggtagaaaaagcagaaatagaaccacacaataaagcacacctaatttatgacaaagataaaagagcagatattcagtagaggaaagacagactatcaacagtaacgctggagcaaatggaca

SEQ ID NO: 620344 - DNA, 136 bp, Homo sapiens
gtcggcctgtgatgtcgggataaaaagtgcttacaagtcatctccgttcggtagtaagggcttatggtcacaagtagctctgcatagttcacatcgagatcccctccccatacataaacaacatacaaagccattc

SEQ ID NO: 620345 - DNA, 131 bp, Homo sapiens
tcagtgttgctgcaggtgttatagaggatccccggtaagacggtcttcgagccgggctgaccagtgagtgggctttggatctgcacagatgggggaagggcattctaggtcaaaggcacagtgagagtaag

SEQ ID NO: 620346 - DNA, 131 bp, Homo sapiens
aaaattttccatttcccttttggaatcgggggctaatttttttgccccccccgggaaggttaggaaaaaaggggcccctttaaaagtttggccccggccttttaaaaaaaatttcccaaaaattggttcca

SEQ ID NO: 620347 - DNA, 444 bp, Homo sapiens
  misc_feature (138)..(138): n is a, c, g, or t
tccaggacttaaatcggcagcacacacgtatgtattcgtcgcagcaaggccctgtggcaagaccggacgctcatgatcccaggataaaaaatctgtccgcgagcggcaggggcccggcagcgggagtgcgcttcccanggcaccattcgcttaaagtgtgtaatgacttgtccagcaagtttctttaccttcccaaacccaacttctacaacgtacccccagagtcctcaggagggccttcgacctgcaaaagcctcacaggagtgcgaggggccccagctccccagggcggccgagtggagcctcacacggtcaccttctccatcacgctttcagccacgtggacttcgtctgcctggacggtgacagctgcttgactggccgcatatgtcctggtgatccttccagtccttgcgttggcagaaggtggagcagtagttgacc

SEQ ID NO: 620348 - DNA, 1097 bp, Homo sapiens
gggccaaagccactccatcttactaccagacaagcttagccaaaccatttagccaaataaagtataggcgatagcaaattgacaactggcgcaatagatatagtaccgcacgggaaagatgaaaaattataaccaagcataatatagcaaggactaaccccgtatacctgtctgcataatgaacttaactagaaataacgtttgcaaggagagccacagactaagacgccccgaagaccagcacgaggctaccgtaagaacagcgtaaaagagcacacaccgatctatgtagcaaaatagtgggaagatatactaggtagaggcgacaaacctaccgagcctggtgatagctggttgtccaagatagaatcttagttcaactttaaactttgcccacagaaccctctaaatccccttgtaaatttgaactgttagtccaacagaggaacagatctttaggacactaggaaaaaaccttgtagagagagtaacaaaatttaaacacccatagataggccgtaaaagcagccaccaatctaagaaagcgttcaagctcaagcacgcagtacctaaaaaatcccaaacatataactgaactcctcacacccaattggaccaatctatcaccctatagaagaactaatgtcagtataagtgacatgagaacattctccgtccgcataagccgtgcgtcagattaagaacactgaactgacaattaaatagcacaatatctacgatcaacccacacgtcattattagcctcaatgtaacccaacagaggcatgctcataaggaacggttaacaaactaaacggactcggcaaatgttagccgactgtttacaaagaatcactctagcatcacaagataaaggaccgctgccatgaacacatgtttaccgcacggatacctaacgtgacatgtagacatacacatgtacttaataaggacggtgcagcgaccaaaggtacaaaaccccatataaccaagaaaaaactcgacggaaagcggataacaaacaagaatttaggctcaatactgcactacaaaaccaggtaacaaacaaaaagagagcactctacaaccgtgaagtc

SEQ ID NO: 620349 - DNA, 149 bp, Homo sapiens
actctggaaacccgcctaccactgcccaagtcaacgattgaagccgagccaaaccaaagtttccaaggggaaggacgtcttctacttgtccacaatttgccccagaaatctgtgctggctaacatctgggtcacaaagtgcgcaaatga

SEQ ID NO: 620350 - DNA, 857 bp, Homo sapiens
gctgcatcctttctttgatcttgattacaaatagaaatgaaaggggaatcagtggtcttactatatacttctctagaagagattactttcaatgactaggtgtcagccccaacgtaagaatcgatatctaatcattgtattcgtaatacctatatagatatttatttttgttacaagtgtcaacgtgtgagaaatatttgtatgttgggtcatcatagtgagcatatatataacctatgtctaagcaatagtatggtcttgataatgcattagaagaatggaaattaaattggtgtatgctgtctttagaaattagccatatttaatatatctttgaaatatgctttgtgtccagatgattcttgtgattgatcttgccgtttctgtacatggtaggtcacctctgaagtgatgtcattcgagtaacccaggaaatgttgattactttatattcttaaaggagatattctatatataggttacaatatgttacaagacttactgtttataagagtttcatcctgtctgtcaagtgttgaacgggtgattattattgaactctagattagcaggtactagaaagcaaaagtcagaaaatgtttgactagtaagaattctattaaattttaaagtgttgtatgatttgttcattggggatgatgtcaagtggtagataaaccgatgacattcgatggaataggcatgcagtttgtcgcatttgtgacagttgtgtttaaataaaacattcatacacactttgattgtatgatttagaaatctaacttggaaagtctgcttgtaaacatgggcattgtccaagtaatgtaggggaagtcacagataccaaaatgggaaat

SEQ ID NO: 620351 - DNA, 409 bp, Homo sapiens
  misc_feature (78)..(78): n is a, c, g, or t
  misc_feature (101)..(101): n is a, c, g, or t
  misc_feature (159)..(159): n is a, c, g, or t
  misc_feature (165)..(165): n is a, c, g, or t
  misc_feature (222)..(222): n is a, c, g, or t
  misc_feature (242)..(242): n is a, c, g, or t
  misc_feature (396)..(397): n is a, c, g, or t
tacccgttcgttatactttacagccctcatgccatacatctgtaaagtttagacaaactcaaagtctagtctctcggnaatataatctcttttagttagtntcgtcttaggcatttttatttagtgtctgccagctctctttttgtagtagtcagctcnaccacnctactgttttaatccttttgggtgataatttggtttcactttactggtgttcccggntggctactgtggactgggcnccttggccaatgggcgggttctcaaaacttcccttgcctgggaactggggcttgccctccttctgtccccttaaacctctggggtggctgtaccgcataccgacgggatccgtgcacgtttaacgattactaggactattgcagattccagttnnagtcgtatattc

SEQ ID NO: 620352 - DNA, 110 bp, Homo sapiens
cacgaggagcattccagctaccctgattcagagggggctcctgactccctgtgggactggactgtggccccacctgtcccagccaccccctatgaagccttcgacccggc

SEQ ID NO: 620353 - DNA, 227 bp, Homo sapiens
aggcaccggtgcagctagttagacaatgcaccgggacatcatgtgagcataacacctggcgggacctcacccagctccaccctgaggggctgcgcaagccatgtgtgctgcacaatgcagaagtcgtggtgctcatcgccacttttgactgtaagttgacgacgaggctgtgaaggatccgtcactgttggggccgaaatcaccctggccggtcgcccagcggcagc

SEQ ID NO: 620354 - DNA, 483 bp, Homo sapiens
  misc_feature (330)..(330): n is a, c, g, or t
ctatacctggtcactgtcaagcatacaatgtcagggcgccacttagagggacgggctgccgcgcatggagcgcacagtaggcaaagagctggccctggcaccgctgcaggactggggtgaagagaccgatggactggtgcggtgtacagtgtcttctctgacggtgttctggagtcagcgcaggagcccggctggagggccccgggggcagccaggctcccagccccattgccaataccttcctccactatcgaaccagcaaggtgagggtgctgagtggcagcgctgcctgtgagtcgtggctgggtggggacgaggtttgcgtggtcntggggagcacccggtgcagacagggcagacacgcaggcgttacattgcacccggccgttccatgggccaccgttaccgtgacctttgtacgcaactgactgcctgctgggctttctagctgccaccaatgccaccgaccccaactcccggggt

SEQ ID NO: 620355 - DNA, 722 bp, Homo sapiens
aacaaaccctgtcctggggggggggggggtataatactaagttgagatgatatcattgtaggggggaaggcgcttggtgaagtaggccttatttctctgtgtcctttcgtacagggaggaatttgaagtagatagaaaccgaccgggattacctccggtctgaactcagatcacgtaggactttaatcgttgaacaaacgaacctttaatagcggctgcaccatgtgggatgtcctgatccaacatcgaggctcgtaaaccctatggttgatatggactctagaaataggattgcgctgttatccctagggtaactggtcccgtgggccaagttatgggatcaatggagtatagtagtccgacttttgactggtgaagtcttagcatgtactggctcggaggtggggttctgctccgaggtcgccccaaccgaaattttcaactgcaggttgggtagtataaggacctgggggttgtgtcaggtactggttggcattaataaattaaagctccatagggtctctcgatctggcaggtgtcaatgcccgcctcttcacgggcaggtcacattcccgggttacaaagttgagacggttgaaccctcggtggggccattctacggtccctattcaggaacagtgttttgcacttggcgggtaggaccgcggcgtaacttggtccggcgggggcccaaacgggagcaggtgagttggacaggggcg

SEQ ID NO: 620356 - DNA, 373 bp, Homo sapiens
agacctgttagcaccactgtctatactccctctctgtagcccctggaaaccatgaatctactttctgtctcttatgaatttgcctagtttgtacacttcatataaatgtaattgagcaggctgggcgtaatgtctcacgcctgtaatcctagcactttgggagaccaaggcgggcaaatcattgaggccaggagttcaagactgtcctgtccaacatggtgtgaaacccggtctctactaaaaatacaaaaattagcctggcgtggtggcacatggctgtaatcccagctacttgggagggtgaggcaggagaaatgcttgaactcaggaggcagaggttgcagtgagccaagatcacaccactacactccaa

SEQ ID NO: 620357 - DNA, 135 bp, Homo sapiens
attaagaagccagtgacataaggtcgcctacgtgcagctgtcccatggacagaccattcacgttcccagacctgtatccctgagaaagacgggagccctgaaggctgcgctgcgcgactgacctctacagcatgc

SEQ ID NO: 620358 - DNA, 519 bp, Homo sapiens
aggatccccgagttgaaatgtgtttgcatgtggaatgacagaaaaggtaaaactgaaaacattattcaggtggtgagattctgatgattttaaacatttactcatttaaaaatgataacgcttggcacagtggtgcacacctgtattcctagctatttgggaggccgtggcaggaggactgcccgagcccgggaggtggaggttgtgttgagctgagatgacaccattgcactccagcctgggcgacagagcaagactgtgtctcaaaaaaaaaaaaagatggttaaggataaacggttatctcaagggaaagcgggagtgacatggtaggtatcagaagggcagatttcaaggaaattgcccagagcacggagagggcctttaattagggttaaacagataggtccatcaggacttagcacccctaattatgtttgcggaaaacggacagagctgggaaattatgtgcaccggtctcggataggaattcagatagacccaaagggagaattaaccaat

SEQ ID NO: 620359 - DNA, 95 bp, Homo sapiens
gccagcaccaaccagacatctatgtacctctgtgccagcacctctgggcaggcttatggctacaccttcggttcggggaccaggttaaccgttgt

SEQ ID NO: 620360 - DNA, 115 bp, Homo sapiens
aggatcccgttcactttctacactggatgcgaattcttttcctgataggacatgagtgaggcgcaatcgggaaaagaattcgcatccaatgcctgcatgcttgtagaaattgaac

SEQ ID NO: 620361 - DNA, 467 bp, Homo sapiens
  misc_feature (96)..(96): n is a, c, g, or t
  misc_feature (116)..(116): n is a, c, g, or t
  misc_feature (214)..(214): n is a, c, g, or t
  misc_feature (235)..(235): n is a, c, g, or t
  misc_feature (257)..(257): n is a, c, g, or t
tccctgttgctttgcccaggaaccccggtcagctctctgtctgttcctgccgggtaaacaaggtttgggccagttccctgtttcctctgggccttnaagtccaaggcccacagaantcctttttccttcccctgaaagctggcagcttttgttacagaagattcctcaggatgaaggcaggggctgaggcctctgcctactggctgcccctttnccatccagtggctgctgtttncccaagacaggctaagcgtttncttatctgaaatgcttgggacaggagtgttacagattttggattttttcagactttggaatatttgcatatatacataatgaggtatcttggtaggtctcatgtctaaacatgaaattcattcatgttttatatataccttatacatgtagcctgaaggtaactctatacagtattttaaataattttgtacatgaaacaaaaaaaaaaa

SEQ ID NO: 620362 - DNA, 522 bp, Homo sapiens
taaaacacaaatttaactggtttttatttaaaaagtccggactcagcaggtgagaaggagccacccccaccagggttcccttcggcgtggaggagagcaggatgtgggcaaagccggcccccacccattctggggtacaggcatgtgcgggggacaccccaggttaagttccccacaagggcagctttccgtgtgtgtgtggccatatgtggcacagcccccgcggtaggtgagtaattgggggggctccgtgccggtggtgcgtggggggtgggtttcggtcgtgcccgtggtgtctccgtgggggtgtggcccgggagaagcccgaggtgttagacgccggtggctgtgtgtcctcgcggagaggagcgtggcacccttcgggcgtggtggaggttctctctcggtggggtgttattcggcgccaggcggaggtgcgctttatcacgcggggatctcacggggggccgtgggcggaagaatgtggaaaaggctaaagaggggaagtgcgtgtcagcaaca

SEQ ID NO: 620363 - DNA, 191 bp, Homo sapiens
ggtcgtgggcaccgtgggctgggttgggagcgcctggagtcgtggagacatttgaggagcatgtccaaatccaccaggtacgagatgacatagggcttgccattgtccagggtctccaaggccgccaggtaggtccggtcccgctcgatcagatcggccggctgctgaaccgcctggccgatctgatcgag

SEQ ID NO: 620364 - DNA, 763 bp, Homo sapiens
  misc_feature (336)..(336): n is a, c, g, or t
gcgattgtccggcaacggctctgtgggccgcaacagcaaccagcgcttccatgcagcgtggtcaaggatgaggagctctaacgaggaagtggcggctaactgctggaaggctgcagcatagaccgccgacatcgacagtgttcatcgcaggccaagagcacagggcacaaggagccccgccagctcgcggtgccacttaccagaacgtattacgactcgggaggtcaccccgctcgaccagcagccgctggacatacagcccgtcctgcggcatgataaagaggttctctggacgtgcatgcacggaagtcccaagaccacttcgttggcagcttntgctgcgtccacagagaccctgacccccacccccgagcggaatgagggtgtctacacagccatcgcagtgcaggagatacagggaaacccggcctcaccagcccaggagtaccgggcgctctacgattatacagcgcagaacccagatgagctggacctgtccgcgggagacatcctggaggtgatcctggaaggggaggatggctggtggactgtggagaggaacgggcagcgtggcttcgtccctggttcctacctggagaagctttgaggaagggccaggagccccttcggacctgccctgccagtggagccagcagtgcccccagcactgtccccaccttgctagggcccagaaccaagcgtcccccagccccgagagggagcctgtcgtctcccagggaataaaggagtgcgttctgttctc

SEQ ID NO: 620365 - DNA, 1055 bp, Homo sapiens
  misc_feature (336)..(336): n is a, c, g, or t
  misc_feature (838)..(838): n is a, c, g, or t
  misc_feature (889)..(889): n is a, c, g, or t
gcgattgtccggcaacggctctgtgggccgcaacagcaaccagcgcttccatgcagcgtggtcaaggatgaggagctctaacgaggaagtggcggctaactgctggaaggctgcagcatagaccgccgacatcgacagtgttcatcgcaggccaagagcacagggcacaaggagccccgccagctcgcggtgccacttaccagaacgtattacgactcgggaggtcaccccgctcgaccagcagccgctggacatacagcccgtcctgcggcatgataaagaggttctctggacgtgcatgcacggaagtcccaagaccacttcgttggcagcttntgctgcgtccacagagaccctgacccccacccccgagcggaatgagggtgtctacacagccatcgcagtgcaggagatacagggaaacccggcctcaccagcccaggagtaccgggcgctctacgattatacagcgcagaacccagatgagctggacctgtccgcgggagacatcctggaggtgatcctggaaggggaggatggctggtggactgtggagaggaacgggcagcgtggcttcgtccctggttcctacctggagaagctttgaggaagggccaggagccccttcggacctgccctgccagtggagccagcagtgcccccagcactgtccccaccttgctagggcccagaaccaagcgtcccccagccccgagagggagcctgtcgtctcccagggaataaaggagtgcgttctgttctctggtgtgctggggtcccgttctctttttctcctgctccagtgtccgagtgctcagttcagaggaggcaaaggaanaagggaaggagcctggatgtggagctccccaactcagccgaggcttcagcnatagttggagaagaggcctggccccagttgctaggagctcccagactgccaaggagacacattcacacctgagaacaagagaacacaggggtgcaggaggactgtggcaggggcaagaaggggctcagcaggagcatgcaacctgtcagacagtctgcggatcctc

SEQ ID NO: 620366 - DNA, 365 bp, Homo sapiens
tgctgcttcctcctcgatgatgggcgggcgggcagatggcgctcctcaccttcccagtacggggcatggcgtggcaggatgcgctgccccactttccagattgagtggcggtcgggcagaggtgctcctcatcatcccagactgggcgggtgtgtcggaggcactcctcacatcccatacgatggtcggccatgcagagatgttcctcacttcctacatggtggtggcggcctaggcatgaggctgtaatcttatgcactttggtgaggccataggcaggcgcgctgggacggtgcgaggttcgtaccagagccgatgatcattgccacttgcatctcctaggtcctgggacaacattcgtagca

SEQ ID NO: 620367 - DNA, 486 bp, Homo sapiens
  misc_feature (86)..(86): n is a, c, g, or t
ggggagaactatatgacaactgagggggatgggaggccggtccgttgggttacccccatcctgtgtcccaaggggctgccctgccnaccctgggagacatgccgcatttactgctgggtgggggaacgccaggcccctccctgcaggcccttccctgcaggcccttccaacgtcatgcgctttcaatctcttggccagaacccagatgagctggacctgtccgcgggagacatcctggaggtgatcctggaaggggaggatggctggtggactgtggagaggaacgggcagcgtggcttcgtccctggttcctacctggagaagctttgaggaagggccaggagccccttcggacctgccctgccagtggagccagcagtgcccccagcactgtccccaccttgctagggcccagaaccaagcgtcccccagccccgagagggagcctgtcgtctcccagggaataaaggagtgcgttctgttctc

SEQ ID NO: 620368 - DNA, 189 bp, Homo sapiens
cgatctatgtggggctcagctggtgctctcggtcagtgacagcaacctgcccctcccacacaatcagcaggctgatgccccaccctgcccagctccaggacctgccctgagccgggccttctagtcgtagtgcttcaggtccgagagcatcaggctcctgcagagccccatccacccggacctcaattt

SEQ ID NO: 620369 - DNA, 140 bp, Homo sapiens
gctgcttctcttgtcttaagtattcctttcctgatcactatgcatttgaaagttaaacatttattaagtatttcagatgctttatagagattttttttccatgactgcattttactgtacagattgctgcttctgctata

SEQ ID NO: 620370 - DNA, 377 bp, Homo sapiens
agtgacccatctggtgtcccttcagctgcccagtctgacacagaagcccaggagaagagccactgaggcagaggagctaatggagggatttctgagtcttgagaaaggctgcccagtttggaggtaaaatgaggtgaaatgaggttctctgagtccaagtaagcaaggaatatgaatattgggggttccaggcactttagcgctgaaccaggttctcgaacaggctttcagcctagtctcccattcatcctgaatggagagagactccatttcagggccctggtggtaactggggtcctgtccagcagctgagcaccccgcacacctaccacccagtcaccacctggcctggagtaggcagagagaccccacaagcc

SEQ ID NO: 620371 - DNA, 160 bp, Homo sapiens
agccggtccatagcgaccgtacgacaccgtacttgatgtacttctccgggttctggtgaagggcacgctgcacacttctgtagaaaggccccgtaggtctccttgacaatggtcttctgggcctggcgaatcctgtccctctgctctgtgtacggtgtcg

SEQ ID NO: 620372 - DNA, 445 bp, Homo sapiens
  misc_feature (356)..(356): n is a, c, g, or t
ctcgaaagagatgtggctacaaatgaacgatactggacgcaatggactcgatcagagctgaaacagaggttctccgtgttcggagagactgaggagtgcatcataccacttccgtgtccaaggggaccagtacggtttcagtcactatatacgctatgctgcgaggaggcatttagcagccattgacgagtgggcacaatgctgcggcaggaagattgaacagcctcgttagatctactgcttagggtgtgccgaaggcagttctgcaagagtgagctattctgtatcttgaatcgcaagcgggcaagactttgacccagtcaccttgtaaagagcaaagtttgattctgcttgantttgacgcattgttggaagcaggcccagaagaacctcaggaggtaaactatgggcccttccctgctatccttattctccttaggaggta

SEQ ID NO: 620373 - DNA, 749 bp, Homo sapiens
ccgagaagagcatgataaggaggagcggatccgtcgcggggatgacctgtcggctgcatgatggcaatcgaggagagcaagagggagactggtgggcaaggaggagtcgtccctcatggaccttgctgtacgtcttcacggcacccagactcctgtccccgaccacagacccctgggggggcccaggcacccatggactgctgccgtcgcccacgggcttgctcctcagactcggacgccctggtggcgtgccccctggtccctccagctgctgatccctggggagggatcacagccccacacgccggaacatctggaggacaccctgagaggacatgcatgacaccatgcaaggacaccatcagatggacacccaaggaggtggagaccacacagaaccgcacatggacaaggacatgagcagcagcgagggcacccaaacgcacctaggaagtcccactgggagggcgaacgatacacagagtaggagcagaggagatcaccagggatcaagaagggaagacacgaataaagacacgtccagcaatccacgtggggagcaacacggagacaaccgggggacccatatactacgacgaaatccaccctggagcagcacgggggaccacccacatggcacaaagaggcacccaaggacacccaaagtggggcacccgagaacgaggcaaggcgccgggggggagaagttcacggaagcaaccgaggagccacggaccggcaagttacac

SEQ ID NO: 620374 - DNA, 148 bp, Homo sapiens
acgttggcggtgtccgggacatcccatacatgcaggtcattctaatgctcactacagatctggctggcgcagctgacgcaagacacgggggcccctagcaaaactgctctcccaagcttatagctgagttgggtctggctaacacgga

SEQ ID NO: 620375 - DNA, 352 bp, Homo sapiens
caccgcaatctgggtgtccttccccatttttatgtttttgtttgctttgtcgaagatcagttgactgtaaggtacttgggtttatttctgcattctctattctgttctattgatacatgtgcctattttacaccagtaccatgctgttttggtgactatcgccttatagtacagtttgaaatcatgtaaagtgatacttccagatttattatttttgcttagtcttggtttggctatgtgggctcttttttggttctatatgaattttagaatttttttttttctaattctgtgaagaatgatggtggtattttgatgggaattgcactgaatttgtagattgcggtgtttg

SEQ ID NO: 620376 - DNA, 287 bp, Homo sapiens
  misc_feature (281)..(281): n is a, c, g, or t
ttcggccggggcaatcactaacctaggatgagatgtaagttttattttctaggccaactttgattaaatggtagcggtggcctgaaatgatgtcttgaaaggaatctgaggcctcattccaggctcatctaggataaatgtcataatcatttatggatgtttgctgtgggcatggaaatgggaattggcagcactcatgcgggctacttaacatttctagaaagcattttgacttatacctctccaaaaataggccactttatctcctcattggcccgggncgaata

SEQ ID NO: 620377 - DNA, 1183 bp, Homo sapiens
cgcttggccaagaagcacaatcccaaagggcctactagaatgatgcaggtccatagcaatgtccaaggtcatgagtgcacggtgccgaggctcatctaaggccctcggtcaaagcccgagatggtaggttaagtcctaaggatccctaaagggtgtctagccgcaagcgtcagatcggacttgctctacattgccctactccctaagctatgtggaagcggtgtctacgattggctcccgttcatttgcctaagggggacgtcaggtctgtgcccgggctcaaaggctcaaggtcgcaatgcgtctgcaaggacacgaatgggagtcgatagatcctaagggctcactagggctgacaggcccgctagcttcagtttccatgtctgcatggtcgtgccacaagaacgtagccacaaggacaccctagcaaagggccttacatgatgctagactagtactactggtccaagcagtgtaggacatgtagaggagctgagttgcgaagtccgcgcacatacactccgtcctcctgaggcttaccattctgcatggggctggggtcctcctgtgcttatttgtacataattaaacctgagggcaggaaaaaaaaaacgtagaacagaaaaaagaaaaataagactgaggagagcaattataaacagacgtgagcgggtgagaaaccaggaagtggtcgatcccggggacccgcgtccgatgaaaacagagacgggacaatgtgtaaacccagagaaaataaatgagggcaaacaacgcgttccaagacataggccagagtctgcccaacaaggagagaagcagagaaagaaacgcacaaaaagacccgccagagaggacacccctgggacgaaaaaaaaaactcgcgcgccaaaaacagacaaccaccaccaaaagcgaaaaaaagaacaacgacaaagaaccaaacaacagcgggaccaacgcaacaaggcaagccaccaaacaaccaccagcaaagacacacacatagacacaaccgactagaaaacaacaaaaccacccatccgccaccgggaacaacaaggatgtgcaagaggatatggaagaccaactgagacaaaagaaatggtagaagacaaaacgcacccacaaaaaaagacaaaaaagaaccacgaaggcacacgcaagaaagtgacaagaaaataag

SEQ ID NO: 620378 - DNA, 218 bp, Homo sapiens
  misc_feature (43)..(43): n is a, c, g, or t
ttgacatgatcgactcgagttcggtaccctcaaaacacaaaanaagaacacatagtaaaaactaatacaaattttttaaaaaatacagaatacagtgtaacaactatttacatagcatttacattgtcttaggtattataagtaatctctagagatgatttaaagtatacaggaagatgtatataggttatatgcaaatactatgacatttataaaag

SEQ ID NO: 620379 - DNA, 149 bp, Homo sapiens
caccagtgatcatctaatgcaacagataacaccagcgatcatcttatgcaacagccgaagacccagtgatcatctaatgcaacagcaaacacccagtgatcatctaactgccacagacaacacagacacagtgatcatcctaactgcaa

SEQ ID NO: 620380 - DNA, 140 bp, Homo sapiens
caggctccacccctaacattggaattacaagatgacatgagatctgggtggggacatatcagccactatagtgggaaaggtgatgaacagaattagttaagctaagcagtgctcctttttgatggaagcactaagcaaca

SEQ ID NO: 620381 - DNA, 173 bp, Homo sapiens
gatgcttgtgagtctctctacgagtatcccccccgcgtactctggcgtatgatatctgtgtggtttgcacacttgagtcgttattcatcctctctgcccccccctttcctcatctctcatgtaacgatgttaccacttacagtttgtgcttcagtgagacgctgtggcggtcg

SEQ ID NO: 620382 - DNA, 494 bp, Homo sapiens
atccctgagaatccaaaattctccggccacctatcacaaaaaaaaaaaaaaaaaaaaaaaaaaaaaaattggggggggccggggccccggaaaaattaaaaccatcgggggggggggggccccagtagggattagagggaaactttggtccaattagcgctgttcttccctagagagaaaactcggggcttcaggacaactagaggggcggggggtttttctctcaccaaattaaaaaaaaacggccgcgggggggcaaaacgcaggagggtctcggaaaaccaaattccagagagggggagttttctggaggggatccattagagcggggctctcctaatcacaaggcggggagagtcccaagggggaaacctcgaatatccaaaaatttaaggccccgcgccggaggtatgcacggcccataggtagactctcatactccaacgtgaaacaagtgctaaccgatcacaaagaacagcatcaacaagagcagc

SEQ ID NO: 620383 - DNA, 900 bp, Homo sapiens
aggtctacaagacgctacttcccctatcatagaagagcttatcacctttcatgatcacgcccgtcataatcatttccttatctgcttccctagtcctgtatgcccttttccgtaacactcacaacaaaactacactacgtacgtaacagtctcaggacgctcaggaaagtagacaacccggtctggactattctctgtgccgcgactaactacttcgtagctccctcagtcgcccctcctcactctcctacgcactcccttttagcattaacaggacgagggtccaaccgagtccccttcgccttaccaatcacaacatccaatttggccaccaagtggtaactgaacctaaagagatacaacccgactacggcggataactcttccgactcctaacataacttaccccacatagatatcctaggaacccaggcgaactggcgaccctccttgacgtttgaccagatcgagtacgtaactcccgacattggaacgccccccattacgtataattaattcacatcacaaaagacgtcttgcactcattgaagattgtcaccacaatcaaggcttacagaaaaccagattgcccatgcccggaggtgtaacagcaaacccaagttgccacccgaggacaacgacgcgaggggtatactaacgggtcaacgtctgaaatctggggacgcgaaccaagtatcatgcccatcgtcccagaagtaaatccccggaaaaatcgatggaaataggggccgaagttgccccgattagaccacgtcatacccctcaacggcgacaacagcgccacacaacaccgtgggcgccgccccccaaggacagacaagggggcgaggccgcggaggaacaggcaaagggccagacaggagacaggccggcaaaaag

SEQ ID NO: 620384 - DNA, 470 bp, Homo sapiens
  misc_feature (428)..(428): n is a, c, g, or t
tcagaaaaacacacacacacacacacttatatatcaaactgtatatatatgtacatatatatatacaaactatatatatatgtacatacacacacacacagacacacatacacacacacacacacacacacaacacacacacacagtctcgctctgtcgcccaggctggggtgcagtggtgcatcgtcatcaccagacgatgatcttggctcactgcagcctctgcctcccaggttcaggcgattctcctgcctcagcctcccaaggaggtgggattagagaaggccgacactatgcctgggttaattttttgtacttttagtagagtcggagtttcaccatgttgggccagggtggtctcgaattcctgatgttcaggtgatccacccaccttgggcctcccaatttatggggttacgggtgtgatncactgtgcccagccttgatatgtttcttaattaaagttttat

SEQ ID NO: 620385 - DNA, 107 bp, Homo sapiens
tttggtgtgtcatgcagcagagtgtgagggcactgaggaggcaaactggcactaataaaccattcttctgtgacaaaggaaagggaggaaatcactactggggagaa

SEQ ID NO: 620386 - DNA, 1793 bp, Homo sapiens
  misc_feature (191)..(191): n is a, c, g, or t
gcagagcacataggacataggagacacactatacctattattcgcgcgcgtgagctgagacgatccataatgcatcgagactactaaagctctcactatgatcctgaagtccgagcgtagagcgacaccaagctcgagggcatatcctatcatagggataacctcacacaacaaattcatacaatactgtncatgcagttcatctagactcgcatgacgatattagttaattcacagtctctcatatacgattgaggatgataatgatgccacgattctagtgagattccgagacgcgtgtagaggagtcctatcatagtaccttatgttctctctcaccttagactaaactcctggatgacacgcactcggaatgattgtgccgtatttccctcgccgtcatgaaagaggacaagcagtacgaaggccgtgttcttggaactccaattagcccgtcaccatacgtgcatcctccttaacctacgctgggcttactggccaattttcgtgacgtggatcacggtagaggaggtgggccggaggaagccaaggaaaaaccaaggggtttaggacaactaaggttacctaacgcgcctaccccccttttcacgccgagtggaaagaacttacccttggcgcgaacacagcatggtgaggacgcgtatcgcggatgaggaccacctaataacccaattcgtgtgtcatcgcattataagcagcctggtaaggacagggtgtgggatcctctgcttccttacttcatataagggggggccaagtgtaaagaacaaatatccagatgcaagcagagcgaaactctaaattcgaattaggttaaagaaaccaccccctgcattgacccatgttaaagcccccccacaatttaactctaaaaaatctgggcgcaccccttcaatgtgcgtgaccttggaagttcaccggatgcgcataaaaattcgaacgcgaccaagtatcaccatagcttgtttattccctgaatcttcttgcctccaagtgtgcgcataaggcatggaactggggcaaattcctcctcattgtgcgtaaagctagaagcgacgagatgccggcgaaacactgtccaaagcatgcgcaaagcagtattcttgtcaggaacactgccggtcccgacgaaaggaaggggaatgaacgacgccatatgtacatactaacgcagaacacacataaattgtcttggaaatgtgtaatcgagagaacagacacccttggaaaaggttctgagtgatatacatttattcacttaccacaagggcttccgggaaacataggttcgtacccggtaacttgggaaacgaataacataacatccggtgcaaactagacaaggagaactcacaatctggggtagttaccaaataagggcaacaggggtccctgtaaagacataagtaaaatattacaaattgaggattataccaaaagcgacgaaatgatctcgagatgatagaagacaccgaagaagtgtgtatccacaggacggaacaataagcaggtacgacacacagcacgcagatattaacaaggacacggcaagacgaggacaagtcggtaaacacgcagcaggagacgcagcgaaataagtcagcgcacgaaacccaggagcacacataaacgctaagctagacggacacaagccagagacagactgacacagaagagggcaaccgaggagtagtacacacaaccagaacacaggagccacctacagcgagacgaacgtatacccgagtcacccagacagcgtggaaacacag

SEQ ID NO: 620387 - DNA, 141 bp, Homo sapiens
cgtcagacgctgaactatgtcctcaactacgaggttgcgttctctgctgcgatacccccaaattggttgccccgtgacctccgcattcgtcatagctgctttcctgctccttaaagggagagccaccagcccaactcagag

SEQ ID NO: 620388 - DNA, 219 bp, Homo sapiens
acgtgttcttcaagagagctacatttgaagccattgccccacaggttggcaatgatgctgtcattcctgaatattatactaaatgaattatactacgatggcacatagtatgccaatagttcagtggcgggacctatccttgcgagcagacggttagaagtccgggctaccgaggctcgcaattctgtagatcagtggtcattagcttgttctatccag

SEQ ID NO: 620389 - DNA, 1315 bp, Homo sapiens
tcctttattcgggtcctataccaccaaaaattagggacggggcttctcgtactcctttaacaaagtcttcctctctctatattttctttatctaagagaggtatatccgtatttcagaatctgggtgaaaggaagaccagcgagctctacttgtattcaactgggggatcaacgagtatctcataaaagcttacaggcaacctgggacttcctgggccacccaaaggaagcatctggggaaggttccaccaatgtgtgggctcccaggggaaaggccccataggtgtgcaggccaaggggcgcaggagtatcaagagatgtaggagaggccccccaaaaagcgcacgccacggggggaaacaggggcccaaagctccgggggataaaggtgggggttaccggggagtatcgcgcacggagggctcccaccccacccaggggcagcaaaaagacgcttggcaccatgtgggcgcttaaaagctctaggtgttggcccaaaaccagagaaaaaactaaagagctccttgtaaagcgctttccctataccgaggggagaaattaaaaactccctctatatcgcgggccattaaatggggtccaacccgcattctatataaccaaaaaagtctccccgtgtcaccaaaaacggcacattatcaccgagggcgcgttagtgtgcctcccacaaaagttgtccctggtgtgccccccccccaaacagcgtggccgtggcgaagccctctgtgggaaaccttacaagggggggaacccccctcttacccaccccaatgaggcaccagaataaaacccccgtaaggcaatggttgcgcaaccctgctggtgccaccacagagggggcgggcaaaaacttctatcatcccccgggggggcggcgggacaaaccacaaagtggcgtcgccacaacagttcccatgcggtccgcgaaaatctcatttgaccccacatatagggggaaaacaaacccggtgacagtaacaaaaaggtccccgcccaaatttgctgcggcctccaaggaaagccctataaaagcggaccctcgagggggggacgacacgaccccattcacagtatcccaccccccgcttgggaagaaattaaaccccccctctgtgtgatgtccgcagaacaagagcccacactcccgactgcagggccgacacccacacacccaagaccacacttctcctgggacaaaacaaccaggaggaggggaaccccgccccccgcaaaataggttagagtcgccccccccggaaaaacaattccctagagcgtgcgcttgctagcacaagac

SEQ ID NO: 620390 - DNA, 166 bp, Homo sapiens
ctgaactgggctgtgctgcgctaggctgggctgggctgagctgggctgggctgggctgcagcgagtattgtgcctggctgcaactgcgctgggctcaagctgagctgggctgcagctggagctgagcttgtagctgggctctagtcgcaacggcacgtgggggcat

SEQ ID NO: 620391 - DNA, 107 bp, Homo sapiens
  misc_feature (8)..(8): n is a, c, g, or t
  misc_feature (86)..(86): n is a, c, g, or t
  misc_feature (106)..(106): n is a, c, g, or t
tcaagaantggcacgaggcaagagatcatcatcatacgcggatccaggcacggaccactctgtgcattcggcctgacgtgggcaanttatgagaatattggaggcng

SEQ ID NO: 620392 - DNA, 887 bp, Homo sapiens
  misc_feature (503)..(503): n is a, c, g, or t
  misc_feature (509)..(509): n is a, c, g, or t
  misc_feature (679)..(679): n is a, c, g, or t
  misc_feature (701)..(701): n is a, c, g, or t
ggcctccttctgcctaggtcccaacgcttcggggcagggtgcggtctgcaataggaagccgagcgtcttgcaaggcattcccggtcgggcgaccagtctactcggccccggaccctactggtgcataccctagacacctccggggatccctaccgtgggagatccccggagccctcgccttcctgcgccagtcatgccttgaaaaccgcgactttgtccatgtcctcactgtccaggactggaggactgggaggatgaacttcgaccgggagaacgcagtgctcttcgaagtgggctgggaggtggctaacaaggtgggtggcatctacacggtgctgtagacgaaggcgaaggtgacatggggacgaatggggcgacagatctacttcctggtggggccgaacacggagcagggcgtgaggacccaggtggaacttggtggaggccctccaagcccggcacctgacgaggacactgagattccatgtaacagcaagggcatnccaggngtatttcgggcgctggctgatcgagggaggccctctggtggtgctcctggacgtgggtgcctcagcttgggccctggagcgctggaagggagagctctgggatacctgcaacatcggagtgccgtggtacgaccgcgaggccaacgacgctgtcctctttggctttctgnacacctggttcctgggtgagtncctggcacagagtgaggagaagccacatgtggtcgctcccttccataaagtgagtggacacgcgctggacatcacgcctggtgtcgagcacgcaaactgcctggtacaaccatcatcacaaccatgacacgctgctgggagcgcaacctggtagcagtggccaggacttctacagaaacaggcaaa

SEQ ID NO: 620393 - DNA, 637 bp, Homo sapiens
  misc_feature (218)..(218): n is a, c, g, or t
  misc_feature (224)..(224): n is a, c, g, or t
  misc_feature (394)..(394): n is a, c, g, or t
  misc_feature (451)..(451): n is a, c, g, or t
  misc_feature (493)..(493): n is a, c, g, or t
  misc_feature (527)..(527): n is a, c, g, or t
taccagagagatggacaaaggtgttcaggaataaatcatgcaatagagaagtaaggctaaggcagcaggtgagaaattagcagcagatatggaaacagaagataagagagctgaggcttaagtctatagacatctgcctgcaaatgggagaaccacggatgagtgaagatatgaggctgaagcccagagcctccctatggtgcctccccaaccccatnccaggngtatttcgggcgctggctgatcgagggaggccctctggtggtgctcctggacgtgggtgcctcagcttgggccctggagcgctggaagggagagctctgggatacctgcaacatcggagtgccgtggtacgaccgcgaggccaacgacgctgtcctctttggctttctgnacacctggttcctgggtgaggtaggccccgtctgacacattccacccatacctgaanctacaatgaccatcagcccctgggccagaggatgggcttctncctgggcattctgggagtcatagggtcctttaanccaaggattagctctggcctttgaggacatgaacatccaagggcccaggctctactctcgatgccaacttcatttactctagtcttacaagcatagggattcttggaatc

SEQ ID NO: 620394 - DNA, 126 bp, Homo sapiens
gagatagctagtgtagaaggagaaaaagacgacccacgaccaccgaacccacccaaaccgatgccaaatccaaaccccaaccaccctagtacctccggtagcttaacagatgcagacctagcggat

SEQ ID NO: 620395 - DNA, 104 bp, Homo sapiens
gagctaccctggcgctagctttctatgtggtcctagtttggctccaagtttacttggtcgatccaagtggcgtggcggcatggggtcacgcagctcgccatctg

SEQ ID NO: 620396 - DNA, 90 bp, Homo sapiens
tttttcccccccccccccccccccccttgggttttattttggtaatgttgggggggaaagaaaaaaaaaagtggatttttgcccccgtta

SEQ ID NO: 620397 - DNA, 551 bp, Homo sapiens
tagggagatggagtctcgctgtcgcccaggatggagtacaggggtgcaatctcggctcactgtaacctttgcctcccggacttaggagattctcctgggaggcggatcttgcagtgagccgaaatcacgccactgtactccagtctgggtgacagcaagactgtctcaaacgaaaaaaaaaaaccaaaaaaatagtaagtagcgttataaaaatgctttggcctcacagaccccgttgaggggatactaggattaccacctcccacagccagggtaccacactttgagaactgctttattagggtgacggtttcctaccccaccaaaaaggcaagccctccggtgttacaaacccctaacaaaagggtgccgtgtggcttgcacaagtgagaaagccacacagccagtaggttacggtggtacaggaagggaggcctaatataacctggctcgaaggagcgtaaggctttactctttaatgggccccattccaaagccccactccttcctcagagttttaggtttaaagggggaccatttttcgggccctg

SEQ ID NO: 620398 - DNA, 152 bp, Homo sapiens
ctgtcgacgatgattccgtcgaaatcccacaatgacagcggcacataaacggtcggcggtcactgtgtgcgtctcacgtggcattgaaatagtttgcctccgggtgatgcacgacgaaggcttagttgcgattggccaggatcaagctggaa

SEQ ID NO: 620399 - DNA, 585 bp, Homo sapiens
aaactttttatttattacagcccaaagagcagtatttattatcaaggagtgtccattttaccttgtccgcaccattttaaaccgataggacaataaagagatatgaataaacgcagaaaaaaaaacaaaaaacagaggagacagagacacagaactcataaaagatatcacacatggagagggggcccgaagcattgaggcgttacccgagctttctgtgtacaaaaggtggtctcccctatttgttgagcatcgtatattaagatagaggccataggcacctgtggcccggccgtttattacaaccgatcagggcaccgtgggaatacaactgtgccaagcctttggggcaatctgtgggtagaagggaaccccttaaatctcatggtgggttgtgaccaataattgtgagacaatattttagctctaacacgaacatatttgaaagggctcctaaaagtgttacaatcttacaaagttttcgcccactgtggtctcacatggtggttaacctctcacactgggcataacgcttggctgagccttcgaacaacgtttcggcgttaactggacgtatggattcaa

SEQ ID NO: 620400 - DNA, 229 bp, Homo sapiens
tggtagacgcattcatgactctgtccaccaaggtcaggagtacttctgcgctggagctgtgtcatgagggtgaatgaaatgagctgtggtatgtgtggttccccctacatcccttccctatagcacttcccagcaggaatagacctactgctgtgggtcccttagcatggaggaccaggatacaaggctgataaggtatcctccaaacagatgattacttccctaaaaa

SEQ ID NO: 620401 - DNA, 760 bp, Homo sapiens
ccttggcccatttccagaggggtccttactaatgagccctcgttgtgccccccccttatgggcgcgcgctaatgactccgaggttcccccccttcttctcgcctggtacgcccctcttgatccgctcaccggtccctcccgccagagcctcccatggcgtcgcgtgacgctaattttccccttcgccggcgaggttaagattgtcgctatgatctgtctgttccccaaccccagcaactgctttttcttgcgccgggtctctttcccgcgcgagttaaggcccacgcaccgcccggcacgccacccgaggtcacttccaccacgcactgtggcactgattcacacgcacctcccatggaagcacttctcactcctctcactccctcctgatacggctcacaatccactctctgtttttcctggcacacgcccacccgaatttatctttaacaggagggtttctacgctgccatttggaacaaacccccttccccgattttaactacagcctgccccttaatttcacccctaatgaagtgaaagaagatactccctcactgcacccggcggtgacgactaaacgattggtcgcaccccgctccgtcaccactcactttgctagcactccgctgtacaccagcgtactgttctgcgcactaaagagaggacaggagacgctagccccccccacccccggttcatcgccccacccacactcattaggctcctcacatggagattctgtacccacatagtacaa

SEQ ID NO: 620402 - DNA, 437 bp, Homo sapiens
  misc_feature (1)..(1): n is a, c, g, or t
ntcgtgagctacttggtgtcttactcctagggaaccaagaggggatgaaggcgtgaggagtcagaggccctgaggagtcagagcctctagagaagaaaggaaaatatgagaggccaaaggcaaagcctctaaacactttatctaaaaaatggcactcttttttatcgattcagttttgggactggaaaatacagaagacttcttggtttatacatggtcttgtaaaatactattacttacaactcaattgcaattccaagtattgaagcaatcgcagaattacctctggactacaaatttacaagattctcttcaagcaattcaaaaataactggctactatccaaaccttccattggtcttatcaaatgatcagacactgataaccaaataagttatctttactgaaaagtgaagtgaagacccatatatgcggct

SEQ ID NO: 620403 - DNA, 213 bp, Homo sapiens
cctgatgcggtcccgcacagcctctggtccagtgtcacatccctggagggcacccgtagccgctcccataccagcgagggcccccgaagccgctcgcacaccagtgaggggtcccgtagccgctcccataccagtgaggatgccgtctcaacatcaccccaactcgggtgcaccggaaacaatgcgggccaagttcattgaggtgtctgtaaa

SEQ ID NO: 620404 - DNA, 221 bp, Homo sapiens
gctctctcctgtcactgacaattttgttcctgtgcgtttccgtaagggcaccagacgtgacattatggatctccataccctacagccatcttgggacgagctcccggatcaggaaggctcggcagccaccgcacagtgcttcatagtaaagagtcacattgcacagcggtgcattggacttcttcagggtgcccccgtaaatatagaaaagtgcactttag

SEQ ID NO: 620405 - DNA, 225 bp, Homo sapiens
gtgactacaggacctccgctagcatatcaggacagtgaggcaggaggatcgttgaggcaggaacttgaggctgcagtgagctatgatcccaccaggcacttcagcctgggccacagaaccagaccctgtctctaaaaaaaatacaaaataaatttggtaacagaaatcgtttcttttctttttttttttttggaaagggattcccactgggtcccccgggctaaa

SEQ ID NO: 620406 - DNA, 157 bp, Homo sapiens
aacacttgaaatatgtaaattatttattcattcatcagaagttcatataaaataaaattcaaaatcaattggagctatataaaatgtcttatggtgcacaaaatatggtcttatatggctaagcatcttttttctgatgaagggattgtgccccgct

SEQ ID NO: 620407 - DNA, 485 bp, Homo sapiens
tgggggttaatctgggggcacagtcatgcaacccggtttatcttctgtctctgaatcctgatggcgctttagagtctagtcctcagcttggcaggtctaaaatattaacaggagatgaagctgaccagatgacacgaatatgtttccgcccatgggaggagaaggctacataggagaccaggtcatcagaagccgtttagtgagcacagagctggaacccaccagggagctgagagtccttcaagggtgtttctgtcaagcttgggtagctgggctcatagcccgtctccaactgcatcaacactgatgaagtctctcttcggctttttctaaacactatgcagggcagcatccttcagtcaacatatcttttatcagaaatcaggttataatcgattggatctctgctttcttcaattacagtccaggcctgtggatataaactagacactgtgattagatttggggcatttaccaagtcttta

SEQ ID NO: 620408 - DNA, 230 bp, Homo sapiens
  misc_feature (149)..(149): n is a, c, g, or t
agaggatcgttttctgcccacgactcgagttataggaagtgttcacgagagaggataacacatttgaatctattttttaaaaatcatactggaagctagcagtatgggtggtcgtttaaaaggttcctcatatactcttaaccttcagncaaaccatacaaggtttattcaattcaaaattctaagaactttctgtgaaccaaggagatttgggtagggaaaacatttct

SEQ ID NO: 620409 - DNA, 494 bp, Homo sapiens
atttataatgtggagaggtaaatctttgctggatatgggagcgtgattacccagagagtagagtgatttctcttgtgaagtattgctgagcgaggcggtggcatttgatcacacctataatcccagcactttggtgggctgaggagggcggatcacctgaggtcaggagtttgagaccagcctagccaacatggtgaaaccctgtctctactaataatacaacaattagccaggagtgcacatgcctgtaataccagctacttgggaagctgaggcaagagaatcacttgaacccgggaggtagaggttagagtgagcagagatcacaccactgcactccagcctgagcgacaaaagcaaactctgcctcaaaaaggttattataggcagcctcaggaaactacgtaggaaacatgtgctgtgccttaggcactataatttaagagtttaataaatgttaactcattcaatccccaataacaacactataaacc

SEQ ID NO: 620410 - DNA, 242 bp, Homo sapiens
tggagctggcggccaggttgatgcactgatggcatgagattaccttcatgaagctgtccttgatgcggagctgtcccagatgcagccgcttgtctctgccacctcagtggtcctctccatggacaccacccgctacctggacctggatagcatcatcgctgaggtcaaggcccagtatgaggagattgccaaccgcagcctgtgacagaagccgagtcctggtatcagaccaagtatggggt

SEQ ID NO: 620411 - DNA, 227 bp, Homo sapiens
aaagggaaaggggaccccccccttttttttgcccccttcccgggtttaatttgggggccaagaaaaaaaaaagggtttttccggggcttgggggaaacggtttttttttctccctccccgcgcccccccaaaattttgtttttttttttcccccctttccccccttttggggaaagtgtcccccttggtgggggaccccaattaaattttttatatttaacccccca

SEQ ID NO: 620412 - DNA, 767 bp, Homo sapiens
agcgttcctggcagtgacgacaacgaaaaatcaggttaagtgtgatcgcagttacttggatataaagatgaaagggcaagtaagcagctagttttctgaaaactgatttaccaggtttaggttgatgtcatctaatagtgccagaattttgaatgtttgaacttctgtttttgctagattaatccccatttcttcatatatcattttgaggcttgggggtcttcattatactaccacttgttctttagtgacaagaaggctgattacatatgactataagacagagaaatagctttaaggtgactttaaggagatatgaatgagaaagaaacaatgatgatctttgagtgtagagagtaatttgcgcaagattattagtggctcagctgaaggcttggcgaaattggtaccataagcgtgtattgaacatatattttattttggattgccgacttgaaatttgtataatttgtgtcgcttgtattctgttctacataaaatcagaaacttcaagctctctaaataaaatgaaggactatatctagtggtatttcacaatgaatatcatgaactctcaaatgggtaggtttcatcctaagccattgccactctgtttcctgagagatacctcacattccaatgccaaagatttctgcacagggaacctaagaggtggatacacgttgttgcaagtataaaagcatcatgggatttaaggagaattgggagaatgtacccaaaaatggggaataataaatggataaggt

SEQ ID NO: 620413 - DNA, 535 bp, Homo sapiens
  misc_feature (5)..(5): n is a, c, g, or t
  misc_feature (65)..(66): n is a, c, g, or t
  misc_feature (73)..(73): n is a, c, g, or t
  misc_feature (80)..(85): n is a, c, g, or t
  misc_feature (89)..(89): n is a, c, g, or t
  misc_feature (96)..(96): n is a, c, g, or t
  misc_feature (98)..(98): n is a, c, g, or t
  misc_feature (101)..(101): n is a, c, g, or t
  misc_feature (119)..(119): n is a, c, g, or t
  misc_feature (142)..(142): n is a, c, g, or t
  misc_feature (150)..(150): n is a, c, g, or t
  misc_feature (152)..(152): n is a, c, g, or t
  misc_feature (167)..(167): n is a, c, g, or t
  misc_feature (225)..(225): n is a, c, g, or t
  misc_feature (236)..(236): n is a, c, g, or t
  misc_feature (245)..(245): n is a, c, g, or t
  misc_feature (251)..(251): n is a, c, g, or t
  misc_feature (264)..(264): n is a, c, g, or t
  misc_feature (268)..(268): n is a, c, g, or t
  misc_feature (270)..(270): n is a, c, g, or t
  misc_feature (303)..(303): n is a, c, g, or t
  misc_feature (311)..(311): n is a, c, g, or t
  misc_feature (313)..(313): n is a, c, g, or t
  misc_feature (316)..(316): n is a, c, g, or t
  misc_feature (336)..(336): n is a, c, g, or t
  misc_feature (348)..(348): n is a, c, g, or t
  misc_feature (382)..(382): n is a, c, g, or t
  misc_feature (385)..(385): n is a, c, g, or t
  misc_feature (387)..(387): n is a, c, g, or t
  misc_feature (390)..(391): n is a, c, g, or t
  misc_feature (405)..(405): n is a, c, g, or t
  misc_feature (441)..(441): n is a, c, g, or t
  misc_feature (486)..(486): n is a, c, g, or t
tgggnggcccgaggagaggaagacacacatgcctttccagaagggagatgccctttgacctctgnntcctggngcagagnnnnnntttnaaggtgntnggngaacgggatcctcttcgngcagtacttccaccgcgtgcccntccaccgngnggacaccatctccgncaatggctctgtgcagctgtcctacatcagcttccagaacccccgcacagtccctgtncagcctgcctnctccacggngccgtnctcccagcctgtntgtntnccacccaggcccagggggcgcagacaaaaaccncccggcgngnggnctgccaacccggctcccatnacccagacagtnatccacacagtgcagagcgcccctggacagatgngcncnacnnccgccatcccaccnatgatgtacccccaccccgcctatgcgatgcctttnatcaccaccattctggggagggctgtacccatccaagtgcatccncctgtgaggcactgtcctgcccagtgctcagagggtccacatcaacctg

SEQ ID NO: 620414 - DNA, 1362 bp, Homo sapiens
gagagccctgagcagccccaccgccgccgaccggacctagattaccaatcacaccccgggaggagccgcagactgccgcagaccggaccccagtcgaccatcaccgcgaaccatgagcagcgaggccgagacccagcagtcgggagacgtacgtacagagagagctgggtatgaagtaaggtgggacccacagtcccacgggaatacatcgtaccagcgggacagaccgtatgcgaggcggaccgaggccggcacaaaaaactacacacaaccacccacacacacaaagggcaaccaggcacacgaccgaccgcgaccgaacacgaacaagagacaagacagttcaccacaccgccccaccacgacaagacgcaccgcgcccgccgcgcgcaacgccacgcagacacggcgcaacgacgcggcccacagcggccccccgagccagcaaggacacccgacaccccccaccacgaccggcagatacgcgcgcaccaacacacccggggccactaccaagccaccaaccacccgcccaatccccgcacgacaacacccaaccaccgccacggcgcaccccttcaacagacaacaaccgcccaccacaaacaacaccccagacgcgccgccgaccaaccagtcggcacgcactacgcgcccgaacgactacccggaacaccaagcaacacacaagacggagcgcacccgacaacagcaccaacacgaacgagaacgcgaccacggaccccagtctgcagatacagcagcggacacataaagcagtcaccgacacggcgagcacagccaaaaagaggcaaccgagagcagagcccgaagcgaggagccaaggcaaaacgcccaccccgcaccacacccaaacccacaagcacgcacaaacaagcccgacaacccaacagccagcccagcacaagccgacataagcaccacaagacaacagagcgagcaccaccgtaccaatagaccgatacgatcgacaaagcgcacgcaaccaacgcccgtccacagacgaaacggagcggcaaaagaccgagcgagcgagcgcgccaagcccagcaaaagacaagacgcgcgacgaggggaagagaggagggagggggccaaccacggacgacggagaacgcgcggagacgcacaggacaggagagaccgggaggcgacccgacgaaagcaccaacaccacacgagcagtggcccaaggagaacacagacagcagcaaacgagagagagaaaaaaagaacggcagaagagtcacgagcggcagcgaccacgcaagcagaggcaaggcagaggagcaaagcgagagagagagcagacacgcagtgcaagacgagccgaagaagagc

SEQ ID NO: 620415 - DNA, 695 bp, Homo sapiens
agctgtcaccaggacaccgctatcaccaggaaagatcatactcatcagagatgaatgctcacatcccaaagaatttcctcagatagcttctgtgtagatgttatgtgaagatatttccctttctactgtaggccacaacgtgctccaaatatccacttgcagattctacaaatagagtgtttctaaactgctcaatcaaaggaaaggttcaaatctgtgagatgaacaaacacatcacaaacaagtttctcagaatgcttctgtctagttaatatgtgaagatatttcattttccaccatagactcaagacgctcgaaatgtccacttgcagattctacaaaaagagtattttaaagctggtccaacaaaagaaaggttcaactctgggagatgaatgcgcacatcacaaagaagtttctcagattgcttctgtctagattttatgtgaagatatttcgttttctaccacaggccacaaagcactcgaaatgtccacttgcagattctacaaaaagagtgtctccaaactgctcaatcaaaagaaagtttcacatctgtgagatgaacacatacatcacaaagaagttctcagaattcttctgtctagttttatgtgaagatataccttttccacattagactctaagcgcccaatgtcatttgagttctaaaaaagagagtcaaactgctcatc

SEQ ID NO: 620416 - DNA, 1077 bp, Homo sapiens
tccgatggttctaaaatttacaataaaggggtggggcaaagggttgtagaattgggctcgaaaagctccctcaaggttccgtgaggggacctcccctgtgaagccaaggcagtatggaggtctccatacatatatctcgtggtcgtgggactctataggcaaagcccgcgggccccttgggagagccagcaaccagagggtctcccgaacgacaccccacgcgaaagagggggctcgaagcggtgcacgaggcgtgggaaccacgccgcggaagatctcattgtgagccccatcggtgggggaaggagcagtctcccgagggaacccgagaggaagggtgaattctcccgcgagtcacaagagtgcatccgagaggtataatcacacacaaacagcggggaaaaggacctacgacaaagagagacaggaggagaggagagaccccgagatgtcaacagacacagtgtgtgaggcacggcgggagaaagaaaatcagaagaacaacaaacaatgagaggacacatgaggaggaaggagacagggcacacctactaaaagagagccacacctgggtgcaccccaaagacaccccaagtcgaagaaaacgaagaaacagaggaaatccgaggaaggcgagaatgtactaacaagcgggcggagcagtgagaaacccaaactattacgcataattcatcacgaggagaacgcgcgcatcaagagggtaaaaacacagcgaggaggaggggaacacagcaaaaagcgacagacagataaggttgagacacaaaagagaagacggaggaacaaaaaaagaggccataggcagagtggagaagaacagagcaaacacacaccatagatggcacgacggcccaaggacacaataagagagcaaggagacgagacaacaaaacaaccaagccccccgttcggactggagacacagagaataaaccaacaaaacataaccacagcatgaggagagatatagtcgcacacaaacaccggagcgaataaagaaaactacacgtggaagaatagacgaacccaggaatagaacacaccaatgagagaggg

SEQ ID NO: 620417 - DNA, 240 bp, Homo sapiens
  misc_feature (6)..(6): n is a, c, g, or t
aggtantcatatgtatgatgtccttcaatttcttagcagctactgatcctctgtctgtagaattgcttgagtagatttgcaaaacactttgtacaacattcagggctttctattttttcttcagcaagctcttcttcctcagcagttttcttttcacttaccactccccgtgcctcggtctcttccctccagcactgttttctctgctggctcctctcctgctcactggcgtgtgtgggg

SEQ ID NO: 620418 - DNA, 118 bp, Homo sapiens
ggaacgatccaccgcgatgaattaccaagcacccgggggaccggcggcggcgatgactctggaacgcgagccggaccattccagtaaataacacaagttgtgtggggcgtcacggccg

SEQ ID NO: 620419 - DNA, 476 bp, Homo sapiens
agctcctgatacaggaggggaccccaagggggttgcctttgctggctcgaatgcctgggtttatatcccgatccttgtcccctcccactgtgctctcaggcaatagatgattggctatttctttacctcctgtttttgccaaattagcatttagtgagctctctgattggacagctgtgggctcagttgcaagccccgtgtataaaggtggatgtggtcaccttcccagctaggcttagggattcttagtcagcctaggaaatccagctagtcttgtctctcactagcacaaaccatgtagtttaattgccaggaggtctgtcattaaacatgacaatgtttaataggagattagacttctcactgaatgtgtttgtttcccaggagcactgccttgcgaaagggaattaattcatcatttcatcgcagacctgctgtgtaaacattttcatctcaccgcataacaatgtctctgc

SEQ ID NO: 620420 - DNA, 539 bp, Homo sapiens
  misc_feature (510)..(510): n is a, c, g, or t
acagctatcgccgtgactacggtttcgctggcctctatctttcaccagcagacttctctccactatcaatctgattctctctccgagccgtttctaatccttcttgaacacaccgttgctggctttgcatttctctttcctccaaaagtgccgaggcctcaatttactcactgctgaaaaaggaggactctatatttgtaaatgaagagtgttgcttttacctaaatcaatctgccctggtatatgacaacataaaaaaactcaaggatagagcccaaaatttcaccaaccaagcaaacaataacgttgaatccacttggacactaattggtcatcctgggtactaccaactcttaggcctttaatacctatttttctcctcttttattcggaccttgtgtctttcatttagtttctcaagtcatacaaaaccacatccaggccatcaccaatcattctatacaacaggtgctccttctaacagccccacaatatcaccccttaccacanaatgttccttcagcctaatctctcccact

SEQ ID NO: 620421 - DNA, 377 bp, Homo sapiens
catactttgataaacaaattgcatggtatgtgaaccacatttcaataaagttgttatttaaaaaaagaaaatagcagcctggacccagatggcccatggctgcctataatcccagcactttgggaggctgagacaggaggatcaattgaggacaggagtttgagatcatcctgggcagcataacacgatcccatttttacaacaaaaaaataaaaaatttagctttgcatggtggtgtacgtctgtggtccaagctacttgggaggctgaggcgggagtactgcttgagcccaggagtttgaatctacagcgagccatgatcacaccactgcattgcagcctgggcgacagagcgagactccgtctcaaaaaaaaaa

SEQ ID NO: 620422 - DNA, 101 bp, Homo sapiens
tgttgcatatggattatataaactgaagagcagggaaggaggctttgccatcttcagggaaggaggctttgccatctcagggaaggaggctttgccatctt

SEQ ID NO: 620423 - DNA, 111 bp, Homo sapiens
acgaaaaccaaagtgcatgtttggcatgtcacatgtgcaaatcattcagtatggcggcatgcaagccagcatcagtgcaggcaaccagttgcagcccaatcatgcacgtgc

SEQ ID NO: 620424 - DNA, 152 bp, Homo sapiens
actgatggctgaggggagtcaggggtggagacctaattgcgcgctgatttgcctgctgttcgcaggaggaggcctagctactggggtgaggcttggattagcgtttagaagggctatttagttgtgggtactcatgagttggagtagaatga

SEQ ID NO: 620425 - DNA, 1084 bp, Homo sapiens
gcagccacacagtccgagggcagagccaggctctgtgagagcagctagcatgctaaaaccctttggttatttgcttgaaggtatctttagcttacggcttcatctgcccatgactttgtttattgtttcttggagactgggagtccttgctcaggtgcgcccaggattcctgggtgcgaggtgcgcgtggatgttgggtctccaaggcgtcgcgtgtgcattgtacaggcatgttggcacccaagcgctggtgcacatatattcaggctttgtttcgggggtacccaggagcaggtatttgccccaatgtgtggggctcagggtggtgagtctccatacgtcccggccctctagggtgtactctctggcccgcttaggtcctcccagaagtctgctggcgatttcttcctgtgtttagcccacgctggcgcccgacccctgcagcctcagtgcatattattgcaagcgggcgtctacagtcgccctgttagcatgctcattttcgagtggggcctcttggaaacttgtggttgcgcttggagggttgccgcctggggggttgtcagctggctggccgtgggcgatgaccatgctttccacgcctgtttttatggttcaccgtcaatccgtgcttgttccctcggtaggcatttgactcttggaaaggattaatttacgcctatcggcctgagagtgcccccggtagtcactggggttaacagttgccttcggcaccgagtagcgaactatcctttcttccatattgatgtccctcgaccacgaaaacttatctctcggtatagcagaatacgtcgtggcttgtcctaccgcagaaaaggctctgcgcagagcaaattctcggaagattgcccgggctggtcgtcgcctcccatcatagttttacccccgtggcttattagaggaattaacacagactttggggcggcgcacgctctgggttgtctcctggagcgccaataatcaatacctgtgtcgccaaggcggggtaccagaaggccggcattacctttcacttccttgcggtggaccatgtccgagggggttcgcgcaaataccaaggatg

SEQ ID NO: 620426 - DNA, 832 bp, Homo sapiens
tgcggtggctcatgcctgtaatcccagcacttgggaggccgaggcaagcggatcacgaggtcaggagatcgagaccacggtgaaaccccatctctactaaaaatactaaaaattagcctgggtgtggtggtgggggacctgtggtcccagttagacgggagggtgagggaggagaatggtagtgaacattaggaggcggagcttggagtgagcggagatagcgccgactggatctcagcctggggatagagcaaggatgacatctcaaaaagaatgacatagcaaaaagcataatggcagtgtaaatccaatatattgataatatcattggtatgaatgggttaagtaattaggtccaatggcgaggttgtcagatcagaaacttttctacctgaatttaggtagatagaaaaagtagagagaatatcaggaagaaaatataagggatgaacaagatgttaagaaatataaatagcttctacagaaatctcctctggaagattagaagtagcacataggtgggcgggggggtggggttatgcctgtatcgtgggctttgtggagggcagggggggtggatcaccttaatgttcggaaggtccagaacaagctgtgccagaagaagcaacctaatctctacaaaaaaacacaaatacgcccagcatgtggcagcgcatgacaacacactaccaggcggacgaaacgacgacaaaggccgccaccaactcaaaaaatatccaaaagagatagtataaaggcgcgaacagacaacaccacacaaaccacaaagaaaccacgcacatcaacaatttcaaacaaaaacaccgccaaa

SEQ ID NO: 620427 - DNA, 178 bp, Homo sapiens
tgtgaagcggttgtgtatgttggtatctcgcaagtggggaggggggttgtccggagagaaatgggatgttctaagggttctgattgcagagggatagagggggcctcctccgctctctgatctcaccgctccccgaattcacacctccgacccccctccgcatacacaagccgcttca

SEQ ID NO: 620428 - DNA, 289 bp, Homo sapiens
gtgagtaaggggcacgtgggccaaccccaatctgagaaagggtgacacagaccagcagggacacttccccgtggccaagaaacatgttggcccacaaagtcaccttgagttacgggggcaaacagcatctgtacccaagctaaatggccatatctcaggaagggcaagcaaccgggtggatttcttctctcgaacaggcatggagagggggggatgtgcagggcgcagggtgcaatcaatcataattgggagtgaacacagccaagcaataattgttccatatgccatt

SEQ ID NO: 620429 - DNA, 979 bp, Homo sapiens
cacaggctaattatcaaaatgattgctctattatagaatgagagccactgctgcaatctacttaattgaggtgttccgccaatcctttcggatcgaagccccgtgaacaatccggcgctcgtgattgactaagacaaagcatgatctacctgacgcccgtgcacgaatatgtggacacagctgaatgaccggattctatcaagtgagctccaccttatcggcgtaataaggacagctgctgacctgcaccgtagttactgatgtctgccctatgaagagttctagccgttaatctccatggaacattcgatagtgcaacgggaactaaattgatatttactattgatcctgctatctgttagaaccacaataagggaatttctaaaaccctggaggaataatctatcaaaaacgctcgaggtgctgagcgaacgcgacgcacaagaaaacggcgcatggagctaggcgagaggtccctatttacgtgttcacttaatttggtagcaatgccataggttacgtggtattcccacttttctgccccagtgatgacgagtcccggcagtaaaaccttaaagggttcaatggacctagtcatagggggggtcacatatatatcattgggctactatacacttcgattccgtcaaatcgcaacgctagatgaatagttaagtaccaagagttgctcgtttatggcaggaaacaaaacagttttaacttatttgaatgcgtaggccttgatcagctaggagtcaacgcatttgttagtgacaattacatagggaatcaacccttatttaatcgggagtgtcacaccattagattgggtcttccccattaatctgtgccattgtcagaatttggccccgccaaaagtgtgggggcctcaattgaggtatctaagcccgcaggtcaattcctggggcaatataggagccagttaatggagtaacttgaacgacctcctattggattc

SEQ ID NO: 620430 - DNA, 181 bp, Homo sapiens
tggctaatttttgtatttatgtagagtagtgggattttgtcatgttgcccaggctggacttgaactactgggctcaagcaatcctcctgctttgccctcccaaagtgctgggattacaggcattcagcccgtcggcccgggccccccccaatttactccttaaagggtaacatcacttatt

SEQ ID NO: 620431 - DNA, 184 bp, Homo sapiens
cagaaccactgcctagaaaccaccctctcctgaccctgaagaactgtgtgattctgccccacattggcagtgcacccacagaacccgcaacaccatgtccttgttggcagctacaacttgctggctggctgagaggggagccgatgctagtgaactcaagctgtagcaaacagtagagatggag

SEQ ID NO: 620432 - DNA, 343 bp, Homo sapiens
  misc_feature (90)..(90): n is a, c, g, or t
  misc_feature (113)..(113): n is a, c, g, or t
  misc_feature (122)..(122): n is a, c, g, or t
  misc_feature (137)..(137): n is a, c, g, or t
  misc_feature (159)..(159): n is a, c, g, or t
aaattcgggcaccgagagcattttccatttggttcgtttaaaaccaaagaacaacaacaacaaaacaaagccccaggtttggtgactganacctgtaaaactagcactttganaggctgaancgggacgattgcttnaggcccaggagttggagatcancctgggcaaaaaagcgagaccccatctctaccaaaaaaaaaaaaaaagatggctggatgtggtggcacatacctgtggtcccagctacttgggaggctgaggtgggaggatcacgtgagcccaggaatccaagtcaatgtgagttactgtcacgctgctgcactccagcttgagtaacagggtg

SEQ ID NO: 620433 - DNA, 395 bp, Homo sapiens
atgagactctgtatctcatcttcaaaaacaatgtgtataagtgatacaggccagtgcagggctgacttattatcccagcactatgggaggccaagtgggacagatagctttagagcccaggggtttaagaccagcctgggcaacagggcgaaaccctgcctctacaaaaaataaataaataaaaataaaattagccaggcatggtggcttgttctggtagtcccagctactcaggggacttgagcctaggaggtcaaggctgcagtaggccgtgattgtgccactgcactccagcctgggtgacagagcgagaccctgtctcaaaaataataataataggccgggcgtggtgggtcacacctgtaatcccagcacttcgagaggccaaagcatgt

SEQ ID NO: 620434 - DNA, 1268 bp, Homo sapiens
ccgaggactctcccagtggaggtactgcaagttccaccccgaggcatctgacggcattctggtgagcgcagcaggcaccactgtgaactgtctgggacgcagccaagcagcagcccctgacagagctggcagcccatggggacctggtgcagcgcgccgtctggagccgagatggagaccctggtgggcacggcgtgcaatggacaagcagcatgcggatctttgacacccagaacaaagccgctgggcctctcagagcacgcaggcccatgagaccaccgcagggatagccggctggccatggatgggccacctgggacgcaccttgtgtctactggattcaaccagatgacgtgagcgacgaagtgaagctgtgtggacacgcaggtacattactccagacgccctgagcactccctcaccttggaccccctcgcttgaggatgtcctcgtgcctctgcatggacccctgactctgggctcctggtccatggacaggaaagggcgagaggcaagctgtaccatgctacgacgtgagtccacgcacgcagccgagcgactgagcccaggatgacccagatgtgatccctggacaagccgtgcatgcacatgggagcatgcacccaacgcacgcccaccggcacagcgcaacctacgccgcatccatgaacacacgcccagagacccccccgcgcgtcaccaacgaggcatgcagcgcgacacacaagacccatccgagcacacacacgacggctacccaatcgatgaccacccggcaagggcacgcgggcacgcaccaccacagaacgggaaaccctcgcactaccccgggaccaccctaggcccgccggcatgccgtcgcccatgacaaaccggaaccacccgcagatagacaaacgacacgaacactaggaggcacacaacacacacaccaccgtcacgcacaacaacggcacagagaacgacggacggcgccacgaacggagggcaggcgccagcccaaccaggacgacggccacacgacaacgagcaaccgcaccacggaagtcgagacacagtacacaggaagcgcccgaacgccagcgacaacccaccgacacacggccacgacaggcagaacacggcagcacaccacaacgaaaccgcagacgcgacccgaacgcgagaggccgcacgggccacacacacgcagaggcacacaaccagccacccacacacacagcacacgcacacccgcaccacgccgcacgccgccaacagcgggcacc

SEQ ID NO: 620435 - DNA, 90 bp, Homo sapiens
actattcaaagtttactgacctccccagccagcaggccaacccttccgagcaggggaaatgtccatccagcttcccttgcgtttaaggcc

SEQ ID NO: 620436 - DNA, 993 bp, Homo sapiens
ggcggtagcatcgcggagtcggtgctttagcacgccgtgacaccttatactctcgcggcggcagaacccgttagagctcggtatcctagtgcacacgcctgaagcgaggggccatgttttctgattccagtcctgcgtacggagttgaaggtggatcgcagcagttaccagtgtgctgcgtgggaacagttgcacatttggttatctagcttacaaaagatttatgttaaaagatcattcgaaattaagggttatgaataaaatcttcaatatccaagaaaagaaacccccaaagaatagtacatgctttggactagtggaagggatgtggggagattaaagctgtgtgtactgccggtttgtggggaggtttccaaaaagttcccattctggtgagtggggctcaaacaaaacataagggaagagactgagacaaatgtgggccctcctgatcaatcaaagaacacaaagacactttaaagtgggaccacttttggatgctgcaaatcagttgtcagtgaagttaccctgaatgtggttatagaatggataccaactctgttctggatacacttcgtggatttctaaatgtggtatatgggaactggagttttcacatatatggcatttgtccttgttgaacccactggtgctggcccatttggtttcacaccacaagacacacaccaccagggggcaaacgccaaaaacacacaccaacacacaaacttcgtgtgccggcgccgtggacacacgaaaaagttaaacacatctgtggagccagcccagtagtacgtaacgtggcatggtcttccacgcaaccgggcgactgctgggtgattcacccaaaaaagccgggacacgttggacaacacgagtgggcgcatgggtcaaaggcacggctaaccccgacgcgtggaaaagaacaaagacgacgcgaaacgacgacagagaacgaccacatcaccgacgagaccgagacaacacagaaca

SEQ ID NO: 620437 - DNA, 307 bp, Homo sapiens
gggtgacagagtaagattctgtttcaaaaaaaatttttttaataaaataaataaaaataaataacctttttttgaaaaaagaatgttggccgggtgcagtggcttactcctgtaatcccagcactctgggaggccaaggcaggtagatttcttgaggtcaggagttgagaccagcgtggccaacatggcgaaacctgtctctactaaaaatacaaaaattagctggatgtggtggcaggcacctgtagttccagctactcaggaggttgaggcaggagaatcgcttgaatgtgggaggtggaggttg

SEQ ID NO: 620438 - DNA, 307 bp, Homo sapiens
tgatctagaggatctgggagttaggggacaggacaccaagcaatacatgcagatctgtgtgtgtggacagaaggtacttgagagatggagtttggtatatagaaacagaatgaataaatgaacttgtatctttgaactttttttgcaagaggtaagtagaagattcaatttgattcttctagaggggggaaaaaggagtggggagtaggtcttcattaggcggtcatcatctggacgaattcttcatagtggatttgtccgactccatcagtatgtgttcctctgatcatgtcatctacttcttcat

SEQ ID NO: 620439 - DNA, 503 bp, Homo sapiens
gtcgaggtaccaacaggagaatattggtcttcggttgctctagtttagaccaatacttcacatgactgatgtaaactggtggctagtttcggaaaggtttctcatatcaatcctgtagaaatctccacatgagtcacaaacacaaattgttcagtatctggggaattcaaagccctttcctcaaaacagacatttctcctatatcatatctttcttcagggggaagtattgagaagtcattgagaagtcattccgcaaccactatgaggagagaaacgcaaggccaggaaagggaagaagtacacagggattcacggggacagtggtgatggggctgagcactggcttccagaactggtggtggggaatggagggggcagcaccctctcaatggcatgtggaccctcctcaatgtgattgaatgaccggggttctttggaggaagctccttgtaagaatcggtttaggtctctctgatgaagtaacgatggattctgcagaga

SEQ ID NO: 620440 - DNA, 154 bp, Homo sapiens
tctctcacactgggcgacagagctagactcctcaaaaaaaaaaaaaaagaataagatttgtaagttagattaacaattttaagggactattgggtccataaaagggattttggatattttaattagcatattaaatgattgccagtgtggagag

SEQ ID NO: 620441 - DNA, 192 bp, Homo sapiens
agaagtaacctataagaactcaccattacaaagaacacctcatgaactaatgagaagagaaagcaacagattaatctagcaccttcttatcttgccagaagtctagcagatgtccctagaagagtatggttcttctccagtcatttgtcaacggcaagttagtaatagcatgttgcaaacatggagactctg

SEQ ID NO: 620442 - DNA, 917 bp, Homo sapiens
tatctgcctctgggcacttgaggggcctcaggaagtgtgtgcttgtggctgcatctgcccgtctccctggcccaccatgtggctgcaggccaagctcttcatgctgaccatgaagagacctagttacctgccaagggattccccttccctcctcctcagggtggggtgaacaaggctcctatcccaccccaccccaaaaagagaaaaatgaaaaactcatagtttggagccaggaggcagggtgtcctacagggctgcacagccctgaggggtcagtgctgggatctggttggttggttgtcttttgtcttttttttttttttttttttttacaccaactcattaatgaaattgggcttcagcccccagtgttggccttgaacaaagggcacagccctgtggggttggtgcaaaaaagtttgaatacccagggtggcacggtgggggttctgggggtaggtaggtcacctctcctttgggagaatttctttggtaacaagaacaattttttgtaacaccgaaatcgggggttggaaatagacgctggagccctcctctgggaatatcagcctaagaaactcatggatatgaattcacccgaaattctcatttgccataggcgagctttagagaagatgttctctaccaggttgtactaccgggtaatctgctcagcggtgagaagtggcgggccattgttttttatggaggtttttacgaggatgccggatataattcacccctttatattcaatattgttcaaaaaaggtccggcctatcagggcctaccgaatggtagcctaagggcttttaaaaaaagggggctagtatcgggggccgatcaccctgtaaggctggggatacacggcgcacggaaggtggactgggtcacaaagatgtgtattgtgcaaaataa

SEQ ID NO: 620443 - DNA, 493 bp, Homo sapiens
agaggcagatggagccggggttgggcctaaggccgaatcagtagttggggctgcaatggcttctgcaatagcaccacctcccggggtgacagaggcccttggggctgcaaaagcccctgcaatggcaggggctcccaaagtggcagaagctcccagagaagcggagacttccagggcagcggtgcctcctgggacagtggtgcctaccgaagcgggtgcacccactgaggggaccgaggggtcctggggtagcaacaccctaccaaggaagctgaagctcccggggtggcatcgcctaccgaggcagctgaggcttctgtgcccgcaacacctactggggctgcagaacctactgggggctgatgaaatctcctgggaacttttgagttccccaaaatcaggggagggtacctggaaacatatactgcccaataaatgcaatcccgtgggggcttaacactgggggcttttcccgtaagtccacattcagctg

SEQ ID NO: 620444 - DNA, 405 bp, Homo sapiens
ggcagaggagtgtaacttggaaaccgatgctagatattagcctgttagtttatctcaatttaaccttatatcagactctctaaaatagagtctgaacttaaaagatttggtgccttaagagtagttacttttaaaatattttgcaatgatgttagtttttaagaagtagttttgctgatatttgtagtcacattttctcttaatatgttagaagacgaagataacagctaaacttggatttattgttgtattagttaagaaacgggtcttatctatttactcaccctggattctctgctctctgatggagcccttctgaaatctatactctgagatcctagtgctatatactctgtagcagggaacctatcaacaacacagtactctgaaagccctggtcgacgc

SEQ ID NO: 620445 - DNA, 450 bp, Homo sapiens
  misc_feature (306)..(306): n is a, c, g, or t
  misc_feature (369)..(369): n is a, c, g, or t
  misc_feature (439)..(439): n is a, c, g, or t
caaatgtgactctttttgcaaaaataaaacattgcagaatatttgtaagccttaaatcaacaaaaattaactatgcaaacctctggatgattctaaataagattaaatgatttctaatgattttagcagtcttctgttagattgagttgcttcatccttctgcactcccaggtatttgtgaaaataacagggaatttttcctatcacaggaaacattcttttgaatacagtggcataaattcttggatttctcctggattcttgacttttcattaaagtttatgctgatgtaaagctgaggcaaancaatatatttctgtacttgggggctcagaaagagggaaaaatagttctttgtcacttccgatnaatatttgccacttcctcgcctacctggccccttcaacaaagggggactttctgcagtccacttgagggntttccatatac

SEQ ID NO: 620446 - DNA, 189 bp, Homo sapiens
  misc_feature (11)..(11): n is a, c, g, or t
tgagggggccntgaggcgagcggttagagcgtctcccggaaggatgggccggtctcggagccggagctcgtccgtccaagcaacaagcaagacaagaagacgtcctgatccgacagagtggagcgtcattcgaataggacggggggagtggcgtcgctacggcggtcgggaggacgggcgcctgccccc

SEQ ID NO: 620447 - DNA, 328 bp, Homo sapiens
  misc_feature (36)..(36): n is a, c, g, or t
  misc_feature (104)..(104): n is a, c, g, or t
  misc_feature (164)..(164): n is a, c, g, or t
  misc_feature (171)..(171): n is a, c, g, or t
  misc_feature (173)..(173): n is a, c, g, or t
  misc_feature (183)..(183): n is a, c, g, or t
  misc_feature (203)..(203): n is a, c, g, or t
  misc_feature (206)..(206): n is a, c, g, or t
  misc_feature (216)..(216): n is a, c, g, or t
  misc_feature (225)..(227): n is a, c, g, or t
  misc_feature (236)..(236): n is a, c, g, or t
  misc_feature (308)..(308): n is a, c, g, or t
aacactggcaggtgggtcaaaacgctactggtagcnggaggaacgactaaagcaaagtattaccataaggctaaaacatatggcctgacaaatgcctgccaggnacactacacataaggcatgtcttcagtgtcccttcgtggggccctgcagccacccctganttccctncnccccctaggntagacggggtcctgtaaatntcnttgcatccanaaaaacgcnnncaatttctntctgcctttcctccttttatcctccaccctagccatgttgtcaaattctcttatcatgtcctcattgctganattcatatcatgtatggctt

SEQ ID NO: 620448 - DNA, 481 bp, Homo sapiens
ttgacatttatagccaagtgagtatactcaatgtctctgctgtggtacaagagtacgggaaacagaaaacaagattactatcactactgaccagggccgtccgaccaaggaagacatcgaacgtatcgtccaggaagctgctaagtcccacagtctcgaagatgaccagcccagggacaatggtgctcctccaagaccttcatttgaatcctattccttcaacatgctctgcaactgtcgaagatgagaaactccaaggctagattaacgatcaggcccatccacaatattctggcccaagtgtcatgaaattactcaactggcttgataagaatcagactgctgagaaggaagaatttgaacatcaacatgaaagagctggataaggctttgcatccccatcatcaccaatgctgtaccagatgtgcaggacgcctgccaggagtgcatgcccggcgtctaggagtgtggcgtccgagga

SEQ ID NO: 620449 - DNA, 405 bp, Homo sapiens
aagctgtgtgttctttggcggtcgttcatgtcagcagatctcctctcactcgtcgtcgaccgtcgtctatcacttcgacgtcgctggctcggagcgtcgcgcatgcatttgtgcgtcccgagcctgggcgcgctcacgtgcgtcggccgtaaacgtcttgatggtctcagggttcttgagctccacccagattgtgcgcgggccgtggttcggcgttctcggcagcatcaccaggcgatcgggcgccgagttgcggccgacccactggaccttgcgcacctcgccgcccatggcctttacgcgcgtgacgaggtagttctcgatgtcacgttcacgcatggaggaccagcagagccagaatggggaagtacaccgtggcgataccgatcagcatccacttggcca

SEQ ID NO: 620450 - DNA, 994 bp, Homo sapiens
gagagtgggtggacgagtgatgctatctagtaaggcacacgggatcccaggccaggtctctttctcctttggcctcctaatagtcaaccgtatcgtgttgctactgccatatctagggaaatgatatggagatcaatacagtttcttcatggctgtgcttagcggctctaggtagactcggtataatcataaaaatgaaatagctagcgttaccacagttggccattagtgcaacgtagcaggcattatgctgggtgcttgacaaaagtatagctcatttaatccccgcacaaattctggaggtaggcaccagtgattattctcagttttactgagaaagtatcgtaaggcaccatgtgagttattcaccgtggtgtaagaggagtttggaccaagtacctggcacattcacacaaactgggttgtgttaaatgaacattagagaaatattttatttgttaacttatttcatgttttagaatcttctccagatagactatgatagcagatatagcagagttaatatggtaccagtatgttgaccttcactcttatttattgaaggaaacacacaagtccaactagaacaggctgatttatcatgtgtgagggaatggcatgcacccaagtggctaaacagcaatccctaaaatgaattttggtctgtgaggtgtcctctgagctcaagctaaggttaccacaatacacaagattttaaaatgacaatgttgtcaggtccaagaccaattcatgatgttttccattttattgaacttaacccttatgattaaggacctggcggggaagatcacaaaggcctgaaaaaggctcaaaagtacacgactagaaacacacgcagtagagcacggatggccaaaacacacaacgaggtggtacgaaaaaattctgggaaaagacaaaacagagacaagataatacagcacgaacagtaaaagtaaatacaagagcataatgactctgttcgcacatacga

SEQ ID NO: 620451 - DNA, 639 bp, Homo sapiens
tgcggtggctcacgcctgtaatcccaaggcaggtagatcacgaggtcaggagatcgagaccatcctggctaacacggtgaaaccccatctctactaaaaatacaaaaaaaattagccgggcgtggtggtgggcacctgtagtcccagctactggggaggctgaggcaggagaatggcatgaacccgggaggcggacctggcagtgagccgacatcgcgccactgcactgtagcctgggcgacagagcgagactccgtctcaaaaaaaaaaaaaaaaaaatattatcttctggctgggcctggtttttctcccactaacctctatatggatattccctaaaagggcaaaataccaccaatattctttatccctggggctttccgacagggtcacagtggcctttgggactaaacgggtcctaaagtggtaattaaatttagggataaccagggatacctggtattagcagggatagtaataagggaatactaggcagagacaaggaaattagggcgtgttaaaacaattaaaattcaatttttttaaaacctccaaggattgtgggcccaatttatttttgaaggtattaccagtggggtccaagtatttaaggcaaaacaaaatttcttaaaatttact

SEQ ID NO: 620452 - DNA, 428 bp, Homo sapiens
acgcagagtgagacagagagacagagacagtgagacagagagacagaaacagagacacagagacagtgttagagttagagagagacagacagagagacagagagacagccagatagagacagaaacagagacacagagactgcgagacagagagatacagagatggagggacagagaaagagagacagacagagagggagacagtgatggagagacagagaaccagagagagagagagacagagagagacagagccagactgacacggagagacagagacagagagatagagacagagatggagagacagagacacagtgatggagagacagagaggtttagggttagggtgaggttagggttaaggtagagagacacggagagacagagacagagagagagatagagacagagattcctgtcgacgc

SEQ ID NO: 620453 - DNA, 393 bp, Homo sapiens
cgctgaagagcctgcatcgaggcgctacaacagtcacacacgctaacaggtgtgcggctgtatcgaccgcccgctcagcggcccatgcccggcatgcccttcatgccgcccatgcgcttcatcatcttcatgaggccaccgccgcgcatcttcttcatcatggtctgcatctgctcgaattggttgagcatgcggttgacctcctggatatgcacgcccgcacccgcggcgatgcggcgcttgcggctggccttgctcttgccgtccatcagcagcgcgggctggcggcgctccttggccgtcatcgcgcagatgatgccttccatgcggcgcatgtcgcgctcggccttgcccatgtcggcctgaccggccttggaggccagttcggtgggc

SEQ ID NO: 620454 - DNA, 174 bp, Homo sapiens
gcgggcctgcagggccattggtcttcctcaccgcgcagtcttggctgggaaatcgcgtcaccgaccgctactttcggatccaggaggtgctgaagcaggccaggcacttccggggaaggcaaaatcgctgctaacaggttgggcggtcagacccgtgattcgagcctttgtgat

SEQ ID NO: 620455 - DNA, 161 bp, Homo sapiens
gccaggccggccaggacagcacccccccccggctgctggtaaagggcaactaggagaacctaaccaggccaggcgggggcccttggacagcttggaaggggtttgccctttccctgggcaggggtaaaaagacaaggaacaataaaagtgctacagctcca

SEQ ID NO: 620456 - DNA, 255 bp, Homo sapiens
tcgtttatcacgcgggataatatacaaccatgagctcgtctagcctgggaacatacatcatccgtatatcaatcatattcatcctacattgctgccgaccaccagaactcattcctcctatctagctataatttcatatacattaaccaacctctccccatgctccccacccctttccatatgatccagcagtccttctactgggtatttatccaaggaaccagaaatcagtatatcaaagagttgcctgcaaca

SEQ ID NO: 620457 - DNA, 84 bp, Homo sapiens
cccagccccaaccagacctctctgtacttctgtgccagcaggccgggacagggaggtctaactaactatggctacaccttcggt

SEQ ID NO: 620458 - DNA, 334 bp, Homo sapiens
  misc_feature (9)..(9): n is a, c, g, or t
  misc_feature (221)..(221): n is a, c, g, or t
  misc_feature (266)..(266): n is a, c, g, or t
  misc_feature (294)..(294): n is a, c, g, or t
  misc_feature (307)..(307): n is a, c, g, or t
gaattcggnactctgttgtccccagatcagtagtttcacagtggggttttatttcttgagatggagtctcactctgtcacccaggctgcagtgtgcagtggcacgatctcagctctctgcaacctctgcctcccgggttcaagtgattctcgtgcctcagcctcctgagtagctgggattacaggtgcgcaccaccatgcctggctactttttgtattttnagtagagacgaggtttcaccatgtttgccaggctggtcttcaacncctgacctcaggcgatctgcccacctcngcctcccaaagtnctgggattacaggcattagcaccgagc

SEQ ID NO: 620459 - DNA, 972 bp, Homo sapiens
cctatgtatgttgtaattgcagggtgctgctgttgctggacatgttttttgggtcgatttatatgtgactgtctttattgtctgttactatttgtgttatgtctgcttctcgtgtatatctttggttttatttctattttcctatgcaattttgatttagggtgctatttagttgttattctccctccctttgtttgcctgatctttttggcccactctatttgagtcatgtttcactgtttatctggtatttgtagtatttgaatatggttctggtagttctcaagttgagtaatcctgttgtctcttaatgactttacagattctgaccttagattctgtgacatactgatacagggttgggctggctatgtctttaccacatcaattaggtttgctttagaatttctaacaatgtctgggctttggtggctcactcctgtaatcccagcactttgggaggccgagatgggcggttcacgaggtcaggagatcgagaccatcctggctatacatgggtgtaaccacgtcttctacttatttatactataatcattatgccaggcgtagtggtgggcgcctgtagtcccagctacttgggaggctgtggcaggagaatggcgtgaacccggtatggcggagcttgcattgagccgagttctcgccactgcacttcagcctgggctgacagagcgagactccgtctcaaaatatataaagttactatacaaggctgggcgtggtggctcacacctgtaatcccagcactttgggaggccaaggaaggtggatcacctgaggtcaggagttcgagaccagcctggccaacatggtgaaaccccatccctactaaaaatacaaaaattagctgggcgtggggcctgtaatcccagctacttctgaggctgaggcaggagaaccgcttgaacctgggaggcggaggtgcatgagccaataaggcaccacggactc

SEQ ID NO: 620460 - DNA, 124 bp, Homo sapiens
aagttcttctcttcaggttcacagaacccgccgcctttttgggtagaagttttctactcagctagagagatctccctaagaggtatgttgctttttccaaaatacaaacagtatactcatgatt

SEQ ID NO: 620461 - DNA, 743 bp, Homo sapiens
gtcaaatgtaatgatagcaaagcgcatcgtgaagacccttggtgataccgtgacaggattagactgtgctagcgagactgaaatacaggtggtgcagagtctgggggtgcctccagagaggattatctatgtcaatatcgttgttaaacgagtatctcaatattaagtatgctgctaataatggagtccagatgatgacttagtgatagtgaagttgagttgatgaatggttgccagagcacatggccaaagcaaagatggtttggcggagttgccactgatgattccaaagcagtctgtcgtctcagatgtgaaatctcgggtgccactgctcagaaccagcaggctccttttggaacgggcgaaagagctaaagtatcgatgttgtgggtgtcagctgccatgtgcggaagcggctgtaccgagtcctgaggaccttcgtgcaggcaatctctgatgcccgctgtgttgtgagacatgggggctgaggttggtttcagcatgtatctgcttgatattggcggtggctttcctggatctgaggatgtgaaacgttaaattggaagagatcagcggcgtaatcaagccagcgttggacaaactactttccgtcgagactctggagtgagaatcatagcgtgagcccgggcagatactatgtcgcatcaggtttcacgcttgcagttaatatcatgtgccaagaaaacttcgtattcaacggaccagacgggctcgatgacgaa

SEQ ID NO: 620462 - DNA, 728 bp, Homo sapiens
  misc_feature (544)..(544): n is a, c, g, or t
  misc_feature (556)..(556): n is a, c, g, or t
tgggtaattttttaattgggatagtgctttttggtttggttttggtcctgcttaaaggccttttttggcttggacttgaaataatgttctttggacagagctatattggctgggttaaattaatgtacacctaaagtatcgctattaggattggtagaaatgtctccgtgagtatcgccaatcctggagggtggacaccaatatagcctttgatgaaaggggcaggggatcctgggaggctctacttccaggtggctggctataatggcctcatctaatcgggactaatttggtgtgtaggaaactggcagtgggggaagaattatgcttcctggctccaggctaaaaggtgtcactggatctgctccttagaaatttcagagttaacttgagcaaaacctcagttaaaacccattttaaggtggcagtggattgggtgcagtgactcttgtgaataagaatttcctcagtgtactgtggtgccctagtttttccagggtactgggccgtgtccatatagaatgcgaggtgattgtgtccccangttagctcgtgnttcaccagacctttggggggtgctcttatagtgttccattgggagaagtctcagggccgaaaagaacgggttgcattgtagccacttctcgtgttttaaaaataaatctatggcttaaaattacctattaatagtttgggggtcatttaaggggcacttgaaggaagctacc

SEQ ID NO: 620463 - DNA, 90 bp, Homo sapiens
tgactccagaggatcccgcgcgttgttgttacaaaaaagataagcaaaagtaataaaagtaaaatcaaatgcaaaatatctcgatgtagt

SEQ ID NO: 620464 - DNA, 123 bp, Homo sapiens
tacactcctctgggccctcgatgtctagctgagtgtccgcggcgagcgttactttgaaaatagagtgtcaagcaggccgagcgcctgatacgagctagaataatgatagggacgcggttctat

SEQ ID NO: 620465 - DNA, 437 bp, Homo sapiens
gatttcagagacccattctaaacaagggcattcactctctggaagtagcatggccttgtgaacttaaatttggttttgttttttcttttttgctgttagaataatttcagacccaataaggaatttcgattattaaagttgagaaatttcacaaaactgcctggcacccaagcccccacatacataggccccttttaagttataattttttgaaattagaaggtgcctttggtaaaaaccagctggaatttttaaggggtggcctaaatagttaatgaatattgcctttgcttggtaggaagtaaatcaccagatatcttattgtttcatttaggaaagtagtgatatagatgaagagccaacttgatgaatgtgctattcataagctagaaactacagtttttccaaactaataaactgatgaattctaaataaaa

SEQ ID NO: 620466 - DNA, 563 bp, Homo sapiens
tgtccctgggccgggagcccagcaggccgggagcggatgaggccacaccccgtcggcccgggccgatttccctccggtgaatcatcgctcgcagcggcggcgccctgcattggccgcatgaggcgcatcctggtcccttggccggggctcaagcctgaggcgcaggggaggtagttcgcccccgaaccttttcttctgcggagtgtccggggccggccgtggaacccgcgacaacgaatttgggcggtgtcatttccggggggcccaagagcgtttggaagaaaagcgacaccggaaaagagacggggccccaaagggagcacttgagagattcccagatgaaatgaatcgccacattccatgttcacgcttcaaacccgtggggaaccttacaaaaagcagccgtcttgtggagacacgcgaatgttgccctttgggacggtctctggtcaaccagcgccattactcagagggacccccgtgacaaatttccccggggggcccaaatttccacctctttcgaaagcccgatgggagaccatttcaggaggagaacttacgcg

SEQ ID NO: 620467 - DNA, 439 bp, Homo sapiens
tattctgttcccaaacacagaaaagggggagagaggtctccctccccacaccactcgccactctgggttcctgagttcccacgcccaccctccaagattttccttctttttttgtttttgtttttagtatttattgatcattattgggtgtttctcggagagggggatttggcagggtcataggacaatagtggagggaaggtcagcagataaacatgtgaacaagggtctctggttttcctaggcagaggaccctgcaggcttccgcagtgtttgtgtccctgggtacttgagattagggagtggtgatgactcttaacgagcatgctggcttcaagcatctgcttaacaaagcacatcttgcaccggccttaatccatttaaacctgagtggacacagcacatgttttcagagagcacagtgtttggggaacaggtg

SEQ ID NO: 620468 - DNA, 784 bp, Homo sapiens
  misc_feature (70)..(70): n is a, c, g, or t
  misc_feature (121)..(121): n is a, c, g, or t
gaagagagccctggtctccggggcgtacataggaccagccagccctatcccggatacaaacccgggtcgnctccctccttccgaacggggaccccaccgggctatcgaggaacctcgccanctgcaggcctatgggaccttcaagccgaggctcgccacaaccagttgggacctgggccccgtgacagcctgcggggcccttcaggccgggctatcgttgccgacgctacaatcttgcggccccctgccttcaggggcccgccccattgagcggcaaggcaagaatccaacaagggacgccggccttgacgggaggctatttagaggaccccccccgtataaagcccactggtggtgtgcccaccaaagcccatgtaatgcccccttttgtgcacccacgatagcacaaaggggtgcgccaggaattgataccccgaggcgaaactccaccaagtctcaacgcctatgtgacaccatgtgtgtttccagcaaaaaactagagcctgttgcgcaattcccgcggtggtcaacccaaagcttccttccgaatagccggcgtgatgcaacaggcacaacctcctattggacacgttctcgggaggcacccaaactttgtggaggtcggtgtgcacacccaaaagtggtcgtttgggccccccacaaggaaatcggtcggttgcccccaggaaacctttgtgggttaggtaagcacacaggcggttatccacggtccgcgagacagggcccccgaacagtaacaatgcggcactctcccgtgggatgc

SEQ ID NO: 620469 - DNA, 113 bp, Homo sapiens
ccacgcttggtctgatcgaagccggagctccgttttctgtccgggcgctgaagcattgcccaacgccacgacgctgcattgccccggttcggtccggctgctctcgctggatg

SEQ ID NO: 620470 - DNA, 167 bp, Homo sapiens
gaccaaggattatcttctcgaaaggcacactgtattacctatatccccatatacaggcctgtggtgctccatgaggttcagtagctagggatgttccctctttccttcaagtgcctgttgcatatatgaaaggaaggagaaatcccaaagcagattccttgtgatcg

SEQ ID NO: 620471 - DNA, 202 bp, Homo sapiens
tgatggtgtgatctcggttcacagcaagccctgctcttggtaagaggtgaagccagctgagcttctgggtcgggtgggaacatggagaacgtttgtgtctaactaaaggattgtaaatgcaccaatcggcgctctgtgtctagctaaaggattgtaaatgcaccaatcagcactctaaaatggaccaacaagcactccaaca

SEQ ID NO: 620472 - DNA, 295 bp, Homo sapiens
aaaaaataacttgttttattaccatgatttgggaaaagcaacagggtagacagttcaaggaaggacacagacagtgccctgttttaggttccaaattttttttttttaatggggggggggagctgaccaatgatgtcattcgggggaggaaatggattgtagagtaaggttttgacatttgaaaggggcattgacttgtcaatgatgcctaactatgaacgcattatggagaaggatgtgcatcgttttttggggatgaaaactagaaagtgggatatgggttatcctttgggcc

SEQ ID NO: 620473 - DNA, 970 bp, Homo sapiens
  misc_feature (492)..(492): n is a, c, g, or t
  misc_feature (518)..(519): n is a, c, g, or t
  misc_feature (533)..(533): n is a, c, g, or t
  misc_feature (546)..(546): n is a, c, g, or t
  misc_feature (595)..(595): n is a, c, g, or t
  misc_feature (601)..(601): n is a, c, g, or t
  misc_feature (613)..(613): n is a, c, g, or t
  misc_feature (621)..(622): n is a, c, g, or t
  misc_feature (634)..(634): n is a, c, g, or t
  misc_feature (696)..(696): n is a, c, g, or t
  misc_feature (703)..(703): n is a, c, g, or t
  misc_feature (705)..(705): n is a, c, g, or t
  misc_feature (741)..(741): n is a, c, g, or t
  misc_feature (758)..(758): n is a, c, g, or t
  misc_feature (761)..(761): n is a, c, g, or t
  misc_feature (771)..(771): n is a, c, g, or t
  misc_feature (793)..(793): n is a, c, g, or t
  misc_feature (813)..(813): n is a, c, g, or t
  misc_feature (815)..(816): n is a, c, g, or t
  misc_feature (824)..(824): n is a, c, g, or t
  misc_feature (859)..(859): n is a, c, g, or t
  misc_feature (970)..(970): n is a, c, g, or t
ccacgcgtcgcaaatggcggacttcgacacctacgacgatcgggcctacagcagcttcggcggcggcagagggtcccgcggcagtgctggtggccatggttcccgtagccagaaggagttgcccacagagcccccctacacagcatactgtaggaaatctacctttcaatacggttcagggcgacatagatgctatctttaaggatctcagcataaggagtgtacggctagtcagagacaaagacacagataaatttaaaggattctgctatgtagaattcgatgaagtggattcccttaaggaagccttgacatacgatggtgcactgttgggcgatcggtcacttcgtgtggacattgcagaaggcagaaaacaagataaaggtggctttggattcagaaaaggtggaccagatgacagaggcttcagggatgacttcttagggggcaggggaggtagtcgcccaggcgaccggcgaacaggcccccccnatgggcagccgcttcaaaaatagaanncccataaaataganaaaaaatagattnaaaaaaacccacagaagaggaaagagcacagagaccacgactccagctnaaaccncgaacagtcgcnacgccccnnaatcaagtagcnaatcccaactctgctatcttcggggggtgccaggcctagagaggaagtcgttcaaaaagagnaagaatnancctgcggttgggagggaatggggcgtggggggttanaacaagaccacagcctnggngagtcccagngcaaccgtcctgcagccgccantcctgcgcctgccattggcntnnaaaaaaangaaacacagcttgtgagtgcatgtcagctgttaanaagtggtttttagtacattctgggctttgctgtatctatctaatgcctgtttgtgcgtttttttctttcttccgctgcttccccattttcttctgtcctttttctcctgcn

SEQ ID NO: 620474 - DNA, 938 bp, Homo sapiens
aggcagagcttgcagtgagccgagatcgcaccactgcagtgcagcctgggagacagagcgagactccatctcaaaaaaaaaaaaaaaaaaaaaaaaatttacccctttcttttttgttttacccctttaagccccccgcaccggggttgttccgggacattattcatctcttggttttgcaccctttctcctcttccggcgttataacttcccaggaggggttcccccgagaaagggtggagaccgttgcacggggttacagggcagcagtaagacgcgttcgccactgtgtggaagtgtgggtcgcgtgactgaacacatttttccaccacacagggtgtttccactcaattccctgtgcacccaaccttctcacattgtgaggacccccaatgtgattttacccccgcggaaaaatcatatttctatacgtgcgcaccacctataaggtcgtgcggcacacaaaaagaggaattctctttcaaccccagggggaatattctcccaagaaacaccacgcccttataaaattgtgccacgcgcggggaaaaccacgtggcaaaacagctggctagctcctcactaactattattatctttagtggacacaaggccacgatacttcccacaaaggtcttataccccacaataatacacacgcggcatcactaccccaccaactattatattatacaccaacaccacaacacccccacaaagacacacgatcgattacacccccacacctgggtggtgcaacccaccgcgacccaccaacaaaatcacacgctggtggcacagaaccacaagcctctcatacaccaacccccgcccgtggccagcgacgaccaaccaaacgcaccaccacccacccccaccacagaccgcggacgcggaacacccacacaagcaccgcgactccccggacaaaacgccgc

SEQ ID NO: 620475 - DNA, 1088 bp, Homo sapiens
  misc_feature (209)..(209): n is a, c, g, or t
ccacgcgtccgggaggctgcagtgagctatgactgctgccactatcactccagctggggcaacagaaagagactctatctccaaaaaaaaaatagtagctccctttacgaaactcctttctcctggttcttttggatttctgctgtgtttgccttgtggtgtctgcattaagtgctagtgatctgcgtattaggcgaaagttcaccagngacagtcgtgcgtgggaaattgctaggaataaaggtgccagctttcctttcttcagagtaagatagtgagcgcagcgataaggcttccacagtggcttaaagcaggcgctggtcttctggaactgggctgggctggtgcagctcctggtcctggcctggaaaccacaagggtgtgggagttgggaacgacagcgagctggtctctggtttaaaaacatttccagagttgaagtccagatgtggcctcacattaacccacaggtggggctgcaaattcattgacagtgtggttacaaaaataaacaatcaaagtgctgggattacaggcgtgagccgccgtgcccggcccccttttcttttcaggagcagaactacaaagatgagaaattaccagaagcctcgccttttcctaagcaccagcggaaggagctgtgccccgggatgcgagtgagggtggagggcgcgtcagccacgggtgggccttgttgtcgcctgtatcggcccaggttaggttgttgggctcttactttgggctgacctgacccccgaagagaaccagacaactctggtcctccaagactgggattggccggtttcggcccaagcgtttaaggctctattaactccagggccccaagacagagaatccgccagacccgggacccatggatttgggcaacaccccgggcccccaaccccccaaagacacggctagcaccggtgttccctgccgacaggagagctgaagcaagccggacacacgccgacacgcatgggcagcgcgaacgtgcggacggaccaccgagagagaaccccctagaaatacagggcgggaggacaataacaacaagaacgagcgcgggcaagatacgcgggcag

SEQ ID NO: 620476 - DNA, 660 bp, Homo sapiens
  misc_feature (492)..(492): n is a, c, g, or t
  misc_feature (516)..(516): n is a, c, g, or t
  misc_feature (527)..(527): n is a, c, g, or t
ccacgcgtcgcaaatggcggacttcgacacctacgacgatcgggcctacagcagcttcggcggcggcagagggtcccgcggcagtgctggtggccatggttcccgtagccagaaggagttgcccacagagcccccctacacagcatactgtaggaaatctacctttcaatacggttcagggcgacatagatgctatctttaaggatctcagcataaggagtgtacggctagtcagagacaaagacacagataaatttaaaggattctgctatgtagaattcgatgaagtggattcccttaaggaagccttgacatacgatggtgcactgttgggcgatcggtcacttcgtgtggacattgcagaaggcagaaaacaagataaaggtggctttggattcagaaaaggtggaccagatgacagaggcttcagggatgacttcttagggggcaggggaggtagtcgcccaggcgaccggcgaacaggcccccccnatgggcagccgcttcagagatggncctcccctccngtggatccaacatggatttcagagaaccacagaagaggaaagagccatgggaccgacgatcccgctgaagctcaacagtcgaagcccctcatcagtaggcatcccaacctgcaaaacgaggggcaggctaaaa

SEQ ID NO: 620477 - DNA, 210 bp, Homo sapiens
ggacgtgactcagaatacctctgtgcagtattatatagtgacagacttaatccttatccaccataagccccacaggctctccgaaatatccacttgcagattctacaaaaagtagtgtttcacaactgctcaatccaaaagacaaggttcaactactgtgcagaggcatgctacagatcaccaaaccaggtttcgtccagcaatgcatta

SEQ ID NO: 620478 - DNA, 720 bp, Homo sapiens
  misc_feature (552)..(552): n is a, c, g, or t
  misc_feature (576)..(576): n is a, c, g, or t
  misc_feature (587)..(587): n is a, c, g, or t
ccacgcgtcgcaaatggcggacttcgacacctacgacgatcgggcctacagcagcttcggcggcggcagagggtcccgcggcagtgctggtggccatggttcccgtagccagaaggagttgcccacagagcccccctacacagcatactgtaggaaatctacctttcaatacggttcagggcgacatagatgctatctttaaggatctcagcataaggagtgtacggctagtcagagacaaagacacagataaatttaaaggattctgctatgtagaattcgatgaagtggattcccttaaggaagccttgacatacgatggtgcactgttgggcgatcggtcacttcgtgtggacattgcagaaggcagaaaacaagataaaggtggctttggattcagaaaaggtggaccagatgacagaggaatgggtagctctcgagaatctagaggtggatgggattcccgggatgacttcagttctggcttcagggatgacttcttagggggcaggggaggtagtcgcccaggcgaccggcgaacaggcccccccnatgggcagccgcttcagagatggncctcccctccngtggatccaacatggatttcagagaaccacagaagaggaaagagccatgggaccgacgatcccgctgaagctcaacagtcgaagcccctcatcagtaggcatcccaacctgcaaaacgaggggcaggctaaaa
